United States Patent Application Publication US 2014/0128277 A1 - sequence listing, part 7

SEQ ID NO: 5670 - DNA, 3353 bp, Homo Sapiens
  NM_032597
atcaagtaaaagaaactcctttcaaaggagggcagaagcgtggctgagtttaaaaaacatagattttggagacaggtcaagttgagtttgccccttccctgtcctgtatgtctttgggtgacataaccttgctgttcctcagtttcagtattgtagaactgttaaaagaataaatgttagtgcatgtcaacaccttctacacagttcccagaacataaggaatattccataagttttagttcctttataactcatgaacatatgtgtaaggacttgtttcgtatataccatctattctttgtttaccatatgtttgtaagcaaattgacaagagagtaagtcttctggatacagtacttttcaccaggaagatggggggctgagcatgctctagaattctaaaactctgtgactcaactatgattctgagattctactactgagtagagtcatcactaagggctcatctctaagggctccatgtgactctggtggagaggtagatcatgatttgggcggcaatgtttgctcactctttcccttactagagttctgccatagaatcatggagtcaacatcccaggacagaagggcaactcacgtcatcactataaaaccaaacgaaactgtattgactgcatttccctacagacctcatagctctctgctggattttctgaagggagagccaagagtcttgggggctacccagatcctgcttgctctaatcattgtgggctttggaactatatttgcacttaattacatcggtttctcccaaagacttccccttgttgtcctcacaggatatccattctggggagcacttatttttattcttacaggatacctcacagtaaccgataagaaatcaaaacttctgggtcaaggtgtcacgggcatgaatgttatcagctccttggttgcgataactgggattactttcaccattctcagctacagacatcaagacaagtactgccagatgccatcctttgaagaaatatgtgttttcagtagaactcttttcattgttctgtttttcttgccttcggatgttactcaaaatagtgaacaacctgccccagaagaaaatgatcaattacaatttgtgcttcaagaagagttttccagtgatgattcaacaacaaatgcacaatctgttatctttggaggctatgctttcttcaagttaacactctctaggagtcctttagtctcccaaccaggtaataaaggtagagaatttgtgccagatgaacaaaagcaaagtatccttccatctcccaaattttcagaggaagaaattgaacctttgcctcccacactagagaaaaagccctcagaaaatatgtccattcagctagactctacatttaaacaaatgaaagatgaagatctacaatctgctattgtacaaccttctcaaatgcaaaccaagcttctgcaggaccaagctgcgtcactccaagtttttccatcccattctgcactaaaactcgaagatatatcacctgaagacttgccatcccaagctctaccagtagaaggcctgtcagaacaaaccatgccatctaagtctacatcatcccatgtcaaacagtcttctaatctgacagctaatgacctgccccctcaaggcatactatcccaagacacatcatctcaagatatgctgtttcatgacatgacatcccaagatatgcaatccctagatatgctatctcaagacacaccatcccacgccatgccacctcaagacataccttcccaagatatgctatcccaagctctatcagcgcatgccatattacctgaagcctcaacatcccatattgtgcagttccctgaaatacaacacctacttcagcagcccccagatcttcaaccagaaaacactgaacctcaaaaccagcaaattttacaaatgtcatatcaagatattagatcagaagttatggaagagaccaaagaatggaaatctgaggaggaactccatagaagaaaatcctcaagacggcattccttaaaccagcaaaccaaagccttgcaatacttaaggagacattctttagacgtgcaagccaaaggccagaaatcctcaaagaggcattccttagatcagcaaagcaaaggctggcaatctccaaagcagaaatccttagaccagcaaatcaaagactggctatccccaaagaggcactccgtagataagcaagctcaacttaatcaaactaaagagcaactcccagatcagcaagctgaagatcagcaagccaaaggggaacaatacccagaaggacaatctaaagatggacaagttaaagaccagcagactgataaggagcaaaactcaaagaagcaaacccaggatcagcaaactgaagaccagccggcccaagagaagaaatccccgaaaggacaattccaaaatgttcaagccgaaggacagcaagctcaggtggagaaagtgccaaaactgttatgccaagattcagaatcccaaatacagcaataccaattctggcaattccacaaaggcaatctccaggctggacaacccaggactgtcaatcttttggccaagaatcccctgactggataactcagggctggagaaacaaagattataaagcacgagaatggcaatttgaaatgaagcactggcaaacacaggatctattagagaaagaagccctaaagcagaaagctctataccaagaagtccaaacccagcacgcaacagcccaacataacctagaatgtcaagacactcaagataaagaccaacaagaccttcaatccagagttacacaaaaaggagatatgtacactagagacatcaaaccaggggacatgaaatgtatagggcaaacctcaggggacctgcaatcagaagacgtgaaggcagattttcattcttcttctggccaaagctcagtacaagacacatgtttagcctatttgtccaatctagattcagaacaagatgtgcaaccagacacttcagcttcctcaaattcatataaagaagatgtgaatttaacttctacttcatgtgatccaaaagatcaacagcaatctgaagactctgactaacatgcagaatctacccaataccacactgcccccattaatggaattaaattgggaaaaacaatattgcctcctccaatctgtgttctcaactgtggttgccacctcattaacttacaaaaaaatgaagggcatgctgagcactcaaacaatttgttcttacttaaaataaaatgacaacaaaccaaatgttaacactgtatcatcactttatgtatgtgaagaaataattcacatgtatattccttgtcatcaaa

SEQ ID NO: 5671 - DNA, 3121 bp, Homo Sapiens
  NM_032603
taggactgatctccaggaccagcactcttctcccagcccttagggtcctgctcggccaaggccttccctgccatgcgacctgtcagtgtctggcagtggagcccctgggggctgctgctgtgcctgctgtgcagttcgtgcttggggtctccgtccccttccacgggccctgagaagaaggccgggagccaggggcttcggttccggctggctggcttccccaggaagccctacgagggccgcgtggagatacagcgagctggtgaatggggcaccatctgcgatgatgacttcacgctgcaggctgcccacatcctctgccgggagctgggcttcacagaggccacaggctggacccacagtgccaaatatggccctggaacaggccgcatctggctggacaacttgagctgcagtgggaccgagcagagtgtgactgaatgtgcctcccggggctgggggaacagtgactgtacgcacgatgaggatgctggggtcatctgcaaagaccagcgcctccctggcttctcggactccaatgtcattgaggtagagcatcacctgcaagtggaggaggtgcgaattcgacccgccgttgggtggggcagacgacccctgcccgtgacggaggggctggtggaagtcaggcttcctgacggctggtcgcaagtgtgcgacaaaggctggagcgcccacaacagccacgtggtctgcgggatgctgggcttccccagcgaaaagagggtcaacgcggccttctacaggctgctagcccaacggcagcaacactcctttggtctgcatggggtggcgtgcgtgggcacggaggcccacctctccctctgttccctggagttctatcgtgccaatgacaccgccaggtgccctggggggggccctgcagtggtgagctgtgtgccaggccctgtctacgcggcatccagtggccagaagaagcaacaacagtcgaagcctcagggggaggcccgtgtccgtctaaagggcggcgcccaccctggagagggccgggtagaagtcctgaaggccagcacatggggcacagtctgtgaccgcaagtgggacctgcatgcagccagcgtggtgtgtcgggagctgggcttcgggagtgctcgagaagctctgagtggcgctcgcatggggcagggcatgggtgctatccacctgagtgaagttcgctgctctggacaggagctctccctctggaagtgcccccacaagaacatcacagctgaggattgttcacatagccaggatgccggggtccggtgcaacctaccttacactggggcagagaccaggatccgactcagtgggggccgcagccaacatgaggggcgagtcgaggtgcaaatagggggacctgggccccttcgctggggcctcatctgtggggatgactgggggaccctggaggccatggtggcctgtaggcaactgggtctgggctacgccaaccacggcctgcaggagacctggtactgggactctgggaatataacagaggtggtgatgagtggagtgcgctgcacagggactgagctgtccctggatcagtgtgcccatcatggcacccacatcacctgcaagaggacagggacccgcttcactgctggagtcatctgttctgagactgcatcagatctgttgctgcactcagcactggtgcaggagaccgcctacatcgaagaccggcccctgcatatgttgtactgtgctgcggaagagaactgcctggccagctcagcccgctcagccaactggccctatggtcaccggcgtctgctccgattctcctcccagatccacaacctgggacgagctgacttcaggcccaaggctgggcgccactcctgggtgtggcacgagtgccatgggcattaccacagcatggacatcttcactcactatgatatcctcaccccaaatggcaccaaggtggctgagggccacaaagctagtttctgtctcgaagacactgagtgtcaggaggatgtctccaagcggtatgagtgtgccaactttggagagcaaggcatcactgtgggttgctgggatctctaccggcatgacattgactgtcagtggattgacatcacggatgtgaagccaggaaactacattctccaggttgtcatcaacccaaactttgaagtagcagagagtgactttaccaacaatgcaatgaaatgtaactgcaaatatgatggacatagaatctgggtgcacaactgccacattggtgatgccttcagtgaagaggccaacaggaggtttgaacgctaccctggccagaccagcaaccagattatctaagtgccactgccctctgcaaaccaccactggcccctaatggcaggggtctgaggctgccattacctcaggagcttaccaagaaacccatgtcagcaaccgcactcatcagaccatgcactatggatgtggaactgtcaagcagaagttttcaccctccttcagaggccagctgtcagtatctgtagccaagcatgggaatctttgctcccaggcccagcaccgagcagaacagaccagagcccaccacaccacaaagagcagcacctgactaactgcccacaaaagatggcagcagctcattttctttaataggaggtcaggatggtcagctccagtatctcccctaagtttagggggatacagctttacctctagccttttggtgggggaaaagatccagccctcccacctcattttttactataatatgttgctaggtataattttattttatataaaaagtgtttctgtgattcttcagagcccaggagtcagtgctggtggttggagggacctgcccccactggttcatttaaccctctgtctcggtgccctcagaacctcagccagaaaggcaaggaggaaatcagagcaggagcctcatactcttggtgatctattcattctgtgacctcaggggtcacatataaggtcagtgtttctcgtccccgccggatctgcactgccaactgggattgggttcgaacagcttcataaacatcttcagcattttgtaccatctgctccccaatggccaaaatcacatcaccaggccgcagaccagccc

SEQ ID NO: 5672 - DNA, 2612 bp, Homo Sapiens
  NM_032620
actttactagtcaagccgcggagtgggcggggccccctgcccagacttgaagccacacaggcaggtcgggcaggcgggtcgcaggttgtaaatccatgtggcgggggctttggaccctggcggcccaagcggcacgtgggcctcgcagattgtgcacgcgccggagcagcggcgcaccagcccccggctccggcgccaccatcttcgcgctaagctctggccaaggccgctgcggcatcgcagtgatccggaccagcggccccgccagcggccacgccctccgaattctcacagcaccccgagacctgccccttgctcgccacgccagcctgcgcctgctcagcgatccccgctccggggagcctctggaccgcgcactggtgctctggttcccaggtccccagagtttcaccggtgaggactgcgtggagttccacgtgcatggaggcccggcagtggtgagcggcgtcctgcaggccttgggcagcgtgccagggcttcgaccggcggaggcaggcgagttcaccagacgggcgttcgccaatgggaagctgaacctgaccgaagtggaggggctggcggaccttatccacgcggaaacagaggcgcagcggcggcaggccctcaggcagctggacggagagctgggccacctctgccgtggctgggccgagaccctcaccaaagctctggcccacgtggaggcctatatcgatttcggcgaggatgacaacctggaggagggggtcctggagcaagccgacatcgaagtacgggcactgcaggtggccctgggtgcacatctacgagatgccaggcgcgggcagaggctccgctcaggggtgcacgtagtggtcactggaccccccaatgcgggcaagagcagcctagtgaacctgctcagtcggaagcctgtgtccatcgtgtccccggagccagggaccacccgtgacgtgctggagaccccagtcgacctggccggatttcctgtgctgctgagcgacacggctgggttgcgggagggcgtggggcccgtggagcaggagggcgtgcggcgcgcccgggagaggctagagcaggctgacctcattctggccatgctggatgcttctgacctggcctctccctccagttgcaacttcctggccaccgtcgtagcctctgtgggagcccagagccccagtgacagcagccagcgcctcctcctggtgctgaacaagtcggacctgctgtccccggagggcccaggtcccggtcctgacctgcccccgcacctgctgctgtcctgtctgacgggagaggggctggacggcctcctggaggcgctgaggaaggagctagctgcagtgtgtggggacccgtccacagatcccccgctgctgacccgagcaaggcaccagcaccacctccagggttgcctggatgccctcggccactacaagcagtcaaaagacctggccctggcggcagaggcgctgcgggtggcccggggtcacctgacccggctcacaggtggagggggtaccgaggagatcctggacatcatcttccaggacttctgtgtgggcaagtgacgggatccagggaagtcgcacccaagctgcgtggagacccaggagcctcgggggatctggaaacagtttaggccaattgggattctcattcgcctgggaaagaacttgattctcaaatagtgaagcaacacagctgagaggtagtgagatccctgcagggactccctggagattcaggccctggaatggggctgaatggaggtcccgttcgacccttgatgctggggcatccgggttgggatggagataggaggatctcagtatatttgtttcgtagttttttatttattttgcaaataccaaaggaatgtaaaaaaaactcaggtgatctagaagtgtttattttcttcccttcccttcccttccctttccttttccctttccctttccccttccccttccccttccccttcccctacccttccctcctctgtctattgcccaggctggagtgcagtggtgcgaccttggctcactgcaacctccatctccggggctcaagcgcttctcctgcctcagcctcctgagtagctgggattacaggcatgtgccagcatgcccggctaatttttttctttttttgagacagagtctcgctctgtcacccaggctggagttcagtggtgcgacctcggcttactgcaacctccacctcccgggttcaagtgattctcctgcctcagcctcttgagtagctgggactacaggcgcacaccaccacgccaggctaatttttgtatttttagtagagacaaggtttcaccatgttgaccaggctggtcttgaactccttgacctcaggtaatctgcctaccttggcctcccaaagtgctgggatcacaggcgtgagctatcacacctggccccagaagtgtttcaacatggaaattttccttagcccttctgtggttgtcatggcttaatgtgtgtctttccagaactttgaatgtttgcatacttgtggatgtacctttcaaatatgtttgtcttgtgtatcatatataaatggtattgtgttcattgctctaaaaaaaaaaa

SEQ ID NO: 5673 - DNA, 914 bp, Homo Sapiens
  NM_032621
gggacgggggcggagcctctggcgatgacaacagccacacgtgatcggccaacactgagtcttacctcgttgtggcgtcagaaccgccgtcgctcgctcccttctcggcagtggtacctgttcccggtgtccctgaggacgtgcgggccaggtacggccccgaaagtaggaagcggagggggagcaggtttgcggggccaagtgttgcggcgacgcacctcacgtcgagaatcgggaggaggagactgcaaggataggcccaggagtaatggagtccaaagaggaacgagcgttaaacaatctcatcgtggaaaatgtcaaccaggaaaatgatgaaaaagatgaaaaggagcaagttgctaataaaggggagcccttggccctacctttgaatgttagtgaatactgtgtgcctagaggaaaccgtaggcggttccgcgttaggcagcccatcctgcagtatagatgggacataatgcataggcttggagagccacaggcaaggatgagagaggagaatatggaaaggattggggaggaggtgagacagctgatggaaaagctgagggaaaagcagttgagtcatagtttgcgggcagtcagcactgatccccctcaccatgaccatcacgatgagttttgccttatgccctgaatcctgatggtttccctgaagttaatagggagacccctgcttcctaaacttacacatttgtggtgtacctttgtcgtaaacgttttgatgttacctatttcttgtgggtctcctattaccagcttctaaatgaatgttgtttttgacccagtttgtaagtttctgtcagcaggagagttttacctattgcatggaaagatgctcattatatattgtgaagttaataaaacagttttaaaaagcaaaaaaaaaaaaaaaa

SEQ ID NO: 5674 - DNA, 1780 bp, Homo Sapiens
  NM_032626
gccaggccgcgtccgccatagtacctggcttggaggtgtcgccgccgctcggtgagagcccccgagcggcagggggccaacacaaaaagggagccggagaagccctagccgctgcccagcagcttgcgggcgtgttctcgcggttccgggcctcaaggcgacggaaacgaaaggcgagcgaagcgcggaggatccggcgagaagaagcgtcagggagcctcggcggtgtccccggggtccgccgaagccacccggccgccggctggggcccggggtggtgaggaagtgctccgaggcctcgccgaggcctagcgccggctttgtgtccgaggcggcggcggcggcggggggaggcggagccgggggcggcctgcgggaaggcctctcctccgccgaccgcgcgttttcggcctaggccgtggggccgctcgtggcctccggggagcaggcgccaggggtttgtgtgcggtgggggcctgggcctgggcctggggaagctgacgccggtcgtccggaagccaggaggaggcgtgaggccgctcgtggactccgggcctaggccctctcccctcaaccttctcccggggcctgggtcaccccaatccacggagagagagacccgccgggaggtgcggccgcgctatggacccctgaccccgtggggtcgctcggactcttaacgtgtggactgaccgctactgactgcaccgccaatccccccgtctctgccggccccttagcatgagcgagggggacccagccgggtgacattgtgcccgttggcggattctcgatttcccctcttccccgtcctcgtcctcctcctcccccatgaagtgattctgagtatcggggggtctctggattattgttctgacgaacccctgcttgtggttggggggtatttaatctgaggccttagggtccttcggtgtctttgagtgttttgtgtgtacatattttgctcttaaagtttataaatatacgtatattgagagtgtccacgtctcctcgctgaaccttaggaatcccttggcaccatgtcctgtgtgcattataaattttcctctaaactcaactatgataccgtcacctttgatgggctccacatctccctctgcgacttaaagaagcagattatggggagagagaagctgaaagctgccgactgcgacctgcagatcaccaatgcgcagacgaaagaagaatatactgatgataatgctctgattcctaagaattcttctgtaattgttagaagaattcctattggaggtgttaaatctacaagcaagacatatgttataagtcgaactgaaccagcgatggcaactacaaaagcagtatgtaaaaacacaatctcacactttttctacacattgcttttacctttataatgtagcagtgaagtaaatcattttagaacttaatatccaactgatcatagtacatattgtaaataaaatgtattttgatgacagctcagttgaatatggataatatgtggcatcacttgcacacttattttgtagaaatgggtaatttgtgcccgtaacactgtttcatattaaatatgatagcattatccctgtatgacactgtgttgtacagttaatgtatgatcctttttagatcgtttaggttttacactaaggaacatgatgacatgttctacatttgtctgtctatagttagtattttgtatgtatgtacaggctgttgtgtgctttttgtttcttgcaataaaaaatgtttggagtgtaaaaaaaaaaaaaaaaaa

SEQ ID NO: 5675 - DNA, 1817 bp, Homo Sapiens
  NM_032627
cgcccgcgggcggcgtagaggcagcgggcgggggcgcgcgcggcgggaggaggggagcgcgcgtttcccggaacagcccgcgcggaggaaagggaggaaaaaaagccaccctgcggccggggccggagctggagccgccgctgccgccgccgccgcggccgtctggagctcccccgcgcggacgatgcctgccgtgcccgcctggggctcggggcggtgaggcccggggcgcggggtagctatggcgacggcaagcgcggcccgcggcgccgcctgacaggtgtgggccccggcggcggcggcgtggagcagcatgtacgccaaggggggcaagggttcggccgtgccctccgacagccaggcccgcgagaagttggcgctgtacgtttatgagtacctgctgcacatcggtgcccagaagtcagcccagaccttcctgtctgagatccgatgggagaagaacatcacgctgggggagccccctgggttcctgcactcctggtggtgcgtcttctgggacctgtactgcgcggcgcctgacagaagagaggcctgcgagcactccggcgaggccaaggccttccaggactatagtgctgcagccgcccccagccccgttatggggagtatggccccaggtgacacaatggccgcaggctccatggcggctggcttcttccagggcccccccggctcccagccgtccccccacaaccccaacgcccccatgatggggcctcacggtcagcccttcatgtcaccgcgcttcccagggggcccccggcccaccctgcggatgccgagtcagcctcccgcaggcctccctggctcccagcccctcctccctggcgccatggagccctccccacgagcccaggggcatccgagcatgggcggcccaatgcagagggtgacgcctcctcgtggcatggccagcgtggggccccagagctatggaggtggcatgcgacccccacccaactccctcgccggcccaggcctgcctgccatgaacatgggcccaggagttcgtggcccgtgggccagccccagtggaaactcgatcccctactcctcctcatcccccggcagctacaccggacccccaggaggaggtgggccccctggaacacccatcatgcctagccctggagattccaccaactccagcgaaaacatgtacactatcatgaaccccatcgggcagggcgccggcagggctaatttcccgctcggccctggcccggagggccccatggccgccatgagcgcgatggagcctcaccacgtgaacggatccctgggctcgggcgacatggacgggttgccgaagagttcccccggcgccgtggccggcctgagcaacgccccgggcaccccgcgggacgacggcgagatggcggccgccgggaccttcctgcacccgttcccgagcgaaagctactcgccagggatgaccatgagcgtgtgatggggcggcagccccgggcctctctgcgggcctaggcttctgcccagcgcccctgctcagggcgaggggctgaggtcacacctcgggcacctggactcctggccaatcaaggcttgcccagctgggaggccccacacgaaagactcttaccattttattaaaaacgcaaggacctcagagacgttcttttctgtatggacccttcctgccatttgtattttgtcccagagagaaaggctctttggggggcccctctccccaggacgtcagggggtggggcccataaataaatggaagctggttttggtttttggtaaaaaaaaaaaaaaaaaaaaaaaaaaaaaaa

SEQ ID NO: 5676 - DNA, 996 bp, Homo Sapiens
  NM_032630
gcaaatgcgtttccggtggggtgggcggggcttcgcgtctccttctacggatatctgtggaccttatggaagcaaagactcttggaactgtaacgcccagaaaacctgtcttatctgtcagtgcaagaaaaattaaggacaatgcggctgattggcacaatttaatcctgaagtgggaaaccctcaatgatgcaggttttaccactgcaaataatattgccaacttgaaaatcagtttattgaataaagacaagatagaactagacagcagcagcccagcctcgaaggaaaatgaagaaaaggtgtgtctggaatataacgaggaactggagaagctgtgtgaggaactgcaggccaccttggatgggttgaccaaaatacaggtgaaaatggaaaagctgtcttcaactaccaagggaatttgtgaactagaaaactaccattatggggaggagagtaaacgaccccctctgttccacacgtggcctacaacccatttctatgaggtttcgcataagctcttggagatgtacaggaaggagctgctcctgaagcgcacggtggccaaggagcttgcccacaccggggatcccgacctcaccctgagctacctgtccatgtggctgcaccagccctatgtggagagcgacagcaggctgcatctggagagcatgctgctggagacaggccaccgagctctctgacgtcctgagacggctgcggacactggctccttccacgtctcaccaggcagacagtctgcctaggacccagtgccgcaggcctggatcagaccccaggatcagaccttggggtcttctggccagagcttgtcaccagccccatggcctctccaggcgtgctcatgcccacaacccgcggccagccccacgtggtgctgctcagccttctctgcccctcctgggaatctgtcattcgtgggtgcttcagagtaaaatcaatgagtttctgagcagaaaaaaaaaaaaaaaaaaa

SEQ ID NO: 5677 - DNA, 869 bp, Homo Sapiens
  NM_032635
gccctggccgtggcgaaagagccggcggagccggagacccgctcccggagacgccgcctcgcgatccccgcgcgggcgggaccgggcggccggcatcatgaccctgtttcacttcgggaactgcttcgctcttgcctacttcccctacttcatcacctacaagtgcagcggcctgtccgagtacaacgccttctggaaatgcgtccaggctggagtcacctacctctttgtccaactctgcaagatgctgttcttggccactttctttcccacctgggaaggcggcatctatgacttcattggggagttcatgaaggccagcgtggatgtggcagacctgataggtctaaaccttgtcatgtcccggaatgccggcaagggagagtacaagatcatggttgctgccctgggctgggccactgctgagcttattatgtcccgctgcattcccctatgggtcggagcccggggcattgagtttgactggaagtacatccagatgagcatagactccaacatcagtctggtccattacatcgtcgcgtctgctcaggtctggatgataacacgctatgatctgtaccacaccttccggccagctgtcctcctgctgatgttcctcagtgtctacaaggcctttgttatggagaccttcgtccacctctgctcgctgggcagttgggcagctctactggcccgagcagtggtaacggggctgctggccctcagcactttggccctgtatgtcgccgttgtcaatgtgcactcctaggcttggtgtctcagacattgatgtaccttttccctgcctcgctccaggttttagtgaagtaaacagtatttggaaagttaaaaaaaaaaaaaaaaaa

SEQ ID NO: 5678 - DNA, 1462 bp, Homo Sapiens
  NM_032637
cgggctgtagagccttgcgcgcgcagtggggatggaacgttgctaggcttagcgggtctggctgctgggggcccgagcagcacgctcggagccgccgcgcgccaaagcgggaatctgggaggcgagcagctctgcagttaatgcacgtattttaaactcccgggcctgcggacgctatgcacaggaagcacctccaggagattccagacctgagtagcaacgttgccaccagcttcacgtggggatgggattccagcaagacttctgaactgctgtcaggcatgggggtctccgccctggagaaagaggagcccgacagtgagaacatcccccaggaactgctctcaaacctgggccacccggagagccccccacggaaacggctgaagagcaaagggagtgacaaagactttgtgattgtccgcaggcctaagctaaatcgagagaactttccaggtgtttcatgggactcccttccggatgagctgctcttgggaatcttttcctgtctgtgcctccctgagctgctaaaggtctctggtgtttgtaagaggtggtatcgcctagcgtctgatgagtctctatggcagaccttagacctcacaggtaaaaatctgcacccggatgtgactggtcggttgctgtctcaaggggtgattgccttccgctgcccacgatcatttatggaccaaccattggctgaacatttcagcccttttcgtgtacagcacatggacctatcgaactcagttatagaagtgtccaccctccacggcatactgtctcagtgttccaagttgcagaatctaagcctggaaggcctgcggctttcggatcccattgtcaatactctcgcaaaaaactcaaatttagtgcgacttaacctttctgggtgttctggattctctgaatttgccctgcagactttgctaagcagctgttccagactggatgagctgaacctctcctggtgttttgatttcactgaaaagcatgtacaggtggctgttgcgcatgtgtcagagaccatcacccagctgaatcttagcggctacagaaagaatctccagaaatcagatctctctactttagttagaagatgccccaatcttgtccatctagacttaagtgatagtgtcatgctaaagaatgactgctttcaggaatttttccagctcaactacctccaacacctatcactcagtcggtgctatgatataatacctgaaactttactattagtgacaagagctggggttaggatccggttggactctgacatcggatgccctcaaacatacagaacttccaaactcaagtccagccataagctattttgccaacatgtcagagtaatctgtatttttgtatgtgatttctacttttatagacttgttttaaaacaataaaacacatttttataaaaatgagtgcttaaactaaaaaaaaaaaaaaaaaaaaa

SEQ ID NO: 5679 - DNA, 3468 bp, Homo Sapiens
  NM_032646
ttcagcttgtgggtagcactcgggccgagccatgcaggcggcgcgcgtggactacatcgctccctggtgggtcgtgtggctgcacagcgtcccgcacgtcggcctgcgcctgcagcccgtgaacagcaccttcagccccggcgacgagagttaccaggagtcgctgctgttcctggggctggtggccgccgtctgcctgggcctgaacctcatcttccttgtggcttacctggtctgtgcatgccactgccggcgggacgatgcggtgcagaccaagcagcaccactcctgctgcatcacctggacggccgtggtggccgggctcatctgctgtgctgcggtgggcgttggtttctatggaaacagcgagaccaacgatggggcgtaccagctgatgtactccttggacgatgccaaccacaccttctctgggatcgatgctctggtttccggaactacccagaagatgaaggtggacctagagcagcacctggcccggctcagtgagatctttgctgcccggggcgattacctgcagaccctgaagttcatacagcagatggcgggcagcgttgttgttcagctctcaggactgcccgtgtggagggaggtcaccatggagctgaccaagctatccgaccagactggctacgtggagtactacaggtggctctcctacctcctgctctttatcctggacctggtcatctgcctcattgcctgcctgggactggccaagcgctccaagtgtctcctggcctcgatgctgtgctgtggggcactgagcctgctcctcagttgggcatccctggccgctgatggctctgcggcagtggccaccagtgacttctgtgtggctcctgacaccttcatcctgaacgtcacggagggccagatcagcacagaggtgactcgctactacctgtattgcagccagagtggaagcagccccttccagcagaccctgaccaccttccagcgcgcacttaccaccatgcagatccaggtcgcggggctgctgcagtttgccgtgcccctcttctccactgcagaggaagacctgcttgcaatccagctcctgctgaactcctcagagtccagccttcaccagctgaccgccatggtggactgccgagggctgcacaaggattatctggacgctcttgctggcatctgctacgacggcctccagggcttgctgtaccttggcctcttctccttcctggccgccctcgccttctccaccatgatctgtgcagggccaagggcctggaagcacttcaccaccagaaacagagactacgatgacattgatgatgatgacccctttaacccccaagcctggcgcatggcggctcacagtcccccgaggggacagcttcacagcttctgcagctacagcagtggcctgggaagtcagaccagcctgcagcccccggcccagaccatctccaacgcccctgtctccgagtacatgaaccaagccatgctctttggtaggaacccacgctacgagaacgtgccactaatcgggagagcctcccctccgcctacgtactctcccagcatgagagccacctacctgtctgtggcggatgagcacctgaggcactacgggaatcagtttccagcctaacagactttcgggggttcctgcctcctttttccgttctggtttttaattagtgcaaatacaagctgcgtttctttaatagaaaccaaaggcatctggagcccgagaggcctcctgctgtggcagaggagcagctgggattcccgaccaaagccccagggggtgcagaagactcaccacgcgggccagcctctctcttttgccctgctctccacaccagaaatgcccccaggtgcttggctgcctcagaggtaccatccctgagctggctgcctggccctgctcacccctacgcctcgcccttgccaggaggggagtggcagtgaggagggggccaggtcaggcaccaccatcaagagagctgtgtgttctctctggtcccacaacgatgactctgcctcttgtcagcccagccaagagcccagacgacccctctgtcctcgttccctgtcctcgttccctgcaggtaacatgagaagggctgatcaggagatgctctttaagaagttcgcacccctgctgacaccagaacagcccaaatcagagttcccagggccagacaggctcttcctgggccacagaggggaggcatcaggaaagctctgcagtggggggctggtggctccggggctgggggatcacaggctggtgaaccccggtgggaacagaggtgaaagcctgccacattccgcctgtctccctaaccctccattgcctcgcctctattccagaatcaatgctgcagaatgtgttagctgcagataggcatggtctcaggtatgaacagacactttgaaacgactttaggtctttcttttctccagtgttttaaacatgttgattatccaaagaattgaaactcctagcacatccagtttttacaacagatttgcagctcattccttaccctggttaggtcactacttttgcagattttgctggcactgatctggagatctgcagatctggaggagacgggaaggagtcgattcttaaataaggatcagtgaggcatcctgtcccaagctactgtttggtggggatctgggttcatctcacccacagagggaggatctttaagaggagaaaaaagccaagagggaaagccagagttccctgttctaggggactagccaaatgcctacatcagctgtcccctccctgttgtctccaagtaagtttgccagaaaaggttttagcaaagtgctacaactgtgtctttataggaggataggcctctgccctgccccacccccaccacctgtccccacccagtgtcccaggccacaggagcttattggccaggagggaataatgtcccccaatactgcctgttgagggaccagagttggggtctttggtgcttccaacctcctgccaacctggagttcacaacaccagagccccacggcctcgcacactgaagcaggggcgtgcggtgactcggtgcttctgttttggaagaaccacctgtcatcaaaacatggacagcagggtgttctcagctcccagcgaagcctccacaacagaatggggccacagggcagccgggactccctgtctcacctacattaacccatgcatactgtatgccataaactcactttggtatatccgcgtcacatgcagagaggaactctgcgacgtcaaagtgttgcttcttaaagtttcattattggcaactagagggttgtttttaatgcatggaaactaaacagattcctcggggagttcctgaaggaaccaggtgggcaaacctttgcttatatacatgcggcctcacctggaagagaaataaaccacttgtactaaaaaaaaaaaaaaaaaaaaaaaaa

SEQ ID NO: 5680 - DNA, 4568 bp, Homo Sapiens
  NM_032656
tctcacggccggagttggtggtctgggaacccacgtgggctgggtttcggattgctctgctggtccggccgctggagcgcccaccctggcctagtcgccatggggaagctgcgccggcgctacaacatcaaggggcgccagcaggcgggccccggaccctcgaagggcccccccgagccgccccccgtgcagctggaactggaggacaaggacacgttgaagggagttgatgcaagcaacgcgctcgttctaccggggaagaagaaaaagaagaccaaagcccctcccctgtcgaagaaggagaagaagcctctgaccaagaaggagaagaaagtgctgcagaaaatcttagaacagaaggagaaaaagagccagcgagcagagatgctacagaagctgagtgaagtccaggcttccgaagctgagatgagactcttttataccacttccaagctaggcactgggaaccgcatgtatcacaccaaagagaaggctgacgaggtggtagccccgggccaggagaagatcagtagcctcagcggtgcccaccggaagcgtcgccgctggccctcagctgaggaggaggaggaggaggaggaggagtcggaatcggagctggaggaggagtcggagctggacgaggacccagctgctgagccggctgaggctggtgtggggaccaccgtggcacctctgccgccagctccagcacccagcagtcagcccgtgccggctgggatgactgttcctcctcctccagctgcagccccaccactgcccagggccctggctaagcccgccgtcttcatccccgtgaaccgctccccggaaatgcaggaggaacggctgaagctcccaattctctccgaagaacaagtaatcatggaggctgtggccgagcaccccatcgtcatcgtgtgtggtgagaccggcagcgggaagaccacacaggtgcctcagtttctctatgaagcaggcttcagcagtgaagacagcatcatcggtgtcacggagccccgccgagtggccgccgtggccatgtcccagcgagtggccaaggagatgaatctgtcccagcgggtcgtctcctaccagatccggtatgaaggaaacgtgacagaggagaccagaatcaagttcatgacggatggtgtgctgcttaaagaaatccagaaggacttcctgctgctgcggtacaaggtggtgatcatcgacgaggcccacgagaggagcgtgtacacggacatcctcatcggcctcctgtcccgcattgtgactctccgggctaagaggaacctgccactcaagctgctcatcatgtcggccacgctgcgggtggaggacttcacccagaacccacggctcttcgccaagccgccgccggtcatcaaggtggaatccaggcagttcccagtgactgtgcatttcaacaagcggacaccgctggaagactacagtggcgagtgcttccggaaggtctgcaagatccaccggatgctgcccgcaggtggcatcctggtgttcctgacggggcaggctgaggtgcatgcgctgtgccgcaggctcaggaaggctttcccaccctccagagcccggccacaagaaaaggacgacgatcagaaagactcggtggaggaaatgcggaagtttaagaagtcaagggccagggccaagaaggcgcgggctgaggtgctgccccagatcaacttggatcattactcggtgttaccggcaggcgaaggcgatgaggacagggaggcagaagtggatgaggaagagggggccctggactccgacctcgatctggacctgggggatggcgggcaagatggaggtgagcagccggatgcctccctcccgctccacgtgctcccgctgtactctctgctggccccagagaagcaagcacaggtctttaagcctccaccggaggggactcggttgtgtgttgtggccaccaatgtggccgagacgtcgcttaccatccctggcatcaagtacgtggtggactgtgggaaggtcaagaaacgctactacgaccgcgtcactggcgtatcctccttccgtgtcacctgggtctcccaggcatcagctgaccagcgagcgggcagagcaggacggacggagcccggccactgctacaggctgtattcatctgcggtttttggtgacttcgagcagtttcctcctccagaaatcacccggaggcctgttgaagacttaatccttcaaatgaaggcgctcaacgttgaaaaggtcatcaacttccccttcccgacgcccccctccgtggaagcccttcttgccgccgaggagctgttgatcgcactgggtgccctgcaaccgccccagaaagcagaaagggtgaagcaactgcaggagaaccggctgagctgccccatcactgcgctgggccggacaatggccacattccccgtggcaccccgctacgctaagatgctggcactgagccgacaacacggctgcctgccctatgccatcaccatcgtggccagcatgacggtgcgggagctgtttgaggagctggacagaccagcggccagtgacgaggagctcaccaggctgaagagcaagcgggcccgggtggcccagatgaagaggacctgggcagggcagggggcttctctgaagctcggcgacctcatggtgctgctgggcgccgtgggagcctgtgagtatgccagctgcacaccccagttttgcgaagccaacgggctgcggtacaaagccatgatggagatccggcgcctgcggggccagctgaccaccgcagtcaatgccgtgtgccccgaggctgagctcttcgtggatcccaagatgcagccgcccaccgagagccaggtgacctacctgcgacagatcgtgacggcaggcctgggggaccacttggcccgcagggtccagagcgaggagatgctggaggacaagtggaggaacgcctacaagacccctctcctcgacgaccctgtcttcatccaccccagctccgtccttttcaaagagctccccgagtttgtggtctaccaggaaatcgtggagaccactaagatgtacatgaaaggcgtctctagcgtggaggtccagtggatcccggccctgctgccctcttactgccagtttgacaagcccctggaggaaccagcccctacatactgccccgagcgggggcgggtgctgtgtcaccgggccagcgtgttctatcgcgtgggctggccgctccccgccatcgaggtggattttccagaggggattgaccgctacaagcactttgcccggttcctgctggaagggcaggtcttccgcaagctggcctcataccggagctgtctgctgtccagccccggcaccatgctgaagacgtgggccaggctgcagccccgtacggagagccttctgcgagccctggttgcagagaaggctgactgccatgaagccttgctggctgcttggaagaaaaaccccaaatacctgctggctgagtactgtgagtggcttccacaggccatgcaccccgatatcgagaaagcctggccccccaccactgtccactgaccagaaacctggctgcagggccgaggactggtttggggactggagggctggcagcagcctgtcaccgtgcgaccgtgaccacctggcatgggcttcgtggcctgctctcaggaagtgggtcaagccctgggaaccctcatccatgagagctcgatcccgtatgaagggtgctgccgcccgtgccatctggcccgggggtgactttttgaactgtttattatatggtggatgatgatttcatctcacgtgctggacgctgttctgttcagtgtgctctttggactacattagtcccctgtggagcagcagggctggagatctctgcagtcccttccccgcccgccctgccagaaggccgaggaggcacgtggagggcctccttcctgcaattcttccctctccagagtcagggagggctgcccagccctggcctcacagccgtcccagatgttaggtgagccactgagctctgtgttgaccttgaggggcctggctgggggcccccaggctccatgccttcttgggagggtggccgccaacgcctttcctgtgttatggcaacagggagtgggcatctcatctgcctgtggtcagctctcagacggcagggagcggagctgacgttggctgtgcttggtcaccgctgccatgccgcagaggatgcgcctagctgggctggggccacacgactattatgttggccttgaacggggactgcagagccctcagtttgtctcccttgttcctctgtggctgaggtgggagggggagggtggggtaggtcccccagcaagaaagagggacaggagcaccccaggcaggaccaaggagtcgggaggcccctgccttctgtcctccatggtgagggcacagatgtctccccagagcccagcgctggcagaatggattctgctcctggctttgcttctgcggcttcggtggagacagttatggaataaaatgttccttgcacccagaaaaaaaaaaaaaaaaaa

SEQ ID NO: 5681 - DNA, 3766 bp, Homo Sapiens
  NM_032663
tgcggccgcaggttccgctgtctcgggaaccgtcgtatccctcggtccggcggcggcggcggcggtagcggaggagacggtttcaggcctccggtgcggctgcaatgctgagctcccgggccgaggcggcgatgaccgcggccgacagggccatccagcgcttcctgcggaccggggcggccgtcagatataaagtcatgaagaactggggagttataggtggaattgctgctgctcttgcagcaggaatatatgttatttggggtcccattacagaaagaaagaagcgtagaaaagggcttgtgcctggccttgttaatttagggaacacctgcttcatgaactccctgctacaaggcctgtctgcctgtcctgctttcatcaggtggctggaagagttcacctcccagtactccagggatcagaaggagcccccctcacaccagtatttatccttaacactcttgcaccttctgaaagccttgtcctgccaagaagttactgatgatgaggtcttagatgcaagctgcttgttggatgtcttaagaatgtacagatggcagatctcatcatttgaagaacaggatgctcacgaattattccatgtcattacctcgtcattggaagatgagcgagaccgccagcctcgggtcacacatttgtttgatgtgcattccctggagcagcagtcagaaataactcccaaacaaattacctgccgcacaagagggtcacctcaccctacatccaatcactggaagtctcaacatccttttcatggaagactcactagtaatatggtctgcaaacactgtgaacaccagagtcctgttcgatttgatacctttgatagcctttcactaagtattccagccgccacatggggtcacccattgaccctggaccactgccttcaccacttcatctcatcagaatcagtgcgggatgttgtgtgtgacaactgtacaaagattgaagccaagggaacgttgaacggggaaaaggtggaacaccagaggaccacttttgttaaacagttaaaactagggaagctccctcagtgtctctgcatccacctacagcggctgagctggtccagccacggcacgcctctgaagcggcatgagcacgtgcagttcaatgagttcctgatgatggacatttacaagtaccacctccttggacataaacctagtcaacacaaccctaaactgaacaagaacccagggcctacactggagctgcaggatgggccgggagcccccacaccagttctgaatcagccaggggcccccaaaacacagatttttatgaatggcgcctgctccccatctttattgccaacgctgtcagcgccgatgcccttccctctcccagttgttcccgactacagctcctccacatacctcttccggctgatggcagttgtcgtccaccatggagacatgcactctggacactttgtcacttaccgacggtccccaccttctgccaggaaccctctctcaactagcaatcagtggctgtgggtctccgatgacactgtccgcaaggccagcctgcaggaggtcctgtcctccagcgcctacctgctgttctacgagcgcgtcctttccaggatgcagcaccagagccaggagtgcaagtctgaagaatgactgtgccctcctgcaaggctagagctgatggcactgtctgcactgtccaggaaaaaagtaaaactgtactgttgcgtgtgcaagcggccccactagagccttccagccttctggtgtgttctaagagcaggctccacctgggagccagccccagttcacaccaaaccaggctccctgaacagtcctgttcatgtgtgtaggtggttctgttgtgttaagaaagcattcattatgtccggagtgtctttttactcatctgatacaggtaattaaaagaactcagattcttgaagccaccgttttcatattgtaatgttaggtgttctcagaggggaggtacctttgtctaatcaacgtttccacttagatcttttatttttaataagcaggcccataaaaattgttgacaagaattaatgaaattattaaaggcaacaatttagaagaaaaagtgcctttcactttcgattgcttttgtagcacgtccattgtgaaatattccttccaggctactcaaaggatagcaagagaacaggtaaatgatgcctaaagaacaccttcctttttctatgccttttctaatctttcaattctttctatggagtaaaggctcatctgccaaatctgccccctggggaaactctttcactactttgtcagttataagtgaagagcttacttgttgcttttatcttttgtatattggactgagatgtaattacactgtattataaaactctgtgaatagccagaactgagctggatctttgcaacacctgattcctctgctctgtggaaaactttttcttacacaaggatccactgtggacggttactttcatctgtttatttattgcccatgcagagctcttaaggtttacaggtgggagcttggggctgtataaaaaaataatccctgccctgagttgacacctggcttaggaaggaagggctgactatggggctgcagtctctctgaacctcagtttcctcatttgtgaagtgaagggttagatttgatgaccaccaaagttcagcccttttcacgaaaaggagaaagcagcttttgactttttaaaaaacatataactacagctggcatctagtattgtcatgttgctctaggtccatattctgaatttattcatttccaatagcctaatacaaaaagtatatattgagcactttcttcccttttcaggtaagtctctgaatgcagcccagggccaaaggaattttgatgacacagtagtacctatgttttaagctatatttttaatttagaaaaatggataccaaattcaaaccgactcatcagaggtaagatttggaatcagacctttccaaaaggtcatctgaggtaaggctaagaccgcacttcctctgctgggggtgagctggcagacacaccaaacagtgccttggcagcagctcacagtgcaggaagcccaggtgatcactcttctgctgggcccaggctgcaccctgaggactcagtaactcactctcaacagaatattctgtgcaggctctccaggctctgggcgtcagggtgcaaggggcagcttgaactgtacggtccgtcctgcactcacccgatgcagaccttgactttgatgttgaaatgaacacacttgttttacccaagtctggtggaacaaatgcccaatcatgtgaccttaaagtgtactgcaaagctgtagctttaagtaattgctgttctgccactgcttactctgaaatctaccatcaaagaaagatagagaaaaggggctgagccttggaatatatggttataagcagatctttctttggtcagagaccagggtttgagccaaggctgtaaatgtgaacaatagctgtgcaaagccttttaacctgacttcttcattttgtaaattattatgcattaagtagcagcccaataatctgatttctagttttattttcaaagtaagtagcttcttttgggaaaaacctaagttaaactagtagttttgccataataactgctgatttatgtatttgctaaaggtacttttgtatctgctgtgtattatagcaataaaataatcattttgttagaaaaaaatcaaaaaaaaaaaaaa

SEQ ID NO: 5682 - DNA, 939 bp, Homo Sapiens
  NM_032673
gtggccggctgggatcagcctttaagatggcgtctcctcaggggggccagattgcgatcgcgatgaggcttcggaaccagctccagtcagtgtacaagatggacccgctacggaacgaggaggaggttcgagtgaagatcaaagacttgaatgaacacattgtttgctgcctatgcgccggctacttcgtggatgccaccaccatcacagagtgtcttcatactttctgcaagagttgtattgtgaagtacctccaaactagcaagtactgccccatgtgcaacattaagatccacgagacacagccactgctcaacctcaaactggaccgggtcatgcaggacatcgtgtataagctggtgcctggcttgcaagacagtgaagagaaacggattcgggaattctaccagtcccgaggtttggaccgggtcacccagcccactggggaagagccagcactgagcaacctcggcctccccttcagcagctttgaccactctaaagcccactactatcgctatgatgagcagttgaacctgtgcctggagcggctgagttctggcaaagacaagaataaaagcgtcctgcagaacaagtatgtccgatgttctgttagagctgaggtacgccatctccggagggtcctgtgtcaccgcttgatgctaaaccctcagcatgtgcagctcctttttgacaatgaagttctccctgatcacatgacaatgaagcagatatggctctcccgctggttcggcaagccatcccctttgcttttacaatacagtgtgaaagagaagaggaggtaggggccaagcccccaccccatcccactccccttccctccccagatatttatgtgaaatgaactgcagctttattttttgaaataaaaacttttaaaaagcaaaaaaaaaaaaaaaaaaaaaaaaaaaaaaaaaa

SEQ ID NO: 5683 - DNA, 3096 bp, Homo Sapiens
  NM_032679
atggccctcgccggccgccatccccgaaacttgcgagtgtcgcgtctgcagtgtgtggggttcgcggggcggcgggtagagttgagcatttttgtcatctgcaaataattttagccaggtggcaagtgtatggactgtggagtaagaagtacctgcctctgcctctgacttgggttctggcctataggaacaagacattttcagtaatggaagaaggagcttccaggctggggaagatcatcatttccagtggtagcttgacctgagatgatacctgaccaccacttctgggaaggcccagaatagacagaagagagagaacatactagagttgctagcccctaagagttgaacgaaatgggcaaggcccagctgaaataacaggaaacacatgaaaaatgccacgattgtaatgtctgtgaggagagagcaaggcagttcttcaggggaggggtcattgtcattcgaagatgtggctgtgggcttcaccagggaggagtggcagtttttggaccagtctcagaaggtcttgtacaaggaagtaatgttggagaactacatcaacctagtatcaatagggtatcgaggcaccaagccagattcgctcttcaagttggagcaaggagaacccccagggatagcagaaggagcagcccacagtcaaatctgtccaggttttgtaatccagagtagaagatatgcaggaaaagattctgatgcatttggtggatatgggagatcatgcctccatatcaagcgtgacaaaactcttactggagttaaataccatagatgtgttaaacccagcagccctaaatcacagctcaatgacctacaaaaaatttgtgcaggagggaaaccacatgaatgcagtgtgtgcgggagagccttctccaggaaagcacagcttattcaacatcagagaactgaaagaggagagaaaccccatggatgtggtgaatgtgggaaaacattcatgaggaagattcagctcactgagcatcagagaactcacacaggagagaagccccatgaatgtagtgaatgtggaaaagccttctccagaaagtcacagctcatggtccatcagagaacccatacaggagagaaaccctacagatgcagcaaatgcggaaaagccttcagccggaagtgccggctcaatagacatcagcgatcacatactggagagaaactctatgggtgcagtgtgtgtgggaaagccttttctcagaaggcatacctcactgcacaccagagacttcacacaggagataagccttataaatgcagtgattgtggaagaaccttctattttaagtcagacctgaccagacatcagaggattcatacgggagagaaaccttatgaatgtagtgagtgtgaaaaagcctttagaagcaagtcgaagctcattcagcatcagcgtactcacactggagagagaccatattcatgcagagaatgtggcaaagcctttgcccacatgtcagtcctcattaaacatgagaaaactcacataagagagacagccataaattcactgacggtggagaaaccttcctcaaggagtcatacctccttatacatgagcgaactcatacaagagcaaaagactgtgaacacagtacctatagaaatgccttcctcaggaaccccgccattgttaaacaagagtgagcgcctagtgggcagaaatgtagtgattgtggaacaaccttttccaagaaatcaagcctttgtagttaatcaggaatttgaacagagaataagcctcacaaatgaagtgaatgtggccccatcagtaataaattatatcttgtatcttacagatattgtatcagaataaatcttctgataccagaaaggtgggaaaatctttagtaggaatcctccagccattatatcccagagagctcatttagggctgaaacactgtggaggcagtggttgtggaggacatttctgtgagaagtcaaacctgttaaacaccattgaaatcatgttgggtagaaatgcagctgttatgaggaagtctttacctggagatgatatctcaattggtatcaaaagaattcttacaggaatatttatgaaagattgtgatggtgcttttagcgctaaattgtgcctcgtgtgccaaagaaacatagacaactgtagaggcaatggatatggaaaacatttttcgtaaaatatgggagaatttgtagaaaagaaaaactcttgaaagtaagaaatgatggcaactcaccaaattaactcatgtatcatacttttatgtcttgagagtcttggagggacgtgtttaatgaaatcttgaaccccaggaatagtattatgtaatgaaaacctatgaatataacaaatatggaagtaaaattgtgttagttttttatgagtgttgcaccaaactaacacaaatttaatggcttaaaacaacacaaaatcattatcttacagttctggaggactgaagtccaaatgcatctcacggggctacatcaagctgttgacagggctgcttttctttttggaggctctaggggagcgtctttctttgcccttccagcttctagaagctgcccaaattctgtggtttggggcctcctttcaaaaccagcaatggccaatcagtcttacatcactcaaacacttgagtgttctgtctccctcttccatgtttgaggacccttgtgattacactgtgaaaacccagataagccaggataatctccctatcttattatgaggcaagtatgttaagattttattctataatcagagaatcttatgctatgattgttatatgtgagcattatagatgctcttgaaatgttaaaatcacatcagcactggaaaataactcctaaatgtccaaaaagaacatgagatttatggtgcttgaaatgttgctaaacgtaaatttgtatctattctgaaattatataaattaacctacctggccaggcacagtggctcacacctgtaatctcagcactttgggaggccaaggcaggaagatcacttgagcccgcaagtttgagaccaccctgggcaacatagcgagactacctctacaaaaaaaaaaaaaaa

SEQ ID NO: 5684 - DNA, 1648 bp, Homo Sapiens
  NM_032681
gcagggaatgagctcctgatcttggggagtacttaaaagaattttttcttggaagaattactgcaggaaacattcatagaaccttgggaaacatgaattctggaatcttgcaagtcttccagagggcactcacctgtcccatctgcatgaactacttcctagacccagtcaccatagactgtgggcacagcttttgccggccctgtttgtacctcaactggcaagacacggcagttcttgctcagtgctctgaatgcaagaagacaacgcggcagagaaacctcaacactgacatttgtttgaagaacatggctttcattgccagaaaagccagcctccggcaattccttagctctgaggagcaaatatgtgggatgcacagagagacaaagaagatgttctgtgaagtggacaagagcctgctctgtttgccgtgctccaactctcaggagcaccggaatcacatacactgtcccattgagtgggctgctgaggaacgccgggaggagctcctaaaaaaaatgcagtctttatgggaaaaagcttgtgaaaatctcagaaatctgaacatggaaaccacaagaaccagatgctggaaggattatgtgagtttaaggatagaagcaatcagagctgaatatcagaagatgcctgcatttctccatgaagaagagcaacatcacttggaaaggctgcgaaaggagggcgaggacatttttcagcaactcaatgaaagcaaagccagaatggaacattccagggagcttttaagaggaatgtatgaggatctgaagcaaatgtgccataaagcagatgtggagctactccaggcttttggagacatattacacaggtatgagtctctgctgctgcaagtgtctgagcctgtgaatccagagctcagtgcagggcccatcactggactgctggacagcctcagtggattcagagttgattttactctgcagcctgaaagagccaatagtcatatcttcctgtgtggagatttgagaagcatgaatgttggatgtgaccctcaagatgatcccgatatcactggaaaatctgaatgttttcttgtatggggggctcaggctttcacatctggcaaatattattgggaggttcatatgggggactcttggaattgggcttttggtgtctgtaacaattattggaaagagaagagacagaatgacaagatagatggagaggagggactctttcttcttggatgtgttaaggaggacactcactgcagtctctttaccacctccccacttgtggtgcaatatgttccaagacctaccagcacagtaggattattcctggattgtgaaggtagaaccgtgagctttgttgatgttgatcaaagttccctgatatacaccatccccaattgctccttctcacctcctctcaggcctatcttttgctgtagtcacttctgaccagagaaaagtcagaaatgtgcctgtatgctctgggaacctgtttatcccagaaagccctctttttcgcacctcatcaaacagaacaaataagttatatttaatgtctttagttgcattctaatgtcatcaaaactcatttatagtgtttctattaaatatggtgaaaacattaaaaaaaaaaaaaaaaaaaaaaa

SEQ ID NO: 5685 - DNA, 6222 bp, Homo Sapiens
  NM_032682
ggggggtgggcgccagcgccccggcgaacggcaaagagggagccgctcccgctcggggggccgctggagtgcccagcgggaacccgaaagtttgtaagaggaagagagcgcgcggcgagcgagcgagcgggccgggggcagcggcagcggcgccggggaccatggtgctgccggcgcctcctccgcgggcgtgaaggcggcgctcctactccctccccggactccgcggtgtcccagaagcttttgttgacaattccagtttccgaacaaaacatttcggcaatggtgagggcttcgatcccttctctgatttgctgtcagccatgaacggatggatgtgatgcctgctagccaaaaggcttccctctgtgtgttgcagtcctgtggcattatgcatgccccctcccagtgaccccaggctttttatggctgtgagacacgttaaaatttcaggggtaagacgtgaccttttgaggtgactataactgaagattgctttacagaagccaaaaaaggtttttgagtcatgatgcaagaatctgggactgagacaaaaagtaacggttcagccatccagaatgggtcgggcggcagcaaccacttactagagtgcggcggtcttcgggaggggcggtccaacggagagacgccggccgtggacatcggggcagctgacctcgcccacgcccagcagcagcagcaacaggcacttcaggtggcaagacagctccttcttcagcagcaacagcagcagcaagttagtggattaaaatctcccaagaggaatgacaaacaaccagctcttcaggttcccgtgtcagtggctatgatgacacctcaagttatcactccccagcaaatgcagcagatcctccagcaacaagtgctgagccctcagcagctccaggttctcctccagcagcagcaggccctcatgcttcaacagcagcagcttcaagagttttataaaaaacaacaggaacagttgcagcttcaacttttacaacaacaacatgctggaaaacagcctaaagagcaacagcaggtggctacccagcagttggcttttcagcagcagcttttacagatgcagcagttacagcagcagcacctcctgtctttgcagcgccaaggccttctgacaattcagcccgggcagcctgcccttccccttcaacctcttgctcaaggcatgattccaacagaactgcagcagctctggaaagaagtgacaagtgctcatactgcagaagaaaccacaggcaacaatcacagcagtttggatctgaccacgacatgtgtctcctcctctgcaccttccaagacctccttaataatgaacccacatgcctctaccaatggacagctctcagtccacactcccaaaagggaaagtttgtcccatgaggagcacccccatagccatcctctctatggacatggtgtatgcaagtggccaggctgtgaagcagtgtgcgaagatttccaatcatttctaaaacatctcaacagtgagcatgcgctggacgatagaagtacagcccaatgtagagtacaaatgcaggttgtacagcagttagagctacagcttgcaaaagacaaagaacgcctgcaagccatgatgacccacctgcatgtgaagtctacagaacccaaagccgcccctcagcccttgaatctggtatcaagtgtcactctctccaagtccgcatcggaggcttctccacagagcttacctcatactccaacgaccccaaccgcccccctgactcccgtcacccaaggcccctctgtcatcacaaccaccagcatgcacacggtgggacccatccgcaggcggtactcagacaaatacaacgtgcccatttcgtcagcagatattgcgcagaaccaagaattttataagaacgcagaagttagaccaccatttacatatgcatctttaattaggcaggccattctcgaatctccagaaaagcagctaacactaaatgagatctataactggttcacacgaatgtttgcttacttccgacgcaacgcggccacgtggaagaatgcagtgcgtcataatcttagtcttcacaagtgttttgtgcgagtagaaaacgttaaaggggcagtatggacagtggatgaagtagaattccaaaaacgaaggccacaaaagatcagtggtaacccttcccttattaaaaacatgcagagcagccacgcctactgcacacctctcaatgcagctttacaggcttcaatggctgagaatagtatacctctatacactaccgcttccatgggaaatcccactctgggcaacttagccagcgcaatacgggaagagctgaacggggcaatggagcataccaacagcaacgagagtgacagcagtccaggcagatctcctatgcaagccgtgcatcctgtacacgtcaaagaagagcccctcgatccagaggaagctgaagggcccctgtccttagtgacaacagccaaccacagtccagattttgaccatgacagagattacgaagatgaaccagtaaacgaggacatggagtgactatcggggcgggccaaccccgagaatgaagattggaaaaaggaaaaaaaaaaaaacacgtcaaaagttagcagtgaaattgttctccatttgttgtacagtctggaggattttcactacgttttgacaactctgaaatgtgttaactcttagtgccatcaagaaccccatttgggagtatttttgatttttctactttttgttgaaaaaaggaatttgtactctgtgcattggatggacttgtttggtacttgggattttcctctcttaaccgtcaacatcagtgttgtaaatttgctaaactgattcacttttagcagcagactttgaactgcagtcctgccaacgttggacactgaggacgcccgacagagcttgtgcacctaagctgcagaccaagcctttgcccagaatttaaggattccaatggacgacctatttgcacagtactgcatgttgattatcactgcctttactccttttttttttttttttttttttttttttttgcttccagttgggatggggaaggcctttgtgtgtgtattggggggaggggttaaaaaataattatcccaaactttttaatgtattgctttttttttttttttttttccttctactataccattttaagttctgacctcaggcctccatttgggccgatggcctcttggaggcttaaagttttctgtaccttgtgatgaatgttaataggtgtttttattatacaaagctgaatgtcatttctcgtttgtagctttctgtcactcattccatcttccttcagacatcaccacgtttctctaaagtcagaaaacattccgttttggtctttttcaaaaaggtcccaaatgctgcactctacacatgaaggccctctcacacagacgtgacgtcctgccagaaagagaatgaatgacagaaaaaaaaaagagagacaaactctaggaacaatgccgattcattccacgcagcagtattgggggtggttcgggggaggggtgtttcggattttctttttttcttttcttttctttttttttttttgcagcaaccattaataaatgccaccacattctaccagcacaaggaaacataggcagcactgaaaaaaaaaaaaaagctcatattaattagactgacaatatggccttggaaggctctcccttgtggaaccaagttgccatgggccttgggtgctctgcgataacgggtgtgggttggttttgtttgcaaaatggccaaaaaaaaaaaccggcttccccgagcagctgccctgaaagtaggggtggcggcggcggcgctgagtttatacattagttcagacctacttggtggcattaaactgtttgaatgcaaattcgatttcagattgaacttgttaagggagttaacgagggctgagttcagcaaatgctaaagtgttaatttcaaatatgcaaatttggtactgcagtttgttatgcaatattatatcaccaacccagtatcacaaaaactcatagaagatatcatgtaggccctgggctttgggggggtcccaaacatggtatgcagaaatgtgatggttacaggtcagtacaacctcagtccttagaacccctccacacttcagctctgcacccactttcctgtcatttatttatataggactgtagttttttttagttcgagagcctttcgaagcttaatttatattctttctttgtaccttttttctaaaattaccaaagatattacacaaaggtaaattatgttctctgttttatgctttatctgatgaagccaaatatcctcttattgttgatcaaaggaggcaaaagaatttagaggcaaatgacaagcgataggctattgcaacctgagaaagagaactgctccttcatcgtaaatttagaagaccaagtagataatggaaccaaagttgttacttttttctagtagttatttttcctttttctttttgtgtacctctacagagaccaaaactcattctcttaaagagattttatggggctactgcagataaaaataggacacaatattaaaggagctacagaaggaagggagtcccatctcaaaaaaaaaatgaatgtatgccactgcaattagagtatccaataaaggagacagtttagagtcaggacagaaaagcttccataattgaactagattacataatagtatttctagaaaaagagatatttttagattgtatgccacttttgtttaagaactgtgctgtgatcactgtattaattttggtttatcttggcatatatccttcagtttgtttttatttttaatttttcctttttttccgattaggctttggtcagcatttttcatttaaagaaaagtaacactcccatccactcataagcttggtacaaaaacttctctggcagttacttttgaagcttcactctgctttctgtataaagggcagtctgtggtcacgcaagactttaaaaaaaaaaaaaaaaaaaaaaaaaaaaaaaaaaaaaaaaacttttccaggcagcttcatgatgtgcaggcagtagccagacagggtcatgggaagggggccctgtgcttctaaactgagtggttgctggttagtttggtattcaaaagaggataaaaatctggtagattagttcattctcagcatgtgtagctagacatgagtaaagataacagcatgagaaactgttagtacgcatacctcagttcaaacctttagggaatgattaaaatttaaaaaaaaaacatttcactcagttgcacttagtcgtatgtcttgcatgcttagtctaaagactgtagcaaaaaaaaaaaaaaaagaaaaattagattttacatatctttgcaggtatcacagccttgcagaagaaccaactgaaaaaaaaattctcaggctttacagcaagcaaacttcactatgatttttacaattctgattctgtatcccctgggggttatcccagttgcttctttaggatggggtttattacgttgtacatatatcccgatgtgtctgtgtgaatctttgtcttttttgggggagggcagagggcggttctttttttagatattgttcctaaaaaggaataaatgcatacacctgtttgtcaaaacacctttgctttttgtgcaactgctttatattaacgatactaaaaaaaaatagctttggaaaaaaaactactgtatgtaacggaattgcagaatatgctgcacatgtattttatttagttatccttgctttaagaatattggatgacatttcctgacatgtgggagggagaaactccctaactttttttttctgcttttaaactgtaacatagttgaagatttcttttttctgttctcattgattggagcattttgtacaggttttgtgtgtgtgtgtgtgtgtgtgtgcgcgcgtgcgtgtgtgttaatctgttttttgatacattcctatcccttgtgtttatcctaccactgccttcctggctatcttaaacaagttcatacatttgaaaagaaaaaaaaatgttgtttaaaaaatgttttctcctgctgcagtaaatattttgcatgatgaaattccagggtcacacttttccaagtttatcagtgaagtagtgattaacaatggggagtgtcaaaactattgaacttttgta

SEQ ID NO: 5686 - DNA, 1212 bp, Homo Sapiens
  NM_032687
cgctcgctcccgcaactgggggcacggcagaggaggcagggccgacggcggtgggcggtgcgttgcgcaggctcgggcctcccgctcgccgctgcgttgggaccgcgcagcccggtgtgtgcagtggcctcagggatccggaaagtctaggactgaacttctcctaacatccagtaatggggacctggaacctgggcttactagagtgccgcgcgtagggctccaggtcgctggcttctgcgcttccttcctctccaaagttgagtatctcctatctgtgtcctcgtacatactgccgcctgaggtgccatggcccccaagccgggggccgagtggagcacagccctgtcccatctggtgctgggagtggtgtctctgcacgcagccgtgagcacagccgaggcaagtcgaggggctgctgctggcttcctgctccaggtcttggctgccaccaccacgctggccccagggctgagcacacacgaagactgccttgctggagcctgggtggccaccgtcatcggccttccccttctggccttcgatttccactgggtgaatggggaccgctcctctgccaacctgctcctgggaggaggcatggtgctggcagtggctggcggccacctcggccctgagggccgctctgtggctggtcaggcaatgctgttggtggtcgcagtgaccatcctcattgtagctgtcttcacggccaacacttatgggatgtgggggggggcgatgctgggtgtggcaggcctcctgagccggctggaggaggacaggctgctgctgctaccgaaggaggatgtctgtcgctgggccttggctgtaggcagctgggcttactgccgggccctgcatacacagcgcctccagtgggagtgacagttggatacagccaggcagggtttctgccctgccgaacactttccctcccacctgcctgctcctggcgccttctccctaggggtagactcttctgcctactgaagtgggtttgctgcacattgactggtcaggggcagagtctgggtgctgtcctttggccacgtgtggggacttgtctagaccagaatgaaagggacagggtcccagacacgtttgggggtcctgattctgggctggacacggttgtggatccagagaagaggcctagtctccaataaatcttaggaattttgcaggaatatgaaaaaaaaaaaaaaaaaa

SEQ ID NO: 5687 - DNA, 1071 bp, Homo Sapiens
  NM_032705
gtggcgtaggccggacatttctagtcgactgttgcgcgtgcgcgcgctgtgacgttccctacgcggtcgggcgttgggtttcgcggcgctcgccgcactggttgttcagcaccttcggtccggttgaggttgtcaagtcggaccaaacaggttgtttctctgcagtttccaacatggcagggaggtttaatagacatggataagaagtccactcacagaaatcctgaagatgccagggctggcaaatatgaaggtaaacacaaacgaaagaaaagaagaaagcaaaaccaaaaccagcaccgatcccgacatagatcagtgacgtctttttcttcagatgatcctatgtttccttcttcctcatcatcgtcttcaggaagccagacagattcaagtattgaagatgctgccaagggaaaaattaagaagaagagaagagagaaaacaaataaatgggaaaaaagaaagagtcttgtcctgttgctcaggctggagtgcaatgatgcgacctcggctcactgcaacctctgcctcccggattcaagcaattctcctgccacagcctcctaagtagctaggactacacgcatgcaccaccacacctggctaatttttgtatttttagtagggacggggtttcacctggttggccaggctggtctcgaactcctgacctcatgtgatccgtccacttcagcgtcccaaagtgctgggattacaggcatgagccaccgtgccctgcctcttttagttatttttaaatgtacaataaattgttgttgactgtaatcaccctgttgtgctataaaatacgaaatcttatacattctagctatatttttatactcattaatcatcctcctttccccaccttcaactacccttctaagcctctggtaacgatcgttctggtatcaccatgagtttatttgttttcatttttagctcccacaaataggtgacaacatgtgaattttgtctttctgtgcctggcttttgtcacttaacaatgacctccatttccatcccttgttgcaagtgacagcatctcattttttttttttttttggc

SEQ ID NO: 5688 - DNA, 2083 bp, Homo Sapiens
  NM_032709
ctccctgctccaccccgtgcctagggcagcacaaaagccaatcgctagcaaactccctgcctagcaaggcccagcctggggcagaaatggctgcaagtggccgaggtctctgcaaggctgtggccgcctctcccttcccggcgtggagacgagataacacggaagccaggggaggtctgaagcctgagtatgatgcggtggtgataggagcaggacacaacggactggtggctgcagcgtacctgcagagactgggggtgaacaccgccgtcttcgagaggcgccatgtgatcgggggtgcagctgtcactgaggagatcatcccagggtttaagttctcccgcgcgtcctacctgctcagcctgctgaggccgcagatttacactgatctggagctgaagaaacatgggctgaggcttcatcttcgaaacccctactccttcacccccatgctggaagagggtgcaggcagcaaggtgcccaggtgccttctgctgggcacagacatggcagaaaaccagaagcagatcgcccagttctcccagaaggatgcccaggtctttcccaaatatgaggagttcatgcatcgcttggcattagccattgaccctctgctggatgcggcccccgtggacatggcggccttccagcatggctccttgctgcaaaggatgaggtcgctctccaccctcaagcccctgctgaaggcaggccgcatcctgggagcccagcttccccgatattatgaggtcctcacagctcccattaccaaggtgctggatcagtggttcgagtctgagcctttaaaagccactctagccacagatgcagtgattggagccatgacaagtccccacactccggggagtgggtatgtgctgctgcaccatgtgatggggggcctggagggaatgcagggggcctggggctacgtccaggggggcatgggtgccctctctgatgcgatcgcaagctcagccaccacacatggagcaagcatcttcactgaaaagacagtggcgaaggtgcaggtgaacagtgaaggctgtgttcaaggagttgtgctggaagatggcacagaggtgagaagcaaaatggtgctgtccaacacatcaccgcagatcaccttcctgaagctgacgccacaggagtggcttcctgaggagttcctggagagaatctctcagctggacacccggtcgcctgtcaccaagatcaatgtggccgtagacaggctgcccagcttcctggcggcccccaatgctcccaggggccagccgctgccccatcaccaatgctccatccacctgaactgtgaagacaccctcctccttcatcaggcctttgaagatgccatggatggcctgccttcccacaggcctgtgattgagctctgcatcccttcctcgctggaccccaccctggctccccctggctgccatgtagtctccctcttcactcagtacatgccctatacgctggctggaggcaaggcctgggacgagcaggagagagacgcttatgcagacagagtgtttgattgcatcgaggtctatgcccctggcttcaaggactctgtggttggcagagacatcctcacaccaccagatttggagagaatcttcgggcttcctggagggaacatattccactgcgccatgtccctggaccagctctacttcgcccgccccgtgcccctgcattctggctaccgctgccctctccagggcctgtatctctgtggaagtggggctcatcctggaggaggtgtgatgggagctgctgggcgaaatgcagcacatgtggcctttagggacctcaagagcatgtgaccctgaaccagctctgacccaggaagaagactccacccctgaattccaagtgctccattggatcagcttcccaggaagttcagcttcgggttagtacataaggccaccacaatgctcaagaaattattttagaaaaaacgtacgagttacatttagtgcaagttgaccttatgcccatgcctccatacatggactggttctgttttattaaaactaatatttcatacagattaaaaaaaaaaaaaaaaaaa

SEQ ID NO: 5689 - DNA, 5038 bp, Homo Sapiens
  NM_032711
ccgcgtcttattccttctaatctctcccccgccccttgtcttgcgcctgccttcctaacagccttcagttccccttctcccgtcagaccttcctgacctcccacctggttctctaggggcagggtggacaggaagcagctcagcccagcctgggagaggccaagggctgcctcctatcagagagcgcctgctcgctgtgcccccgggttatgacgacccccaataaaggaaacaaggccttgaaggtgaagcgggagccgggtgagaatggcaccagcctgacggatgaggagctggtgaccatgtcggtgcgggagctgaaccagcacctgcggggcctgtccaaggaggagatcgtccagctgaagcagcgccggcgcacgctcaagaaccgcggctacgctgccagctgccgcgtgaagcgggtgacgcagaaggaggagctggagaagcagaaggcggagctgcagcaggaggtggagaagctggcctcagagaacgccagcatgaagctggagctcgacgcgctgcgctccaagtacgaggcgctgcagaccttcgcccggacggtggcccgcagccccgtggcgccagcccggggcccccttgccgccggcctggggcccctcgtcccaggcaaggtggccgccaccagcgtcatcacaatagtaaagtccaagacggatgcccgatcgtagggacgcgcgtctgcccaggcgggtctttgcggggccactaggcacatggcgaatttggctgccctgtccctctgtttccttctcttctctttcctccctctcttccccacccttctctcttccctgcaaagcacaacctgtaccccaggggcgccgggctgagcccctttgatctcgtcattgtcgtcgtgtgttttgtatgttgggattggtcagttcggcggtgacgtggggtcgccccaaccccttttgtaccagggccatgcaggcttggagtccagagttggtgctgtgggaacggactagagagagttgcgggagagagaaggagcaggcacgctgggcctcgcgtgtccccgagcagtgagggtcccagtgttccctccactcccgagtggccacaggctcgcgggctgggaaggattcactctctttagccccaggggagcagctcagcttagcccagcatgaagagatgggctctgctctgagagtagggcgggcttgaaggccctgatgggtggaccaccagcctgggcgcagtggtgctgggggcgtgcagctgggcccaggggctgtgcactcaggcctgacccgttgcactgaacaagaccaaatcgctggttgtgcgcttaacgtgagggtgggtccagtgtgccctgcgatgggtcccgtgtcactgtttacatgacctatttgtgtggttatatagccctttatttaaaagagagaagttccttttacaaagttattaaattaattatatgtttaaaagttaaagaaaaaagagctgcagagtatttataaaactgtcttttagaaaaaaaacaagcaagaagaccatttgaccatatgaatggaaaagggaagaaagtataatagaaactttgctagttaaaaaaaaaagaaaaaaaaagaaaaaaaatccctttcttgtaaacttacggacacctctttgtggctgttggagtttagtttttatatacacagagttatcagacattatttataaaacttagtttaaaaaaaagacaaaaaaaaaaaagccaagccgtgagccgaccagaaggccgtcctctttgatatcttttgcaattgtaccgaaagtgacttactcctctgcccttcctgcttccgtctcttgccggtgccgtggtgtcgtccgtgcctggtgaggttttgtgcagcggtaaagtgctggtgcttctggtgacctttgacctgtgggtgtcacttcttgtgtctgttttcccgtgttcgttttttgggtttagttgtgcttttgcttctgctggcttgctggacctgggctggggtgccaagtggcgcctgctgcgtcagagctcaaggaatctgtgcccaccaccagctcctggtccgtaggaggtgagacatggggttctgtcatgcccccctccactgagccttggctacatctgtgtctagggcttgggctgatctagtggcggggtaggtgaaactggggtcccttggggcgccccacgctgcttccacacccaccacctctggccttgggtggtggcattacagggatgagggagtcactgtgggtggccacagggctatggccaagcgttccctggccgtcttcctctggcctcagctttgttcctataggctgcccgcgccgtgggctgcaggtctcgccgcccgcttgatccctgaggtgtttccatgctgcgggtggtgcttccaggcagagtgggtgggggcccaccgggcaccgccctttcttccttgtccctgcctcactctgagagccttgggggtctccaccagtgcagacaagggctacagtctccagggccgggtcttgtccctcttctccgctggtccacgctggcagctcttggcttcgggcctgccttctgcctccctttgggatctgtgtcttccagggatcagctgcttggcttctgctggaggtgcctccctgtgggggcgcagcctgcctcctgctctcagttcctcgccagaggctgctgcccttcctggctgggctcaggaggctccttgtaggcatatgatggggagggggtgcccctacccacctccaagaggctacagccctgtgtctggccatgtgagccctggcctttcaccgggttgctggtttcttttctgtggggcccagacttctgtaaagcacacagatgtgggtaagatgaaaaactgtggcccaacagggcttaaccctatggatggtgggatttttatccaatagtttggcctggtgtgcccacaggatgggaacagggaggcaccatcaacacttgtcatgttaatgagcttttctttgctcgaggtgttcagagacaagtcctgtgtctacctgcgtcagcctgaaaatggaaatattggctgttgactcttgtcatttagtgacttcatccccctcccctcagtctgatcttgtctaagtagaatccaggcgttagttggaatcatatcataagtatccatgaagaaaacgtcatgatctgcctcggagtggggagaaacaggccctccttgtccttgtgcagcccccacttttgtcctggctgtgggtggccatccattttgagcacctctgccaggctgcagacctggaggcgaagggagtgtggaagaggagggtgtaagggtcgacgcgtgctgaatgggaggtgcaggtcctcggtgcgttggcagaagaggcttctggagtttcgaggccatacctcctttcaagagctttggatttggggcgacttccctgggtctaggggagtgttcctgtcccctgtcaggtcagccctgcggagccactccacccctcttccccttcccctggatttcctgacatagatggtgtgttcatgtgcaggtgtgagtgtgctgtccttctgatctctgttgatcccgctttcctactgagagggtggtggagagggtggtggtctcttctcacctcagtttttctgacacagcgaatcgagggctttggccaaggccaggtctctcaaacttgtccgccaagtaaaccatgatatatgtcttcccttccaccttaactttgccccaactcctcttttatcctaacatggacgctcagatttcagaggaatacccagcagggacaggtcagctctcaccaggagagtgaggcccctggctgctgctcggggtggcactggtgttgctggctcagctcttggtgcatgtttcagatatgtgtgtacacttctgactggtgatcagggcccggcccacggccctgagcggctgcagcctgctttgggacgatggtcaggtcccatgttgtccctgctgcctccctctggagtggccacttggccaaagcgcccatccacatctggaaagtcggagccgcagcctgctgcaccgtttccgctctgggatcttgtgagttacttttttaggctgtggtttggtgaaaggaaccaacacattaacgatttttcccccagaagccactgaataattctttttggtgtatttttgccttcctgttggctgtctggccttggagcaggtcgggagagtagagtacataatcagtgccacacagaggcagggcgtgtctgagagactaatgcctgtcctgcctctggcctgtgtcctgggtgtgtaccatacctgctgggccagtcccacacatttccaccctgcccctggagcagcagctttgataccatgggtgtcccttgagtctgagctagagtgtgtccccgataaactgtgagacctccctgttcttggtgaccccagttgggctttggcccctccagcaaccttgtgtcccagccctgcccttcttcccaccccctcaatctgctagtccctgaagcctttaaccaaacgggagtgggcacagaaagccttctcctggcaacaggacaagggctgcccgcgtgtccagccctgttgctctcctggcgctgagaggtgggtccaagcagagttgatcagtccctgcctgccctgcctaggtctagccaggggaggttgtgtgtgtgggagaagaccccgggatctgctggggtgggatggaggttattaaagatctaagtgaggaggggctggggtttggatgcggggtgaggcccgagcgctcacacttcgtgtagggcgggcaggggcctgacctcttgcagggcagtggccttggtgccctacccctgccctgcgcagtatttattgctaaattattgtccaggaggggcagcactgggcctggccccccgggtatttattgctgtacatagtgtatgtttgtgatatataaggttttctttattttgtatatgatcaataaaccttttaaagagaaaaaa

SEQ ID NO: 5690 - DNA, 2534 bp, Homo Sapiens
  NM_032717
gcagaggtgagtgccgggctcggcgctctgctcctggagctcccgcgggactgcctggggacagggactgctgtggcgctcggccctccactgcggacctctcctgagtgggtgcgccgagtcatggagggcgcagagctggccgggaagatcctttccacctggctgacgctggttctcggcttcatccttttaccttcggtcttcggagtgtctctgggcatctccgagatctacatgaagatcctagtgaaaactttagagtgggccacaatacgaattgaaaaaggaaccccaaaggagtcgattcttaaaaactctgcttctgttggtattatccaaagagatgagtcacccatggaaaaagggctctctggtctacgaggaagggactttgagctgtctgacgtgttttatttctccaagaagggattggaagccattgtagaagatgaagtgacccagaggttttcctcagaggagctagtgtcatggaatctcctcacaagaaccaatgtaaatttccagtacatcagtctgcggctcactatggtgtgggtgctgggcgtcatagtgcgctattgtgtcctactgcctctgagggttaccttggctttcattgggatcagtttgctggttataggaactacactggttgggcagctgccagacagcagcctcaaaaactggctgagtgaactggtccatctgacttgctgccggatctgtgtgcgagccctctctggtaccattcattatcataacaagcagtacagaccccagaagggaggcatttgtgttgccaaccatacttcccccattgatgttttaatcttgacaacggatggatgttatgctatggttggccaggttcatggcggcttgatgggaattattcagagagctatggtcaaggcttgtcctcatgtctggtttgaacgctcagaaatgaaggatcgacacctggttactaagagactaaaagaacatattgctgataagaagaaactacccatactaatttttcctgaaggaacttgcatcaacaatacttcagtcatgatgtttaaaaaggggagctttgaaattggaggaaccatacatccagttgcaattaagtataaccctcagttcggtgatgcattttggaacagtagtaaatacaacatggtgagctacctgcttcgaatgatgaccagctgggccatcgtctgtgacgtgtggtacatgccccccatgaccagagaggaaggagaagatgcagtccagtttgctaacagggttaagtctgctattgctatacaaggaggcctgactgaacttccctgggatggaggactaaagagagcaaaggtgaaggacatctttaaggaagagcagcagaaaaattacagcaagatgattgtgggcaatggatctctcagctaagaggacggatgacagcctttagatctagaactagcccttagaaatggaatggctttttttgttttgttttgttttattgttttgtttttattattgttaatcttttctacagaatgattgtctctacctctttatgccagaggcagaacctacaggtgccctttttggcttttgttgttgttgtaacattagccccatggattgtaaggtggtttactgagttaaaacagattctgcttttgtaaaatgatggcatcactgtggactgaatgaaatatttgtatagaaaaaagtgcttgaaaagtgtgtttggaactcatcgatagggtaattctccaaaaatgcccaaactctttttctgtaattagccttgccactttcttcagtcacttaaatggtgagattacacatcagtgcaagatgaccattatggttatggtctactgcaaggttgaaaggaaaaatggaggattgtatttaggaaaagggacaactttgtggccacctgctctgaaagtcaaaaggaaatgtaaattagtgtcattagtgtgttggaagagaaatactattcagtaagcttcgccaaagaaaagtgagtcaaagttaatgtgtgtgcgcatttatatgtaggcagctcgtagaccacattttaaccagcaactggtaacaaagagcttagttttccttgtttgaatgctgtagatctgtacctagtacccctcccatctactgatttgtttgtttttgtaaccaaacacattttcagatagaaggagccttaaaaaaaaaaaatcacattgagtaacttcagtatgaatgaatgagagtgtgtggagctacccctcaccctccacccctttgtgctttttattcccgaattttcccagtctcttaaacagaaaaatgactgatataattatcttttggaaactgagccttaattttttttagagggggaaataagttttccccaactcacacagcataagcaatgtttgacagcaatataatgccgttgtaaactactgagagtattgtatctgttctggtaaccatgtacagaatgtgaaactgtcttatgaatataaataaattctatatttcta

SEQ ID NO: 5691 - DNA, 2216 bp, Homo Sapiens
  NM_032725
agcgccgacccgtctctctgcccccgccgctgccatggcggcagctccgccgctttccaaggccgagtatctgaagcgttacttgtccggggcagatgccggcgtcgaccggggatctgagtccggtcgcaagcgtcgcaaaaagcggccgaagcctggcggggccggcggcaagggaatgcggattgtggatgatgatgtgagctggacagctatctccacaaccaaactagaaaaggaggaagaggaagatgatggagatttgcctgtggtggcagagtttgtggatgagcggccagaagaggtaaagcagatggaggcctttcgttccagtgccaaatggaagcttctgggaggccacaacgaagacctaccctcaaacagacattttcgtcacgataccccggattcatctcctaggagggtccgtcatggtaccccagatccatctcctaggaaggaccgtcatgacaccccggatccatctcctaggagggcccgtcatgacaccccggatccttctcccctcagaggggctcgtcatgactcagacacatctcctcccaggaggatccgtcatgactcctcagacacttcacccccaaggagggcccgtcatgattctccagatccttctcccccaaggaggcctcagcataattcttcaggtgcatctcctaggagagtccgtcatgattcaccagatccctctcctcctaggcgagcccgtcatggttcctcagatatctcttcccccagaagggtccataacaactcccctgacacatctaggaggactcttggctcttcagacacacagcaactcagaagggcccgtcatgactcccctgatttggctcctaatgtcacttattccctgcccagaaccaaaagtggtaaagccccagaaagagcctctagcaagacttctccacattggaaggagtcaggagcctcccatttgtcattcccaaagaacagcaaatatgagtatgaccctgacatctctcctccacgaaaaaagcaagcaaaatcccattttggagacaagaagcagcttgattccaaaggtgactgccagaaagcaactgattcagacctttcttctccacggcataaacaaagtccagggcaccaggattctgattcagatctgtcacctccacggaatagacctagacaccggagctctgattctgacctctctccaccaaggaggagacagaggaccaaatcttctgattctgacctgtccccgcctcgaaggagtcagcctcctggaaagaaggctgcacacatgtattctggggctaaaactgggttggtgttaactgacatacagcgagaacagcaggagctcaaggaacaggatcaagaaaccatggcatttgaagctgaatttcaatatgctgaaaccgtatttcgagataagtctggtcgtaagaggaatttgaaactcgaacgtttagagcaaaggaggaaagcagaaaaggactcagagagagatgagctgtatgcccagtggggaaaagggcttgcccagagccggcaacagcaacaaaatgtggaggatgcaatgaaagagatgcaaaagcctctggcccgctatattgatgacgaagatctggataggatgctaagagaacaggaaagagagggggaccctatggccaacttcatcaagaagaataaggccaaggagaacaagaataaaaaagtgagacctcgctacagtggtccagcacctcctcccaacagatttaatatctggcctggatatcgctgggacggagtggacagatccaatggatttgaacagaagcgctttgccaggcttgccagcaagaaggcagtggaggaacttgcctacaaatggagtgttgaggatatgtaactttcctgaggctgtgggggtggctgggctgtggtagtgggcataggcagcgagatatccagtggtaacagttgtctgtgctaataattggagcccacacagaccagcaacttgttgaatgccagttttgaccacagaagaatattcgagacctgatgtttggactgaggtacctgtacttcttgggtgtgacagcaccggctgttgctggctttcagaggaagcattgatttctcattgaccagggtttgttcttggtagggtttttctttttcttttttaaataaacatgtatttatttttttaaaattaaaaaaaaaaa

SEQ ID NO: 5692 - DNA, 2636 bp, Homo Sapiens
  NM_032730
gcaaagccatcccggcggctaaggagagcgggcaggcaaggagattccgggccagggtcgcggcggcagtcggcaagcgttcgattctctggcgttggatcgcgagcggtgtctgcttgtcccgccgagggctcccaggacagggcagggatctagggggtttgcgcacctgctttttaatgccccgcccccccttttttttttaaagtggagggggtgaaagtgagggaggagaatggacagaatactgactggaacgttaattcgagcatttcatatgcgaagagcggaataacagttccgtattcttctttcagtttctccattagattagcttcattttcgaatgctccgttttgcatgcttaattttgaaactagcccgtggtttggcagaatttgactgaattcaggggtgagagtttgatccagtccaagtgtatttgaatttgagcacgcagttcaaccagtgtttacaatggaatttctgaagacttgtgtacttagaagaaatgcatgcactgcggtttgcttctggagaagcaaagttgtccaaaagccttcagttagaaggattagtactacctctcctaggagcactgtcatgcctgcttgggtgatagataaatatgggaagaatgaagtgcttcgattcactcagaacatgatgatgcctatcatacactatccaaatgaagtcattgtcaaagttcacgctgccagtgtaaatcctatagacgttaatatgagaagtggttatggagctacagctttaaatatgaagcgtgatcctttacacgtgaaaatcaaaggagaagaatttcctctgactctgggtcgggatgtctctggcgtggtgatggaatgtgggcttgatgtgaaatacttcaagcctggagatgaggtctgggctgcagttcctccttggaaacaaggcactctttcagagtttgttgtagtcagtgggaatgaggtctctcacaaacccaaatcactcactcatactcaagctgcctctttgccatatgtggctctcacagcctggtctgctataaacaaagttggtggcctgaatgacaagaattgcacaggaaaacgtgttctaatcttaggcgcttcaggcggagttggtacttttgctatacaggtaatgaaagcatgggatgctcatgtgacagcagtttgctcccaagatgccagtgaacttgtaaggaagcttggtgcagacgatgtaattgattacaaatctggaagtgtggaagagcagttgaaatccttaaaaccatttgattttatccttgataatgttggcggatccactgaaacatgggctccagattttctcaagaaatggtcaggagccacctatgtgactttggtgactcctttcctcctgaacatggaccgattgggcatagcagatggcatgttgcagacaggagtcactgtaggttcaaaggcattaaagcatttctggaaaggagtccattatcgctgggcatttttcatggccagtggcccatgtttagatgacattgcagaactggtggatgcgggaaagatccggccagttattgaacaaacctttcctttttctaaagttccagaagccttcctgaaggtggaaagaggacacgcacgaggaaagactgtaattaatgttgtttaaataaaaatgcagtttagtgattgttgacgttcttatttggtgagtgcctgtgagcccaaatttttttctagccatccctttcaaacatttttccagattagattatacattccatgatacaagctttaaaaaataaacacaccattttggccagtaattgatataaaaatatcagcacttggatttgtctgtagtcagtagaaattcgaagttttttcaagctgttccttcacactggctttgcaggttgttgtggcaccttctgttttactagcttaaactactttattgtcttttttgttttagagacagggtctcgctgtgtcacccaggctggagtgcagtggcacaatcacagctcactgcagccttgaccttaagcgattctcctgcttcagcctctcaagtaggtaggactacaggtatgcatcaccacacccagctagtttttttgtatttttagtagagacagttttgccatgttgcccaggctggtctcaaactcctgggcttaagtgatccaccatgtcagtctcccaaagttctgggattacaggcgtgaaccaccctgctgggcctgatcgtcttaatgtacaatactaaaactttcagtgtatagatggatgttggcatgaagagataatttaaagctggttccttcttgaattcatcactgagcagctttctaactgccaaggtttccttttttgttcctccaccataatgtggtcaccacagctcttaaagttctaaatctcttagtgtcatatataaaaatctgcctggtgattcatttgtttatgctcttaatattgaaaggtgagagcagagtttctaactttttaaaacccttacatcttgcataaggattaggcctgtttcggcaattgaaacatgcttctctgagggcttttccatggaaattgcagccttccaatggagcccaaagcttgccactttgatgtcaa

SEQ ID NO: 5693 - DNA, 2075 bp, Homo Sapiens
  NM_032731
agagcaaaaagccatgcggatggattgtggtcgtcagaggctcccgtagtctttagcggcgctggcttccgcaggctccgccctctcttgcccacccggaaacagcctcgccccgcctacgcgggacccaaccgcggcgaccggacgtgcactcctccagtagcggctgcacgtcgtgccaatggcccgctatgaggaggtgagcgtgtccggcttcgaggagttccaccgggccgtggaacagcacaatggcaagaccattttcgcctactttacgggttctaaggacgccggggggaaaagctggtgccccgactgcgtgcaggctgaaccagtcgtacgagaggggctgaagcacattagtgaaggatgtgtgttcatctactgccaagtaggagaaaagccttattggaaagatccaaataatgacttcagaaaaaacttgaaagtaacagcagtgcctacactacttaagtatggaacacctcaaaaactggtagaatctgagtgtcttcaggccaacctggtggaaatgttgttctctgaagattaagattttaggatggcaatcatgtcttgatgtcctgatttgttctagtatcaataaactgtatacttgctttgaattcatgttagcaataaatgatgttaaaaaaactggcatgtgtctaaacaatagagtgctattaaaatgcccatgaacctttagtttgcctgtaatacatggatatttttaagatataaagaagtcttcagaaatagcagtaaaggctcaaaggaacgtattcttgaaggtgacggaaatacctaaaaactcctaaaggtgcagagcacaccttccaaatctctcaaaagatcagtatcttttattttaagttatctccatctgcaaagcaactgatgatattcctgaaaccccttctttgattttggaatgtagaacctaacctcaccactgaaggaaagcacatgacctctaatctagcctctgcttaattcaggcagttttgttttgtttaataaaaaacagactcctgagcactagaagcagtttgttttgcagctgtctcaatgtgctttacttgggatgaggcaggtggcggagagcggccggaaagactctataacccagttctgggaagaactccaagctgggagtcagtcacactgactctaccacttactagctgtgtaaccacaggcaagttactcaccccgtccaaacctcagttttctcttctataaacaaggttcttagaataaaatgagaattcaaggaagcacttaacatagcacctggtttgtggtacctcccaaatcaatggtagctttcccaaatgaacacaagtatttgaggctcctcatgtttgttctaaagtcaagagtccagttagtaactaaccactagttgtcctgccatgactaggtcaagtgaggccacagtgattcagtgattcttaaagccaccttgcaaagcaggtaatacagttatttcctgtcctgcagaattcaagaacctttatgcagttcctgtcctatgatttaaagaggtcagtgactccgctactctcactacatcttagagtagagtggtagagtagttgatctgagacagtaaggttccaggagatggtcttgccctactatatgtcaggaacagctagccttagaattcagtatacttggtggcccacccctaccccatgccccagtgccttatttggtctaaagcacctaacttttccattcttaatcagctgattatgctaaatgcgtaaaaaagaaaaacaccttacaaatccacagggaaatcaaagaacaattcaggtttaacagaaatagtctattaacaataaaaagttggatgaaaaagcacactaaaggttctaggggctaccataataaaggtagataggaagagttttcattttttttgtcttcactgtacaaaagaaatacattatatacatgtattaagtgcctcgtttgtatccagtttttcattttcccgatgtgttattttgctgttgctgctctgccaaggcttgctgaaggcgcatccgcttccgggaata

SEQ ID NO: 5694 - DNA, 2357 bp, Homo Sapiens
  NM_032738
ggccagctggctatcagacaatgacatgctttgacaggcccctgagctctgtgagtaaattcttgaacagctgagagtgctaccattttgtcatagccctaagggtgcagatgatgctgaaagcgtgttggccaaatctgaatgatgaaagccaattacaaactagaaaatgaaaacagaccccagatgcaaggagatgagacagttaaatttacttcctcttttctaatctgagaggtttcatgttgaagaaaatcagtgttggggttgcaggagacctaaacacagtcaccatgaagctgggctgtgtcctcatggcctgggccctctacctttcccttggtgtgctctgggtggcccagatgctactggctgccagttttgagacgctgcagtgtgagggacctgtctgcactgaggagagcagctgccacacggaggatgacttgactgatgcaagggaagctggcttccaggtcaaggcctacactttcagtgaacccttccacctgattgtgtcctatgactggctgatcctccaaggtccagccaagccagtttttgaaggggacctgctggttctgcgctgccaggcctggcaagactggccactgactcaggtgaccttctaccgagatggctcagctctgggtccccccgggcctaacagggaattctccatcaccgtggtacaaaaggcagacagcgggcactaccactgcagtggcatcttccagagccctggtcctgggatcccagaaacagcatctgttgtggctatcacagtccaagaactgtttccagcgccaattctcagagctgtaccctcagctgaaccccaagcaggaagccccatgaccctgagttgtcagacaaagttgcccctgcagaggtcagctgcccgcctcctcttctccttctacaaggatggaaggatagtgcaaagcagggggctctcctcagaattccagatccccacagcttcagaagatcactccgggtcatactggtgtgaggcagccactgaggacaaccaagtttggaaacagagcccccagctagagatcagagtgcagggtgcttccagctctgctgcacctcccacattgaatccagctcctcagaaatcagctgctccaggaactgctcctgaggaggcccctgggcctctgcctccgccgccaaccccatcttctgaggatccaggcttttcttctcctctggggatgccagatcctcatctgtatcaccagatgggccttcttctcaaacacatgcaggatgtgagagtcctcctcggtcacctgctcatggagttgagggaattatctggccaccggaagcctgggaccacaaaggctactgctgaatagaagtaaacagttcatccatgatctcacttaaccaccccaataaatctgattctttattttctcttcctgtcctgcacatatgcataagtacttttacaagttgtcccagtgttttgttagaataatgtagttaggtgagtgtaaataaatttatataaagtgagaattagagtttagctataattgtgtattctctcttaacacaacagaattctgctgtctagatcaggaatttctatctgttatatcgaccagaatgttgtgatttaaagagaactaatggaagtggattgaatacagcagtctcaactgggggcaattttgccccccagaggacattgggcaatgtttggagacattttggtcattatacttggggggttgggggatggtgggatgtgtgtgctactggcatccagtaaatagaagccaggggtgccgctaaacatcctataatgcacagggcagtaccccacaacgaaaaataatctggcccaaaatgtcagttgtactgagtttgagaaaccccagcctaatgaaaccctaggtgttgggctctggaatgggactttgtcccttctaattattatctctttccagcctcattcagctattcttactgacataccagtctttagctggtgctatggtctgttctttagttctagtttgtatcccctcaaaagccattatgttgaaatcctaatccccaaggtgatggcattaagaagtgggcctttgggaagtgattagatcaggagtgcagagccctcatgattaggattagtgcccttatttaaaaaggccccagagagctaactcacccttccaccatatgaggacgtggcaagaagatgacatgtatgagaaccaaaaaacagctgtcgccaaacaccgactctgtcgttgccttgatcttgaacttccagcctccagaactatgagaaataaaattctgttgtttgtaagctaaaaaaaaaaaaa

SEQ ID NO: 5695 - DNA, 2824 bp, Homo Sapiens
  NM_032740
gaacttttttaaaaattaaatttttattttgagatcactgtttgtgttcagttgtaagaaacaagagagattctgtgtaccctttacccattcctccatgttgcaaaactagcacaatatcaccgccacggtagacgcagtgaggccataagacatttccgtcagcaaaagggtcacttcttgtgcccctttagaaccacacccacccctgccttccaactattaatgctggcaggacttagccagaccgcaagggcgcctactccgaacaaggaagagggtcaggcgctgggagggcgactgcaagcggacaggcagcacctgcgaccacggtacttggggacaccacaaaagtccgcagagcaggcaccgcggcacttccgcgagcgccgcaggccctgcccctttcgccgtcgccgaccaattgccgcccgaagaccgaaccgcttcagcggagggccggaagtgagccgcagcttttcctttctgccaccgccttgtccaagatggcggacctccaccgccagctgcaggagtacctggcgcaggggaaagctggcggcccggcggccgcggagccgctgctcgccgcggagaaggcggaggagcccggggaccggccggcggaggagtggctgggccgcgcgggcttgcgctggacgtgggcgcggagccctgcggagtcggcagcggccggcctgacgtgcctcccgagcgtgacgcgcgggcagcggctggcggcgggcggcgggtgcctgctgctggctgcactgtgtttcggcctagccgcgctctacgcaccggtgttgctgctgcgcgcgcgcaagttcgcgctgctctggtcactgggctcggcgctggcgttggcgggaagcgcgctgctgcggggcggcgcggcgtgcggacgcctgctgcgctgcgaagaagcgccgtcccggcccgcgctgctctacatggcagcgctgggcgccacgctgttcgccgcgctgggccttcgcagcacgctgctcacggtgctgggcgcgggcgcgcaggtggccgcgctgctggccgcgctggttgggctgctgccctggggcggcggcaccgcgctgcgcctcgcactgggtcgcctgggccgcggcgccggcctcgccaaggtgctgcccgtgtgaggacctcgcgccctcgccgctggggaagtacgcggagccagcgccgtcggagaccgcgccggccgagctgaggactgcacgccgctgtgcggaagcccgtggcgaaggccctgccctaacagcctgcgagtctaatccgggagcggctgctgccagcggaggcgacagcagcgttgggagctcctcgatgtcagctttttgtgctggacttggcacacgctctgaaaactgagattttgtcattgaactggtgacaggatgtgagacggttattagaagttgctttcgaagtaactgtggtcttaggttcggctgagtaaagaaaaaggatttttcttcgagttagctgctcttgtgatttttctcaggctgttttgtcattttaaaatccagtggtagatgtagcttagcgacggtagttttttgttttggctatactaagacttggaaattattctctccagtgtcagcgaatccagaagggtatcagattaaacaccgaattcagccactggacttttaaaagtacttaagatggtttatctcgggttttttcttcagttaacaaaatcataaatatggtgccttataacatgaaaggaaaattagttgtgtatttcacgacgaaagcgacggaccaaaagaaatttcctgccccaagaagcatgggatccaggaaggggcgcgtagatgcttaacggtctcttcggaaatcctgcaaatagaaagataattctagatccggaatacctgtatctggtggaaaccatggatttctacaagctcgaattattcctcattgtatagcctgctttgtaaactagtttacaatttgcaggctgatcttaagatttttttatatctaattgctgctgccttcattttaggttcagcagttacttttaactaccttaatttattgccagaaggtatgagcctaacattctgatgagtccagaaaactacgttttgtcagtagcaatacactaggaagtaaaatatatttagaatttaaacattgtgtgccagtggtcctcgcgcttgactgcacatcagttacttgaagagccacacctcagatcaatgcagtcagaacctgggaagtaggtcccagacatcaggacctttttaaagctccccaagtgattctacgttccccaagtttgaggaccacttttctgtgcattggcttgcacaatttgaaaataatgcttttcctgagctggatcccagtgttgccttaacagggtgtctgtcgtgccgcagtagagcactgctgcttcctccaaccccaaaatttatgttcctaagtaagtcaggtccctaagccccgtcccaagaagtgacacaagtggccaacatccacactgtaggcttgcaggctacccgccctgagatttggtaaagaacactgccttgttccccatcagtaaacaaggttacctacctcaggaggctgcttgtgagagagcaaatgcagtatcttcagaatgatttatttttttaattaattgtaaagacttgtgccattggctgctctttctagtcccctaaatttctgttctagttttaaatttctctagaacttgcaatagttgggggttttataatgatgttttacaatgtttatttcttaaataaaaacttaaaaattcaaaaaaaaaaaaaaa

SEQ ID NO: 5696 - DNA, 2447 bp, Homo Sapiens
  NM_032750
ctactcatggcgcctgccctggttggcgatgtgttaccaacgtctggcctgtcccagcccaaggctccgcgtggcgaccaggcccagcactgggaggctgtgcagagcgtggcgtttactgcttattgctactctgcagaggttggcaacatctgacccgctctactggcaggaaacaggctcgggggcattgggaaaacgatcaaggccacttggctggacactggcggagcctcgcactcaaacctgtcgggcctcaactccgtgccaggccaacaagttgccctgggcagttcaagctggggataagggggatggggagcaggaagacagcagcaaggatgcgatcccgaaggaactttcctcctcagactgctccatgtccatgtggggcaggtcgctgaagagttcgaaaccgtgctcagcaccgcgtttggggcatgtgagaccgagaggctttgggaaactgacgccgctgtgagaacgagtttagcggagtctatggacgctgcgagcttgtggccacaagagggcgccccggagcacggcccagtccccgcccccgctggatggggcccggcctcttcccagcgttcctcctccggccccaggtcaccgccagcacgcgcctgcttcccgtctgcgcgagtccacgcagctccccagatcaagaagctgaggccccaggttacacactaaagtaaatggcagaggcagaaataacacctatgtcctcctgaccccaaggcatgttcttaaagttctggaaacctcctggaggcttccttgctgctcctctgggactgccaccctgggcagggtgttctgtggcccctcatcatcgtggttttgaaccacaggcccttcaccagcacagcagcagcaggcatggcagcaagcgtggagcagcgcgagggcaccatccaggtgcagggccaggccctcttcttccgagaggccctgcccggcagtgggcaggctcgcttctctgtactgctgctgcatggtattcgcttctcctccgagacctggcagaacctgggtacactgcacaggctggcccaggctggctaccgggctgtggccattgacctgccaggtctggggcactccaaggaagcagcagcccctgcccctattggggagctggcccctggcagcttcctggcggctgtggtggatgccttggagctgggccccccggttgtgatcagtccatcactgagtggcatgtactccctgcccttcctcacggcccctggctcccagctcccgggctttgtgccagtggcccccatctgcactgacaaaatcaatgctgccaactatgccagtgtgaagactccagctctgattgtatatggagaccaggaccccatgggtcagaccagctttgagcacctgaagcagctgcccaaccaccgggtgctgatcatgaagggggcggggcacccctgttacctggacaaaccagaggagtggcatacagggctgctggacttcctgcaggggctccagtgaagcccagcactgctgcagggggtgggctgcctgcctgctctgagctctctcttgcacgctctctcttctctcccaggctctggctcatgcacatgcaacaggtgcgtctgtctatatgtctgggttcttgtcttttgtggtctgtttgtcttttctacctctttctcttgcagtgatagactgagggggtaaaatcaagagaaaaaactctcaggaatcaaggaacataatcctgtggagggtaatccattacatgagcttctcctgttcttccactttcctgcctggctttcactccttcccctgctctgcccagcctttccctcccacccactcctccttctgcaaatgccctgaaggccagcccttaccccaacacccacttccccacctccttaggccccagatacatacatgcccacatgcacgcttacatgtttagagccatccttgtttccaaatatgacccttcgcttgagggcaactgcataggtacatctaactctggactggcatgcacattgtcatgtgcagctttgcatatacacacatgcatacatgagcctccacacaagcacttgcacacatgtggactcctaaccatgctaacctcactggctgggaaggtggggaccccatgggccagcccttgcaggaggcccttttgcaaggcttagggtgtggccagccctgaaagctacttggacacaggtttcagctggccccagcccagaagtgacccccagaaagggagggccaccgctttgccccctgcttttacccttccttctgggtgctctacacctcaggttaccaggcctgaggcatctcagccaagcttgtttcctgctctgaggcttgtggggtgggagccagagtggaggtcggtgaaataaagtgatgcaattagaccccaaaaaaaaaaa

SEQ ID NO: 5697 - DNA, 2244 bp, Homo Sapiens
  NM_032765
gctgcatctgaggcggacgccgcagtgtagggcacaccctgagggtagcgagagacgtgacaggaccgagcagctgggggctgcagcctgctctgtccccaccgatcccagagagaggctgtgagtctggatctgggcgttcgcaccctgagagagggggtcaaagctcccctgcggccccgaggaagaagagcaaggttgaggacagcctcgggtcaccagagtagtttggaggcaggcctgcaggcgcgtccccgctcctcagctccaagctgacgtatctacacctgccggcgggcattaagatggctggttatgccactactcccagccccatgcagacccttcaggaggaagcggtgtgtgccatctgcttggattacttcaaggaccccgtgtccatcagctgtgggcacaacttctgccgagggtgtgtgacccagctgtggagtaaggaggacgaggaggaccagaacgaggaggaagatgaatgggaggaggaggaggacgaggaagcggtgggggccatggatggatgggacggctccattcgagaggtgttgtatcgggggaatgctgacgaagagttgttccaagaccaagatgacgatgaactctggctcggtgacagtggtataactaattgggacaacgtagactatatgtgggacgaggaggaagaagaagaagaggaagatcaggactattacctaggaggcttgagacctgacctgagaattgatgtctaccgagaagaagaaatactggaagcatacgatgaggacgaagatgaagagctgtatcctgacatccacccgcctccttccttgccccttccagggcagttcacctgcccccagtgccgaaagagctttacacgtcgcagctttcgtcccaacttgcagctggccaacatggtccagataattcgccagatgtgccccactccttatcggggaaaccggagtaatgatcagggcatgtgctttaaacaccaggaagccctgaaactcttctgtgaggtggacaaagaggccatctgtgtggtgtgccgagaatccaggagccacaaacagcacagcgtgctgcctttggaggaggtggtgcaggagtaccaggaaataaagttggaaacaactctggtgggaatacttcagatagagcaagaaagcattcacagcaaggcctataatcagtaagatgtgtgaaaagttgggtagccacaggaggtgttcattaaggatatgattccatttatatagctatttctattgcataaccaggacagttttattgttttgaggtcaatgttcttttaaaatttgattttctgtaagaagaggctttttggcccagaaagccttacttattttacatcttccagtttgtccatcccatgagttagagttcgtcttgactctgcaagctagaatcaaagaattatgaaagtaagatcatttagatttgaccaagggcaccattaaatggtgtcaggttttaggaagcagacgggtgtataaaaagaaaatgaacaaagatttcacttattggggatcaggcataactggatgcctggattgtcctgccacccagctgccaccaataaaatcattcatcactctgcaagagggaccagatgcttccatcatcagtactccttgtttttctgttatctcctttgaggtagctaaaaatggcagccaaaaaaaaatgttgaggcttttctcaagtatatactcatgttattttgcagaagatagggtcaacttcttcagttgagttatctgaaagtgttgggcagtgacaccatgccaaacactgttaaattcatgccattaaaaacagtggagtgttctgcaaagcccgattctctgcagctttaagactggacagtattgaaatattcacaggaatcttccaagccgtgaaagcttaatattaaacagcccttttaattgcaaaggagaaaaaaatggagacacttgtgaaaccttgcattctgagtgctgccacaaataaattaaggaattccagaatttcttcatctacttctgcagtcttaactctgaattaatgactgtatatatcaaacttcagatcttaaaaaacatcagctcgcaagaggctgaggcaggagaatgacatgaacctgggaggcggagcttgcagtaagccgagactgagccactgcactccagcctgggcaatagagcaagactccatctcaaaaaaaaaaaaaaaaaa

SEQ ID NO: 5698 - DNA, 3198 bp, Homo Sapiens
  NM_032772
gctggacacgcagcggctcgcatcgcagagcgcagcgccggcgcggggccgcgagaacgcagcgcaggggagcagcccgaggcggacaccgcgagccgcccggcactcccgcagtccagccggctcctctagcccggccacggctccgctgcgggccacccaggattactcgcgtctggctccaggcgccgagaaggcgcgctgggcgcccgtggccgccgcgccagctcctcctcctcccgctgctcctgctcccggggcgagcgcgcagccccgagcccgccccgcgcctcccggagccctcccccccgctgctcccatgcgcgcgggtgggtcatgagcacagcgccctcgctttctgccctaagaagcagtaagcacagcggcggcggcggcggcggaggcggaggcggcggtgcagaccctgcctggaccagcgcgctctctggaaatagctccggccccggcccaggctcgtccccggccggcagcaccaagccttttgtgcacgccgtgcccccctctgaccccctgcgccaggccaaccgcctgccaatcaaggtgctgaagatgctgacggcacgaactggccacattttgcaccccgagtacctgcagcccctgccttccacgccggtcagccccatcgagctcgatgccaagaagagcccgctggcgctgttggcgcaaacatgttcgcagatcgggaagcccgacccctcgccctcctccaaactctcctcggttgcctccaacgggggcggcgcgggcggtgccggcggcggtgctgcgggcgacaaggacaccaaatcgggccccctgaagctgagcgacatcggcgtggaggacaagtcgagtttcaagccgtactccaaacccggctcggataagaaggagccgggaggcggcggtggaggcggtggcggtggcgggggcggcggcgggggtgtttcgtcggagaagtcgggattccgggtaccgagcgccacctgccagccattcacgcccaggacaggcagcccgagctccagcgcctcggcctgctcgccgggaggtatgctgtcctcggccgggggtgccccggagggcaaggacgacaagaaagacaccgacgtgggcggcggtggcaagggcaccgggggcgcctcggccgaagggggacccacggggctggcacacggccggattagctgcggcggcgggattaatgtggatgtgaaccagcatccggatgggggcccgggaggcaaggctctgggctcggactgcggcggttcatcgggctccagctccggctccggccccagcgcgcccacctcctcctcagtgttgggctctgggctggtggctcccgtgtcaccctacaagccgggccagacagtgttccctctgcctcccgcgggtatgacctacccaggcagcctggccggggcctacgccggctacccgccccagttcctgccacacggcgtggcacttgaccccaccaagccgggcagcctggtgggggcgcagctggcggcggccgcggccgggtctctgggctgcagtaagccggccggctccagccctttggccggagcgtctccgccgtccgtgatgacagccagtttgtgccgggacccttactgcctcagctaccactgcgctagccacctggcaggggcggcggccgccagcgcttcttgcgcacatgatccggctgctgcggctgcggcgctgaagtccggatacccgctggtgtaccccacgcacccgctgcacggtgtgcactcctcgctaacggccgccgcggctgctggcgccacaccgccctccctggccggccaccccctctacccctacggctttatgctccctaacgacccactcccccacatctgcaactgggtgtcggccaacgggccgtgcgacaagcgcttcgccacgtccgaagagctgctgagccacttgcggacccatacggcatttcccgggacagacaaactgctgtcgggctaccccagctcgtcgtctctggccagcgctgccgcggccgccatggcttgccacatgcacatccccacctcgggcgcaccgggcagccctgggacgctggcgctgcgcagcccccaccacgcgctgggactcagcagccgctaccacccctactccaagagcccgcttcccacgcctggcgcccccgtgccggtgcccgccgccaccggaccgtactactccccctacgccctctacggacagagactgaccaccgcctcggcgctggggtatcagtgagggcggccgggagggcgagcgagggagaggagggagagggggaggggaggagtccagggagaggcgggatcacggcccaggctgctgacacccgcgcgtggggaggactcgggccacgaaaggaaagaaatgtataccgtatctatctacccgacagcagcgaccgagacccggtgggacactccccttctccccactttcacctccccacccaaactttataaaagttgaaaaaatatcatttgactttttatagaaaaaaaaaggaaaaaataattgagaaagtgttcatctgaggactgcatcggtggacactggtatttatttatgttagctccaagcggaccggtggttcaaaagtgcattatttagtttgagctctgtaggtaaaaaggaggtgggaaaaattttaaaacttgagggtaaaaatgtggaaaacaaaccctcccatcccttgtagattataaataaaagcaaaaccgccacagaactagaggtcttctctttaatgttactttaaaattgctatgattgtattgtacgttatttaatgtctgattgaaacacaaatttacatgcatgtttgttacaaaaaaaatgaaaaaaaaagtcacaatttgtcagctctgatttcaaattgcaattatttttaaggtgtataccatcgaagagaatgggtatttttttgtatgtattctggaagaaaacaacaaaaaaaaaaagaaaaagaaaaaattctattccaaaacctcatttgccttattttgttctttaaaaggaacacttaactatttttaatttttaagtccacccgctgagaaggggacaaggtttacgtcatgtactaaaataatagacaatgtatcgctttaaagattaaaattccgtatatttgatgtattaaaaaaaaaaaaaaaaaaa

SEQ ID NO: 5699 - DNA, 2277 bp, Homo Sapiens
  NM_032773
gggaaatggcggccgcgggcttggtcgctgtggcagcggctgccgagtactctggcacggtagcgtcgggaggtaacctccctggtgttcactgcggcccaagctccggggcaggccctggttttggcccgggctcgtggagccgctctctcgatcgagccctggaggaggcggcggtcactggggtgctgagcctgagcggccggaaactgagggagtttccccggggagcggccaaccacgacctgacggacaccacccgggcggacctgtcgcgaaatcgcctttcagaaattcctatagaagcatgtcactttgtttctctggaaaatctcaacttgtaccaaaattgtattcgttatattccagaggcaattttaaacctacaagctctaacattcttaaatattagtcggaaccaactgtcaacattgccggtacacttgtgtaatttgccattgaaagtcttaattgctagtaataacaaattggtgtcacttccagaagaaattggacaccttagacatttgatggaacttgatgtgagctgcaatgaaattcaaactataccttcccaaattggtaacctggaggccttgagagaccttaatgtaagaagaaatcacctagtacatttgcctgaagagctggcggagttgcctttgatacggttagacttctcatgcaataaaattaccacaatccctgtttgttatcggaacctcaggcacctacagacgatcaccctagataacaatccactacaatcacctcctgcacagatatgtataaaaggcaaagtccacatatttaaatacctgaacatacaagcttgtaagattgctccagatctgccggattatgataggagaccgttgggttttggctcctgccatgaagaactgtactcaagtcgcccttatggagcccttgattcaggcttcaatagtgtggacagtggtgataagagatggtcagggaatgaacctacagatgaattttcagatctgcctcttcgagtagcagagattactaaagaacaaagactacgaagagaaagccagtaccaagagaaccgcggcagtttggtagtaacaaacggcggagtggaacatgatctggatcagattgactacatagacagctgcaccgcagaggaagaggaggccgaggtgagacagcccaagggaccagacccagacagccttagttcacagtttatggcgtatattgaacagcggcgaatctctcatgagggttcaccagtaaagccagtagccattagggagtttcaaaaaacagaagatatgagaagatacttacatcaaaacagggttccagctgagccatcttccctcctgtcactatcagcaagtcacaatcagctgtcacacacagacctggaacttcatcagagaagggagcagttagtagagcgcactcggagagaggctcagcttgctgccctgcagtatgaggaggagaaaataaggaccaagcagatccagagagatgctgtcctggactttgtcaaacaaaaagcatcacaaagtccacaaaaacagcacccgctcctagatggcgtagatggtgagtgccccttcccatccagaaggtctcagcacactgatgatagtgccttgtgcatgtcgctgtcagggttgaatcaagtgggctgtgctgctaccctgcctcattcttctgccttcacgcctcttaagagtgatgacagacctaatgctctattaagttcacctgcaacagaaacagttcatcattcccctgcatattcttttcctgctgctatccagagaaatcagcctcagcgccctgaaagcttccttttccgagcaggtgtcagggcagaaaccaacaaaggtcatgcttcaccccttcctccatctgctgcacctaccactgattctacagattccataacaggacagaattcaagacagagagaagaagagctggaattaatagaccaactgcgtaaacatattgagtaccggttgaaagtgtctctaccttgtgatctcggagcagctctaactgacggtgttgttctttgccatttggccaatcatgtgcgacctcgatctgtcccaagcattcatgttccctcaccagctgtagtaagttgataatcctaaaaagccttggctattcatcagacatttgttaagcacagtggacagacatttcttaagcattgtgctagatattaaggatacagatataaagagtccagtctctacaaaaaaaaaaaaaaaaaaa

SEQ ID NO: 5700 - DNA, 2637 bp, Homo Sapiens
  NM_032775
acgtgacggcccaggcccccgccccgccggctcctctcgcccagcctcccgcctcgcgcctcccgcctcccgcctcccgcctccctccagctgcgagtgcggcctcggctggcggcggcaccaggccacagttgtaagggatcttgtggctgtcaggatggcagaggagcaggagttcacccagctctgcaagttgcctgcacagccctcacacccacactgcgtgaacaacacctaccgcagcgcacagcactcccaggctctgctccgagggctgctggctctccgggacagcggaatcctcttcgatgttgtgctggtggtggagggcagacacatcgaggcccatcgcatcctgctggctgcgtcctgcgattacttcagaggaatgtttgctgggggattgaaggagatggaacaggaagaggtcctgatccacggtgtgtcctacaatgctatgtgccaaatcctacatttcatatacacctccgagctggagctcagcctgagcaatgtacaagagacactggtggctgcctgccagcttcagatcccagaaattatccatttctgctgtgatttcctcatgtcctgggtggacgaagagaacattctcgatgtctaccggctggcagagctgtttgacttgagccgcctgactgagcaactggacacctatatcctcaaaaactttgtggccttctctcggactgacaagtaccgccagcttccattggagaaggtctactccctcctcagcagcaatcgcctggaggtctcctgcgagaccgaggtatatgagggggcccttctctaccattatagcctggagcaggtgcaggctgaccagatctcgctgcacgagcccccaaagctccttgagacagtgcggtttccgctgatggaagctgaggtcctgcagcggctgcatgacaagctggaccccagccctttgagggacacagtggccagcgccctcatgtaccaccggaacgagagcctacagcccagcctgcagagcccgcaaacggagctgcggtcggacttccagtgcgttgtgggcttcgggggcattcactccacgccgtccactgtcctcagcgaccaggccaagtatctaaaccccttactgggagagtggaagcacttcactgcctccctggccccccgcatgtccaaccagggcatcgcggtgctcaacaacttcgtatacttgattggaggggacaacaatgtccaaggatttcgagcagagtcccgatgctggaggtatgacccacggcacaaccgctggttccagatccagtccctgcagcaggagcacgccgacctgtccgtgtgtgttgtaggcaggtacatctacgctgtggcgggccgtgactaccacaatgacctgaatgctgtggagcgctacgaccctgccaccaactcctgggcatacgtggccccactcaagagggaggtgtatgcccacgcaggcgcgacgctggaggggaagatgtatatcacctgcggccgcagaggggaggattacctgaaagagacacactgctacgatccaggcagcaacacttggcacacactggctgatgggcctgtgcggcgcgcctggcacggcatggcaaccctcctcaacaagctgtatgtgatcgggggcagcaacaacgatgccggatacaggagggacgtgcaccaggtggcctgctacagctgcacgtctggacagtggtcatctgtctgcccactccctgctgggcacggtgagcctggcattgctgtgctggacaacaggatctatgtgttaggtggccgctcacacaaccgcggcagccgcacaggctacgtgcacatttacgatgtggagaaggactgctgggaggaagggccccagctggacaactccatctcaggcctggcggcctgtgtgctcaccctgccccgctccctgctccttgagccgccccgcgggacccctgaccgcagccaggccgacccggactttgcctctgaggtgatgagtgtgtctgactgggaggagtttgacaactccagtgaggactaggctccctgtgcctggcatcagagggaagggaggctggggctgcagggcagtgaaacccacgcagcctaggccagagcactttactccaggcagggcccctgcccctgttggccacagcttatgggccctgccctctttcttcacaccagccccttggccagcctgccgcaggcatctcagggccatgcagatcccaggctgtggattacgtcactgcaggaactgcttctgaaaggctttggccttcctcagtgagccctggaggggttggccttctctcctccctgcctagatcagtccttctccaaaaggacctgggagctggcagcctgggcaggggggctgaggcacgtggtagccctctttctgtgaatggggtggggctgtgggggcagctggggttggaggatgagagctcctgaggggcagaggagcagagatgcatcagctcgcctgggactggctctgtgataaaaagacccctcccgctgggttttcagaccccatgttgttggtcaatgaaataaagcatcttacagaaggtgttaactgttaaaaaaaaaaaaaaaaaaaaa

SEQ ID NO: 5701 - DNA, 2551 bp, Homo Sapiens
  NM_032780
cggccgcccacctgccgggtaagggcccctcgggcccgtggtcgggcatcgattggccccgcctggcgcagcccccgcccctgcagcggactgcggtgctcatcagacctgagcagttgctccggcggcgctcggggagggagccagcagcctagggcctaggcccgggccaccatggcgctgcctccaggcccagccgccctccggcacacactgctgctcctgccagcccttctgagctcaggttggggggagttggagccacaaatagatggtcagacctgggctgagcgggcacttcgggagaatgaacgccacgccttcacctgccgggtggcaggggggcctggcacccccagattggcctggtatctggatggacagctgcaggaggccagcacctcaagactgctgagcgtgggaggggaggccttctctggaggcaccagcaccttcactgtcactgcccatcgggcccagcatgagctcaactgctctctgcaggaccccagaagtggccgatcagccaacgcctctgtcatccttaatgtgcaattcaagccagagattgcccaagtcggcgccaagtaccaggaagctcagggcccaggcctcctggttgtcctgtttgccctggtgcgtgccaacccgccggccaatgtcacctggatcgaccaggatgggccagtgactgtcaacacctctgacttcctggtgctggatgcgcagaactacccctggctcaccaaccacacggtgcagctgcagctccgcagcctggcacacaacctctcggtggtggccaccaatgacgtgggtgtcaccagtgcgtcgcttccagccccagggcttctggctacccgggtggaagtgccactgctgggcattgttgtggctgctgggcttgcactgggcaccctcgtggggttcagcaccttggtggcctgcctggtctgcagaaaagagaagaaaaccaaaggcccctcccggcacccatctctgatatcaagtgactccaacaacctaaaactcaacaacgtgcgcctgccacgggagaacatgtccctcccgtccaaccttcagctcaatgacctcactccagattccagagcagtgaaaccagcagaccggcagatggctcagaacaacagccggccagagcttctggacccggagcccggcggcctcctcaccagccaaggtttcatccgcctcccagtgctgggctatatctatcgagtgtccagcgtgagcagtgatgagatctggctctgagccgagggcgagacaggagtattctcttggcctctggacaccctcccgttcctccaaggcatcctctacctagctaggtcaccaacgtgaagaagttatgccactgccacttttgcttgccctcctggctggggtgccctccatgtcatgcacgtgatgcatttcactgggctgtaacccgcaggggcacaggtatctttggcaaggctaccagttggacgtaagcccctcatgctgactcagggtgggccctgcatgtgatgactgggcccttccagagggagctctttggccaggggtgttcagatgtcatccagcatccaagtgtggcatggcctgctgtataccccaccccagtactccacagcaccttgtacagtaggcatgggggcgtgcctgtgtgggggacagggagggccctgcatggattttcctccttcctatgctatgtagccttgttccctcaggtaaaatttaggaccctgctagctgtgcagaacccaattgccctttgcacagaaaccaacccctgacccagcggtaccggccaagcacaaacgtcctttttgctgcacacgtctctgcccttcacttcttctcttctgtccccacctcctcttgggaattctaggttacacgttggaccttctctactacttcactgggcactagacttttctattggcctgtgccatcgcccagtattagcacaagttagggaggaagaggcaggcgatgagtctagtagcacccaggacggcttgtagctatgcatcattttcctacggcgttagcactttaagcacatcccctaggggagggggtgagtgaggggcccagagccctctttgtggcttccccacgtttggccttctgggattcactgtgagtgtcctgagctctcggggttgatggtttttctctcagcatgtctcctccaccacgggaccccagccctgaccaacccatggttgcctcatcagcaggaaggtgcccttcctggaggatggtcgccacaggcacataattcaacagtgtggaagctttaggggaacatggagaaagaaggagaccacataccccaaagtgacctaagaacactttaaaaagcaacatgtaaatgattggaaattaatatagtacagaatatatttttcccttgttgagatcttcttttgtaatgtttttcatgttactgcctagggcggtgctgagcacacagcaagtttaataaacttgactgaattcatttacaaaaaaaaaaaaaaaaaaaaaa

SEQ ID NO: 5702 - DNA, 2165 bp, Homo Sapiens
  NM_032784
gcggccgccccggcggctcctggaaccccggttcgcggcgatgccagccaccccagcgaagccgccgcagttcagtgcttggataatttgaaagtacaatagttggtttccctgtccacccgccccacttcgcttgccatcacagcacgcctatcggatgtgagaggagaagtcccgctgctcgggcactgtctatatacgcctaacacctacatatattttaaaaacattaaatataattaacaatcaaaagaaagaggagaaaggaagggaagcattactgggttactatgcacttgcgactgatttcttggctttttatcattttgaactttatggaatacatcggcagccaaaacgcctcccggggaaggcgccagcgaagaatgcatcctaacgttagtcaaggctgccaaggaggctgtgcaacatgctcagattacaatggatgtttgtcatgtaagcccagactattttttgctctggaaagaattggcatgaagcagattggagtatgtctctcttcatgtccaagtggatattatggaactcgatatccagatataaataagtgtacaaaatgcaaagctgactgtgatacctgtttcaacaaaaatttctgcacaaaatgtaaaagtggattttacttacaccttggaaagtgccttgacaattgcccagaagggttggaagccaacaaccatactatggagtgtgtcagtattgtgcactgtgaggtcagtgaatggaatccttggagtccatgcacgaagaagggaaaaacatgtggcttcaaaagagggactgaaacacgggtccgagaaataatacagcatccttcagcaaagggtaacctgtgtcccccaacaaatgagacaagaaagtgtacagtgcaaaggaagaagtgtcagaagggagaacgaggaaaaaaaggaagggagaggaaaagaaaaaaacctaataaaggagaaagtaaagaagcaatacctgacagcaaaagtctggaatccagcaaagaaatcccagagcaacgagaaaacaaacagcagcagaagaagcgaaaagtccaagataaacagaaatcggtatcagtcagcactgtacactagagggttccatgagattattgtagactcatgatgctgctatctcaaccagatgcccaggacaggtgctctagccattaggaccacaaatggacatgtcagttattgctctgtctaaacaacattcccagtagttgctatattcttcatacaagcatagttaacaacaaagagccaaaagatcaaagaagggatactttcagatggttgtcttgtgtgcttctctgcatttttaaaagacaagacattcttgtacatattatcaataggctataagatgtaacaacgaaatgatgacatctggagaagaaacatcttttccttataaaaatgtgttttcaagctgttgttttaagaagcaaaagatagttctgcaaattcaaagatacagtatcccttcaaaacaaataggagttcagggaagagaaacatccttcaaaggacagtgttgttttgaccgggagatctagagagtgctcagaattagggcctggcatttggaatcacaggatttatcatcacagaaacaactgttttaagattagttccatcactctcatcctgtatttttataagaaacacaagagtgcataccagaattgaatataccatatgggattggagaaagacaaatgtggaagaaatcatagagctggagactacttttgtgctttacaaaactgtgaaggattgtggtcacctggaacaggtctccaatctatgttagcactatgtggctcagcctctgttaccccttggattatatatcaacctgtaaacatgtgcctgtaacttacttccaaaaacaaaatcatacttattagaagaaaattctgattttatagaaaaaaaatagagcaaggagaatataacatgtttgcaaagtcatgtgttttctttctcaatgagggaaaaacaattttattacctgcttaatggtccacctggaactaaaagggatactattttctaacaaggtatatctagtaggggagaaagccaccacaataaatatatttgttaatagtttttcaaaaaaaaaaaaaaaaaaaaaaaaaa

SEQ ID NO: 5703 - DNA, 2121 bp, Homo Sapiens
  NM_032786
gatcgggtaggcggctctttgtcgaagctagaggaccggcaggcggcagcagcaactacggcggcggcggcagaacccagcagcgatgtggaggtggagacccacaggagccccggacttcacctgagctacctcagtggtcaccaagagtggcaagataaagaaaaccctgagttgggcgggaccaggatgcctgaccgggacagctatgccaacggtaccgggagcagcggtggaggccctggaggtggtggcagcgaggaggccagtggggcaggggtaggcagtggcggggccagctcagatgccatctgtagagacttcttgaggaatgtgtgcaagcgaggcaagcgttgccgatatcgccacccagacatgagcgaggtgtccaacttgggggtgagcaaaaacgagttcatcttctgccatgacttccagaacaaggagtgtagccgcccaaattgccgtttcatccatggctccaaggaggatgaggatggctataagaagacaggagagcttcccccacggctgaggcagaaagtagcagctggccttggcctttcaccggctgacctaccaaatggcaaggaggaggtccctatctgccgtgactttctcaagggtgactgtcagagaggagccaagtgcaagttccgtcacctgcaacgggattttgagtttgatgctcggggtggaggaggcactggtgggggctcaacaggctcagtcctcccaggacgacgtcatgatctctatgatatctatgaccttcctgacaggggctttgaggaccatgagccaggcccaaaacgccggcgaggtggatgctgcccccctgatggccctcattttgagtcatatgaatatagtttggctccaccgcgaggggtggagtgcagactgctagaggaggagaatgccatgctcaggaagcgggtagaggagttaaagaagcaggtcagcaacctgctggccaccaatgaggtactactggaacaaaatgctcagttccgcaatcaggccaaggtcataaccctgagctccactgcaccagcgactgagcagactctggcccccactgtgggcactgttgccacttttaaccatggcattgcccagactcacactactctcagcagccaggctctacagcctcgtccagtgtcccagcaagaactggtggcccctgctggagctccagctgctcccccaactaatgctgcacctcctgctgctccgccacccccacccccacacttgaccccagagatcacgccactgtcagctgccctggctcaaacaattgcccagggaatggcacctccacctgtctccatggctcctgtggctgtatctgtggctcctgtggcccctgtggctgtatcgatggcccaacccttggcaggaatcacaatgagccacaccaccactcccatggtgacttaccctatcgcttcccagagcatgcgcatcacggccatgccacactgatggggctaatggacactcccctggtatagcctcgcagggctggggtcagggggcccttgcccactcacctagccttccccatccctgtctgaagggctcccttgagaactaggacaagagactacaaggagtatgtcctgaggaggggttgggatggtgtgttttctctcacctcccttttatgagggtcctcttgtccatcttcaagcctcacagtgggggcttgcagaggagtgcagactgaagccagcagagaggaaggactgactgaggggctgtgtcctcttatgggaatttgggaacatccctcgtcttgtcctctcttctgcacagcacaggttccagcactggttttagaagaaaaaaataccctgcccagagggaaagccaggaaagattgggaagtgggtggtcaggagagaaggcctgataggagccttcagacaatttgggtcctagttgcttgggttggacaatacaggaattgcttctgggccctgggaaagctgggaccatagtgctccagcccaaagactaggggagcattcattaccctagtttgacctgaaaatccatagggcagggcccactactttccaaagaaataaaagaacaattatttttaac

SEQ ID NO: 5704 - DNA, 3204 bp, Homo Sapiens
  NM_032788
acagagctgggtgtgtccctccgagtgccccccgctagggactgtgcaggccggagctaggcagggacagcggggcgaaccgggctgatagagtcggtccctgctcctgtgaggctctcaccgaatccctgctgtttccgggcagctgaagagcgctgggccctcgcgtcgcgggcgtggctgtggccgtgtctcctggtagtctgagcccactgtgcgtgtggatccacgtgggagctgggttccagagcctggtcctgaggaggagccgagccggggcttccccttctcagaatcctgctcttcctccagagagattcccaggagaagagggaacaaccaattcattcctgaaagccaggcctcgggacctgatgacatttgaagatgtggctgtggaattcagccagtgggagtgggggcagctgaaccctgctcagaaggacctctacagggaggtgatgctggagaacttcaggaacttggccattctgggccttctagtatccaaaccatatgtgatctgccagttggaggaagggggtgagcccttcatggtggagagagaaatctcaacaggagcccactcagactggaagagaaggtctaaatccaaggaatcaatgccaagttggggaatttccaaagaagaattattccaggtagtatcagtggaaaaacacattcaagatgtgctgcagttctcgaagttgaaagcagcctgcggttgtgatggccagttagagatgcagcagataaaacaggagagacacctgaaacaaatgtcaaccattcacaaatctgccaccacccttagcagagattataaatggaatggatttgggagaagcttaggtttaagatcagtccttgttaaccaacacagcattctcatgggagaaggatcttataaatgtgatacagaattcaggcagactttagggggaaacaactctcagagaacccacccagaaaagaaatcttgtaaatgtaatgagtgtgggaagtcctttcacttccagtcagaacttaggcgccatcagcgatgtcacactggagaaaagccgtatgaatgcagtgactgtggaagagcctttggtcatatttcatcccttattaaacatcaaagaactcatactggagaaaagccctatgaatgcagtgaatgtgggagagccttcagccagagttcgtctcttgttctgcactatagatttcacactggagagaaaccctacaaatgtaatgaatgtggacgagcctttggtcacacttcatcccttattaagcatcagaggactcatactggagaaaagccctatgaatgccgggaatgtgggagaaccttcagccagagctcatcactcattgtgcattacagatttcatactggagagaaaccttacaaatgtaataaatgtgggagagccttcagccagagttcatctctcactcaacattacagatttcacactggagagaaaccctacaaatgtaatgagtgtggaagggcctttgctcatactgcatcccttattaaacatcagagaagtcatgctggaaaaaaaaccctataaattcagtgaatatagaagggctttcagctggagtgcagacatcactggaacttaaagaattcatatcagagagagatcctaaaggtgtaatgtatgtgggaagaccacatcttgttccacatcaggcaataattactaaagagaatccctgtcaatgtcaagagggggtgggcttcccctctcttaccaaacatgggagaatccatactagtgagaaaccacgtgaatgtaatgaatgtgggaacgctttgatcagaggatgcatattattcagcatcagacagccgacactggggaggagccttatcaatgcagtgagtgtggcaagccttcagttacatactgattctttaagaaaatcagataacttgtactggagagaaatcctacaagtgtggtaagtatggaaaaatcttcagttgtatctcttcctttactaagcatcaagaacacatactagagagaggccctatgaaagcaggaaatagaggaaggccttcagtcagggctcatcccttattaagcatcagaaaattcatacctgagaaaaacctgtgaatgtgggtaatgtgggagagccttcagccaaacctcattgctttataaaccccttagaactctccctactagctggaaactctggtgacgtgatgaatgtgggaagggctttggtggatgttccaccaaaacacgttagagaatttgtacattagagaatttgtgctagagcaactcttcaaatttagtgaaactgggaaaacccattagtagagttcaagcttcagtattcatctcaaagagaaaccttgggaacatgatgaatgtgaggaaagttcctttccaacttgagatgtataaaactagagctgaaaagaagctgagaaatcaccttgtctggtgattttctgcctggtggggccatttgtataacgacacttgtgcattgcctcctcatgctgttactgacggggcagggtgtcatgcatgggtgcagaggatggaggctgagaaaggtagacagctacccatgatctagcccagtcgtattttagagctaataaaactgatgttcagaaagtgacatgccttggcctatagtcctaactgggctgggcctctttcctgtggttcacagctgtagtatggagattaatagacaggatctttgcagtacaacacctctatgcacttctttctctgtagcacatgttacctttctttgtgaggcaatggagtggtctaggattgagcaaaaagcaatttttgttacatctttatgctaatagatttggaatttttgaaatgaaatgaaaccttgtttaaacattaaaattactaaaataggctgggcgcggtggctcacgcctgtaacctcagcactttgggaggccgaggcggacagatcacgaggtcaggagttcgagaccatcctggctaacacagtgaaaccctgtctctcctaaaaatacaaaaaaattagccaggcatggtggcgggcgcctgtagtcccagctacttggaaggctgagacaggagaatggcgtgaatcggggaggcagagcttgcagtcagccgagatcacgccactgcactccagcctgggagacagagtgagactccgtctcag

SEQ ID NO: 5705 - DNA, 2527 bp, Homo Sapiens
  NM_032795
attgtagtcgcccttctccacgtggtcttggctcgccccgcccttccttgtaagatggcggcgcccaggtggagcgcgtcgggcccctggatccggggaaacggccaaggttgcgggagtctcttcactctcgtctcaaagccattttgtgccgctgccgctgcctctacggccataaatgcccagagattagcggagaagctccgagcccagaaacgggaacaagacacaaagaaggagccggtgtccacaaacgctgttcagcggagagtgcaagaaatagtgcggttcacacggcagctgcagcgagtccaccccaacgtgcttgctaaggcactgacccgaggaattctccaccaggacaagaaccttgtggtcatcaataagccctacggtctccctgtgcatggtggccctggggtccagctctgcatcactgatgtactacctatcctggcaaagatgcttcatggccacaaggcagagcccttgcatctgtgccaccggctggacaaggaaaccacaggtgtaatggtgttggcttgggacaaggacatggcacatcaagtccaagagttgtttagaacccgtcaggtggtgaagaagtactgggccatcactgtgcatgtccccatgccctcagcaggagtcgtggacatccccattgtggagaaggaggcgcaaggccagcagcaacaccacaagatgacattgtccccgagctaccgcatggacgatgggaaaatggtgaaagtgcggcgcagccggaatgcgcaagttgctgtaactcagtaccaggtgctcagcagcactctctcctccgccctcgtggagctccagcccatcactggaataaaacatcagcttcgagttcacttgtcttttggattggattgtccaatccttggtgatcacaagtactcagactggaataggttggccccccagaagctgtctgtgggcaccctgaagaagctggggctagaacagtcgaaggcccgctacatcccccttcacctgcacgcccggcagctgatcctgcctgccctggggtccgggaaggaggaactcaacttggtctgcaaacttcctcgcttctttgtgcattccctgcaccgcctgcgtttagagatgccaaatgaggatcaaaatgagaacaatgaagccaagtgtctgggagcacagtgaagaccatgggagcaccctggcacctgggagcacagtgaagaccctgagagcatcctggcacctgggagcgcaggttggcccctgaactgttctttgtttacaggactctgctaacttctcacttggaacagactgcgtaagagccaggtgggataaggtaaagcaactcagctgctacagggcttttaatggagaacaaagtctatttactgatagtttggctgcactgtggaaaagcctgctggaagtctccctgccgtgggctctcattgccaatatggaacagagcccagggccaggcagactggggcagtgactggaaaaggaaaactaaaggtcagaatccgggatcaggaactgtttttatccagcagtgaagctcttgagctcttaggaaggttcccgtggttggaaagaacataatggttaacaaatatcacagcatccagggattgcccagctatagtgtgggtgccctactgaactctgattagggaacctgtataagggtattgagtgtgaggttgaggtgggacatttgctgagcaaggagaaccgatgtgaatggcaggcagataacatgcacacatgaagctggctgggtgtaaggcagtagcggggagcggcatgctgtctaacagctgttagctccagctggttgttgccatgtgggaatggattttctcatttcttcagagaagctggaaacctagatatttatgtgaaacctcccagtgtattgccaactaaatcaaatttttaaagatgcttaggcacctaagcaaataatacttagaggttgaatttggtctacaggctagcagtttgcagtctatgtttaatgaatggtatagaagtttggggaaaggtgccatcttgaaaattctggatcagtggttggcattttcgctgcgtgtagtatgtatcctttctaggcttggagatggctttggttggtccgtgaatgtagttatgagagtgctgccattaaaaaatcaaaaatctctgttgtggaagcgtatcttctgttcttaggtctcaggaaggagagggctatactgaacaccattagggatagatggaaatgaccttggcctccctgctcagctggtccatctagtttccaccttgtttcttgcaaacaaatacacctcacactactttttctttctgacagagttggagtgacagcacagttaggggggtacaccccgggacagtctttatatgttccctctgtatagatgatgccactttctagccctttccctgtctccatggtacccattactgtgcataataaatttaactttgaaagcacagaaaaaaaaaaaaaaaa

SEQ ID NO: 5706 - DNA, 1184 bp, Homo Sapiens
  NM_032799
gggcgcttcttccgggtggggccccgggccgaggcgatggcgccctgggcgctcctcagccctggggtcctggtgcggaccgggcacaccgtgctgacctggggaatcacgctggtgctcttcctgcacgataccgagctgcggcaatgggaggagcagggggagctgctcctgcccctcaccttcctgctcctggtgctgggctccctgctgctctacctcgctgtgtcactcatggaccctggctacgtgaatgtgcagccccagcctcaggaggagctcaaagaggagcagacagccatggttcctccagccatccctcttcggcgctgcagatactgcctggtgctgcagcccctgagggctcggcactgccgtgagtgccgccgttgcgtccgccgctacgaccaccactgcccctggatggagaactgtgtgggagagcgcaaccacccactctttgtggtctacctggcgctgcagctggtggtgcttctgtggggcctgtacctggcatggtcaggcctccggttcttccagccctggggtctgtggttgcggtccagcgggctcctgttcgccaccttcctgctgctgtccctcttctcgttggtggccagcctgctcctcgtctcgcacctctacctggtggccagcaacaccaccacctgggaattcatctcctcacaccgcatcgcctatctccgccagcgccccagcaaccccttcgaccgaggcctgacccgcaacctggcccacttcttctgtggatggccctcagggtcctgggagaccctctgggctgaggaggaggaagagggcagcagcccagctgtttagggttgctggaggccgggctaccgtcttgtgcctgaaaaccacggggcctgtccccagctggggtgagcgctcagagggcctggggccctcactcctgcccacgcctcccagaccccagaacggagcttcaagtcagacagatccctgccttggtgggcagttctgccttccaaggaagaaggggaagaaaaggacctgtgggtggctcaggcccaagcagaccccgggctccaccccagccccgcccaggctgctgccagtgcacacttttacaaatttaatataaagcaagtccagtcttaaaaagacaaaaaaaaaaaaaaaaaaaaaaaaaaaaaaaaaaa

SEQ ID NO: 5707 - DNA, 2010 bp, Homo Sapiens
  NM_032802
aagaggaagtcgcgctgctgtggcggccgctgtagcagcggcggtccagtcgtagcccggccgcccgcgcctgtccggtccggtccggccacggaggcagcgcagcggcgggactccgagcctaccccgccgagtgagctgcgccgcaccgtgccgtcccacccggcacccaccagtccgatggggccgcagcggcggctgtcccctgccggggccgccctactctggggcttcctgctccagctgacagccgctcaggaagcaatcttgcatgcgtctggaaatggcacaaccaaggactactgcatgctttataacccttattggacagctcttccaagtaccctagaaaatgcaacttccattagtttgatgaatctgacttccacaccactatgcaacctttctgatattcctcctgttggcataaagagcaaagcagttgtggttccatggggaagctgccattttcttgaaaaagccagaattgcacagaaaggaggtgctgaagcaatgttagttgtcaataacagtgtcctatttcctccctcaggtaacagatctgaatttcctgatgtgaaaatactgattgcatttataagctacaaagactttagagatatgaaccagactctaggagataacattactgtgaaaatgtattctccatcgtggcctaactttgattatactatggtggttatttttgtaattgcggtgttcactgtggcattaggtggatactggagtggactagttgaattggaaaacttgaaagcagtgacaactgaagatagagaaatgaggaaaaagaaggaagaatatttaacttttagtcctcttacagttgtaatatttgtggtcatctgctgtgttatgatggtcttactttatttcttctacaaatggttggtttatgttatgatagcaattttctgcatagcatcagcaatgagtctgtacaactgtcttgctgcactaattcataagataccatatggacaatgcacgattgcatgtcgtggcaaaaacatggaagtgagacttatttttctctctggactgtgcatagcagtagctgttgtttgggctgtgtttcgaaatgaagacaggtgggcttggattttacaggatatcttggggattgctttctgtctgaatttaattaaaacactgaagttgcccaacttcaagtcatgtgtgatacttctaggccttctcctcctctatgatgtattttttgttttcataacaccattcatcacaaagaatggtgagagtatcatggttgaactcgcagctggaccttttggaaataatgaaaagttgccagtagtcatcagagtaccaaaactgatctatttctcagtaatgagtgtgtgcctcatgcctgtttcaatattgggttttggagacattattgtaccaggcctgttgattgcatactgtagaagatttgatgttcagactggttcttcttacatatactatgtttcgtctacagttgcctatgctattggcatgatacttacatttgttgttctggtgctgatgaaaaaggggcaacctgctctcctctatttagtaccttgcacacttattactgcctcagttgttgcctggagacgtaaggaaatgaaaaagttctggaaaggtaacagctatcagatgatggaccatttggattgtgcaacaaatgaagaaaaccctgtgatatctggtgaacagattgtccagcaataatattatgtggaactgctataatgtgtcattgattttctacaaatagacttcgactttttaaattgacttttgaattgacaatctgaaagagtcttcaatgatatgcttgcaaaaatatatttttatgagctggtactgacagttacatcataaataactaaaacgctttgcttttaatgttaaagttgtgccttcacattaaataaaacatatggtctgtgtagtttccgagatgtactatatacagtatatttttctaaaaaaaaa

SEQ ID NO: 5708 - DNA, 3739 bp, Homo Sapiens
  NM_032804
aatggagcgccgggcgtaaggcaaagcctggcaccgtctgcgcggccgctatctgctcccggagcgtgagtgcggggtgtggggcgtgcgcgtgcgcgctcagagggggctcaaggcgagcgcgccgggcagttgcgggcgcgtggctgctgaggttggcggcggtgccgcgcgcccgacgggccggtggttgcggggcctcccgcctcgacccgggctgggggcagccgtggcggccgccggggaccgcaaggggcggaggaaaggagggggccggtcccggcacgcagaggagcagccgaccatgccccgagacaacatggcctccttgatccaacggatcgcccgccaggcttgcctcaccttccggggcagcgggggcggccgcggcgcttccgatcgcgacgcggcttctggcccggaggcgccgatgcagccgggcttccccgagaacctgagcaagctgaagagcctcctgacccagctccgcgccgaggacttgaacatcgccccgcgcaaggccacactgcagccgctgccgcccaacctgccgccagtcacctacatgcacatctacgagacggacggcttcagcctgggcgtgttcctgctcaagagcggcacgtccatcccgctgcacgaccacccgggcatgcacggcatgctcaaggtgctgtacggcaccgtgcgcatcagctgcatggacaagctagacgcgggcggcgggcaacggccgcgggccttgccgcccgagcagcagttcgagccgccgctgcagccccgggagcgagaagccgtgcggccgggcgtgctgcgttcgcgggccgagtacaccgaggccagcggcccctgcatcctcacaccgcaccgggacaacctgcaccagatcgacgccgtggaagggcctgccgccttcctggacatcctggccccgccctacgacccggacgatggccgggactgccactattaccgggtgctggagccggtcaggcccaaggaggcctccagctcggcctgtgacctgcctcgagaggtgtggctcctggagaccccacaggccgatgacttctggtgcgagggagaaccctatccaggtcccaaggtcttcccttgaagccactggcgcccaggagcggtgggccgaagacgtgccctaccctaccacaagggctgtgtctctaccccctagcctgggcgttggatctactggaatgagcagcagccgcttcctcggcagccttgggaagcacgggcgactggacagcagccgccgggcacggttatgggggcggggtgggcggggaggctagattgtttcctggtactgtcactgccactggggctttgatttggaggaatggggcaggggactatctgaagcgcttccatcctaaagccataatgaaaatatcttcctctcttccccattctatacaaaatactaagtggttttcttgctcccactccctaccccttagttaaatagggtttattttccactcatgcccttatgcctttttttcttatagttttttaacttattgactgtgcatgacccagtggtttgaattgtttttagttcaagtcattggtaaaaactaggtttaaggagatgagctactgtttaaagtgagctggcctgcctaattaattccttgtgaaaactaaatgattttttcagtttggggatcattctcacaacataactatgcatgtagaggacaagatttattttctttcctccctttgcccagtagccacatctggtttactcaggcagcatctactaagaaattcagcacctgcatatctctgtgacatggtcacttagagcttatcttccctatgaatctccagatctgtgagtcgagcagatttcatgttgcagattcacctttaatgcaaagactgtattatcctcacatgactttttttcttgtcttactgtaccttaaaaggtgatagagtaattctgtattttctaacgggaagattcaaaggagctgaatgtgttatgcttccaaacaactgaatgtaaaacactcctagccagttgttgcattccctatatttatttacttccaatattttactgtaaaagtagggagaaatattatgttgatagttgtttcatattctctcaggaactttaatgttcccgactcgggtgattccagctgtgttgctggcagtgttgtctcaaccctctccctaaaatgactgagccctgggttcatctaatgtggttttccttaggaagagatagaaggcacagaagatcacagctagagaattgagaattaactatactactagccattttagggcaccaaaacttgggattaaacacttcctacttcccactcccaactcctgaaatgaagtcttgctatctgtgactagttttatttttgtgcttttaatagtccgagcagtcttaccttgtttacacatgtattgacaccatttgcttcaggccatggagcactgtttctccctttttactatttataggattccgttttttcacaagacttttaataaaaagaaattgtagaaataaacacattaaaatttgcccagctgtcgtctaagccctcttgattgacttgcccaagtggcaatagagttctaatatctataataaagggagatttgctattattagtggaatgttgaccccgtatgtagagaaacagtacgtgcctttgcctctttatgcacacagagacccagggtgagggagtatttgttcccagtttttaagatagtataaaaaagcaaatacttggtgagtgatttaaaaataaaaccaaaacaaaacacaaaaagatattccacaggacatgccactttattataaaacctgacacaggcatagtaccaagtatttcctgcattgttgctaaaattgttttattgtagctccacattctggtgtagtttaaaatgcctttgggggcagtttgaagcagttcttcatgccacttagtttgaaaataaaattctagatatgcaaatgattttcttagaaaacttcacaaaataaaagatcttgtttttttttccatagcacagtaatgaatgtggttatcaatcacatacttttttggattatattgtagcaaaaagttgattagcttaccaagattattaatagcaatgtatgtgttataatacaacttagtacattaaagctacgaaaactcatcctggctgtaggatagtaataaaggaagaattatgacttcattatgaaaaaaagaagttttaaagttttcaattacgagcaatttggaagaaaaaacctaaggtgcttttcaaaagagtaactgaaattgttgcaggccaaaacagcaatatgatatctcagatttagttcaataagaacagtgaaacttttggttcactaataaattctgagtaaattagtggtgaagacaaaatataacttgttttagtgagccactgaggaaagaatatgcttattacaaagacaaaatgtggtgcagaaactatcttgcacctgtgtgcataaactgttagtcgtgactgacttggtgtgttgctattgtgtttctatatactccgtccaatatagataatgttttaataacaactgtgggataaaagttatcttccccttggaaagactaatgagcacaatgatattaatcacttttatggtgaataataaatgcaataattgcctcatgggtgaaaaaaaaaaaaaaaa

SEQ ID NO: 5709 - DNA, 3727 bp, Homo Sapiens
  NM_032807
ctgctttcaaggtgtctagatacagagtgaagaatgtcacagtaggaagtgcactggactaggggagtcaggagacccgggttcttgtgttggcaccatcactcatgagctacgaggtgacttcaggctgccattggacctgtcaagtgcctgagtcatgtgataatgggctacattgcgcagggcccctgggccatctccacaggagatgccagaggacgagtgcccacttgctggtcttcacagagcacgctgaaatgagacggtttaagcggaagcatcttactgccattgactgccagcatttggctcggagtcacttggctgtgacccagcccttcggtcaaagatggacaaacagagatccgaaccatggtctctatcctaaaccgagaacaaaaagagggagtaggggtcagggaagtcaaagatgcatccctgagttcttcctagcaggcaagcagccgtgcaccaatgacatggccaaaagcaattctgttggccaggacagctgtcaggactctgagggtgacatgatctttcctgcagagagcagctgtgcactgcctcaggaaggcagtgcagggccgggctcaccagggtctgccccgccctccaggaagcggtcttggtcctctgaggaagagagtaaccaggctaccgggaccagccggtgggatggagtttctaagaaagctccacggcaccatttgtctgtgccatgcacaaggcctagggaggccaggcaagaagcagaggacagtacgtctcggctctctgcggagtctggtgaaaccgaccaagatgctggggacgtgggtcctgatcccattcctgactcatactatgggcttcttgggaccttgccctgccaggaagcactgagccacatttgcagcctgcctagtgaggtcctgaggcacgtgtttgccttcctcccggtggaagacctctattggaacctgagcttggtgtgccacttgtggagggagatcatcagtgacccgctgttcattccttggaagaagctgtaccatcgatacctgatgaatgaagagcaagctgtcagcaaagtggacggcatcctgtctaactgtggcatagaaaaggagtcagacctgtgtgtgctgaacctcatacgatacacagccaccactaagtgctctccgagtgtggatcccgagagggtgctgtggagtctgagggaccaccccctcctccccgaggctgaggcgtgtgtgcggcaacacctccccgacctctacgctgctgccgggggtgtcaacatctgggccctggtggcggctgtggtgctcctctccagcagtgtgaatgacatccagcgactgctcttctgcctccggagacccagctccacggtgaccatgccagatgtcaccgagaccctgtactgcatagccgtgcttctctacgccatgagggagaaggggattaacatcagcaataggattcactacaacattttctattgcctatatcttcaggagaattcctgcactcaggccacaaaagttaaagaggagccatctgtctggccaggcaagaaaaccatccaacttacacatgaacaacagctgattctgaatcacaagatggaacctctccaggtggtgaaaattatggcctttgccggcactgggaagacctcaacgctggtcaagtatgcagagaagtggtctcagagcaggtttctgtatgtgacattcaacaagagcatcgcaaagcaggccgaacgcgtcttccccagcaacgtcatctgcaaaaccttccactccatggcctacgggcacatagggcggaagtaccagtcaaagaagaagttgaatctcttcaagttaacacccttcatggtcaactccgtccttgctgaagggaagggtggattcataagagccaagcttgtgtgtaagactctagaaaacttctttgcctcggctgacgaagagctgaccattgatcacgtgcctatttggtgtaagaacagccaaggacagagagtcatggttgagcagagtgaaaaactgaatggtgtccttgaagcgagccgcctctgggataacatgcggaagctgggggagtgcacagaagaggcgcaccagatgactcatgacggctacttgaaactctggcagctgagcaagccttcgctggcctcttttgacgccatctttgtggatgaggcccaggactgcacaccagctatcatgaacatagttctgtctcagccatgtgggaaaatctttgtaggggacccgcaccagcagatctataccttccggggtgcggtcaacgccctgttcacagtgccccacacccacgtcttctatctcacgcagagttttcggtttggtgtggaaatagcttatgtgggagctactatcttggatgtttgcaagagagtcaggaaaaagactttggttggaggaaaccatcagagtggcattagaggtgacgcaaaggggcaagtggccttgttgtcccggaccaacgccaacgtgtttgatgaggccgtacgggtgacggaaggggaattcccttcaaggatacatttgattggggggattaaatcatttggattggacagaatcattgatatttggatccttcttcagccagaggaagaacggaggaaacaaaacctcgtcattaaagacaaatttatcagaagatgggtgcacaaagaaggctttagtggcttcaagaggtatgtgaccgctgccgaggacaaggagcttgaagccaagatcgcagttgttgaaaagtataacatcaggattccagagctggtgcaaaggatagaaaaatgccatatagaagatttggactttgcagagtacattctgggcactgtgcacaaagccaaaggcctggagtttgacactgtgcatgttttggatgattttgtgaaagtgccttgtgcccggcataacctgccccagcttccgcacttcagagttgagtcattttctgaggatgaatggaatttactgtatgttgcagtaactcgagccaagaagcgtctcatcatgaccaaatcattggaaaacattttgactttggctggggagtacttcttgcaagcagagctgacaagcaacgtcttaaaaacaggcgtggtgcgctgctgcgtgggacagtgcaacaatgccatccctgttgacaccgtccttaccatgaagaagctgcccatcacctatagcaacaggaaggaaaacaaggggggctacctctgccactcctgtgcggagcagcgcatcgggcccctggcgttcctgacagcctccccggagcaggtgcgcgccatggagcgcactgtggagaacatcgtactgccccggcatgaggccctgctcttcctcgtcttctgaggacaaggcgcacgttctccgcagtgcagagcagcttgccgaggaccccgcgtgaagaaagccagcgaggggggcttctgctccctgagactctgggttcacccacagcactttctgaggaagaggacaccagcccaagctggacctgccatttctccactccctacagacagccagtctccacttgcctcccctctggatgtatctggtcagggaagtgggggatgttcttttgataaaaaaaaaaaaaaaaatttatgtatttaaacttttattacaagatttcaattaaacaggcaccatagcactggcaaaaaaaaaaaaaaaaaaaaaaaaaa

SEQ ID NO: 5710 - DNA, 3034 bp, Homo Sapiens
  NM_032810
agctggttcccgtggggcctcatgggatggttgtcgtatccttctgaggtcctttaaggaccgtctcggacctgggaacccccggaggaaaggtcaccccggtcttctcccacgccctacctcagtgccgcccccaagcgccccgcagcccttagtatctagaggattaacctccaagggcgtcccgggcctcgccttggcgtccggcccggcctgggcccttagggtctgcttagctcttccccaagactcgtgccattcccgagggaatctttgtcggcatcctggtcactgtgggggtttgaggtcgtcccggaagacttcagaaccaggcgaacctagacgaaggcggctggaatgaaccaggttaacattcaagatggtacatgctgaagccttttctcgtcctttgagtcggaatgaagttgttggtttaattttccgtttgacaatatttggtgcagtgacatactttactatcaaatggatggtagatgcaattgatccaaccagaaagcaaaaagtagaagctcagaaacaggcagaaaaactaatgaagcaaattggagtgaaaaatgtgaagctctcagaatatgaaatgagtattgctgctcatcttgtagaccctcttaatatgcatgttacttggagtgatatagcaggtttagatgatgtcattacggatctgaaagacacagtcatcttacctatcaaaaagaaacatttgtttgagaattccaggcttctgcagcctccaaaaggtgttcttctctatgggcctccaggctgtggtaaaacgttgattgccaaggccacagccaaagaagcaggctgtcgatttattaaccttcagccttcgacactgaccgataagtggtatggagaatctcagaaattggctgctgctgtcttctcccttgccataaagctacaaccatccatcatctttatagatgaaatagactcctttctacgaaaccgttcaagttctgaccatgaagctacagccatgatgaaagctcagtttatgagtctctgggatggattggatactgatcacagctgccaggtcatagtaatgggagctaccaatcgtcctcaggaccttgactcggctataatgagaagaatgcctacaagatttcatatcaaccagcctgctttaaaacagagagaagcaatcctgaaactcatcttgaaaaatgaaaatgtggataggcatgtagacctgctagaagttgcccaggaaactgatgggttttcaggaagtgacctaaaagagatgtgtcgagatgctgccctcctctgtgttagagaatatgttaattctacatcagaagaaagccatgacgaagatgaaattcggcctgttcaacagcaggacctgcatcgggcaattgaaaagatgaagaaatcaaaggatgcagcatttcagaatgttttaacacatgtttgtttagattaagagtaaagatcatttgtacagttcagtgatctagtttggtgtgtcctcttatcagttagtggaaatagaacggaaagagtgctctttaaacaatgagggagctcagtgtttatggttttatactctgaattctaagttattgagatatagttgttacataggtggtattactgttggtcaaaaatcatgaggaggaacagttgaatccagcctgaacgtgggtgcttgtgtttgaccttttcagccatatattgtacagccttatagaatctaagctggtcttaaagtcataaatgattcattgggtcattagtgagaaacggggatgtggttaggtgctggttcctagacatgtgagtatgcgtttgtgtgtgtgcgtgtatgtatgtgtatattaaatgtatatatccacacattttatattgacattctgtagatatgtttgaatatagaaactttttttaccccaactactgaatccaggagtaccaaataatatatagtaaaactaagatttaaggttgtgtcaaaaaggtacagtgattcagccatttccatttgtcatttgtttcaaccttttttaagttgagtgtttttatttctgcagttattagttggatcctccacatcttgcatatatacatgggctcaattattatgtttgtcaggataatcaaatgaaaatactagttcagtgatcagcattgaatggttgttaggcagccatgtgctcaacactgatttcacctcttgagtataaactttttaaatttaaattggtttacatgaaagtggattaaaaggcctttcaaaagaatgggtttgaaaaacctcagtaccctttaatacatgtacatttctttccttttttcatttaatgtaacatgtctgttgtaactatgtttcttaaatattattttaaggttatgtgttctttaattatggtcaaatataatttggtcaccaaaaatgaaataatagtttaaaacaagtagctgttactaagtgtgctaaaaatactcattttataattaattttagttttcttagtatattattataaattgtgccctaagtcaggtacaaatgtacacatcaaaatgcccatattgtatctatctgtagtcgtttaatgtgaattatatgtgaatttttttcaaaattttactaaccagaattctgttataggcacctaaccacgcagcatgaggaaaacggcacaacacaatcttgaggtgccttctgaatcatcagattaaattatgcttcatatgtttttgcttttactgtatttctttaaaaactctaaatctttattcatgtgtcactggattaatttatctgataatgtgtctcacaagaatctgttagatcgtttattcttcagttgtactttgaatggtggggtggaagtttcaggtgaacaatggataacaaaaagcaagttatggaagattgtgaagaggatggaaaaactgaatacaagataccaaaaatgaaaaaaagtgtcccatttttaataactatattctattattttataaatgtgtaataaaggggtccctcttt

SEQ ID NO: 5711 - DNA, 2431 bp, Homo Sapiens
  NM_032814
acatgctgcccaggctgcgcgggtgattggcttggctggacctgaatgatgcggctgtgattgctgaattgtctgggcaggtttggagtctctggcaagctcccctgactgtgcatccctctggagacgaagaggagggggaggcctgtcctctctgggatccattggtcacatccccctgaggattcccgaatgcctacctccagtgtcgtcaacatggagttctgaagtccatgtggctcttcacagtgaatcaggtgttaaggaagatgcagagacgccacagcagcaacacggataacattccacctgaaagaaaccgcagccaggcgctcagctccgaggcgagtgtggatgaaggtggcgtctttgagagtctgaaggcagaggcagcctccccaccagcgctcttctcgggcttatcaggcagcctccccaccagctcgttcccctccagcctggtgctgggctcctcggctggcggcggggacgtgttcatccagatgcccgcgtccagggaggaaggagggggccggggcgaggggggcgcctaccaccaccgccagccccaccaccatttccaccatggcggccaccgcgggggctccctgctgcagcacgtgggtggggaccaccgggggcactcggaggagggaggcgacgagcagcctgggacgcccgcccccgccctgtccgagctgaaggctgtgatctgctggctccagaaaggactccccttcatcctgatcctcctggccaaactgtgctttcagcataagctcggcattgctgtgtgcatcgggatggccagcaccttcgcctatgccaactccacgcttcgagaacaggtctcactgaaggagaagaggtcagtgctggtcatcttgtggatcctggcctttctggcggggaacaccctctatgtgctttatacattcagctcccagcagctgtacaacagcctcatattcctgaagcccaacctggagatgctggacttctttgacctgctatggattgtggggatcgcagactttgttctgaagtacatcaccatcgccctcaagtgcctcatcgtggccctgcccaagatcatcctggctgtcaagtccaagggaaagttctatctggtcatcgaggagctgagccagctgttccgatcccttgtccccatccagctgtggtacaaatacatcatgggtgacgactcctccaacagctacttcctgggcggggtcctgatcgttctctacagcctctgcaagtccttcgacatctgtggacgtgtgggcggagttaggaaagccctgaagcttctctgtacctctcagaactatggagtccgagccaccgggcagcagtgcacagaagctggtgacatctgcgccatctgtcaggccgagttccgagagcctctgattctcctgtgccagatgctgttgaaggggcacaagaaattggagctggagaagattgatgaaagtgcaggtgtgtaaggaaatagaacagtctgctgggagtcagacctggaattctgattccaaactctttattactttgggaagtcactcagcctccctgtagccatctccagggtgacggaacccagtgtattacctgctggaaccaaggaaactaacaatgtaggttactagtgaataccccaatggtttctccaattatgcccatgccaccaaaacaataaaacaaaattctctaacactgcaaagagtgagccatgcctgttaacactgtaaagaatgtaacatgtgggggacacacaggggcagatgggatggtttagtttaggattttattagtgcatgccctaccctctgggggaacgtcccatctgaggttttcttctcggtggggggatttaacttctgtcctagggaaaacagtgtctgatgaggagtgtttccaacacaggctacatgaattcccctataccagtgcgaaagcagccaggagtccccgttggaaaagaacaatgccactctcttttatgtatcttggttctgcaactcatttgttgtaagtagggttaatcgagtatcaggttcacagtatcctgcccttattattttatgattcactgactcaagttccacgaagtccttagaaatggacctcttcatgtaaaatatcttgagaataataaatgtgagggaataagaaaggcaagctttggacacagatatgataggtgcatcagcttcggaagagaagaatgatgtgcagagtgttaggaagacatccgggctgctgagactcgggattagaagaaagagaggtaaataaagtgggtcctggaatcttttaggacttctgctgtaggacaaacagctgcctttggtgttttaatgtctcccaaagtacccttcagccaataaataccatctgttggtgcaaaaaaaaaaaaaaaaaa

SEQ ID NO: 5712 - DNA, 3877 bp, Homo Sapiens
  NM_032815
ggaggaaagtgtgccatggcggagcctgtggggaagcggggccgctggtccggaggtagcggtgccggccgagggggtcggggcggctggggcggtcggggccggcgtcctcgggcccagcggtctccatcccggggcacgctggacgtagtgtctgtggacttggtcaccgacagcgatgaggaaattctggaggtcgccaccgctcgcggtgccgcggacgaggttgaggtggagcccccggagcccccggggccggtcgcgtcccgggataacagcaacagtgacagcgaaggggaggacaggcggcccgcaggacccccgcgggagccggtcaggcggcggcggcggctggtgctggatccgggggaggcgccgctggttccggtgtactcggggaaggttaaaagcagccttcgccttatcccagatgatctatccctcctgaaactctaccctccaggggatgaggaagaggcagagctggcagattcgagtggtctctaccatgagggctccccatcaccaggctctccctggaagacaaagctgaggactaaggataaagaagagaagaaaaagacagagtttctggatctggacaactctcctctgtccccaccttcaccaaggaccaaaagcagaacgcatactcgggcactcaagaagttaagtgaggtgaacaagcgcctccaggatctccgttcctgtctgagccccaagccacctcagggtcaagagcaacagggccaagaggatgaagtggtcttggtggaagggcccaccctcccagagaccccccgactcttcccactcaaaatccgttgccgggctgacctggtcagattgcccctcaggatgtcggagcccctgcagagtgtggtggaccacatggccacccaccttggggtgtccccaagcaggatccttttgctttttggagagacagagctatcacctactgccactcccaggaccctaaagctcggagtggctgacatcattgactgtgtggtactaacaagttctccagaggccacagagacgtcccaacagctccagctccgggtgcagggaaaggagaaacaccagacactggaagtctcactgtctcgagattcccctctaaagaccctcatgtcccactatgaggaggccatgggactgtcgggacggaagctctccttcttctttgatgggacaaagctttcaggcagggagctgccagctgacctgggcatggaatctggggacctcattgaggtctggggctgacaccccactccctgtttgacggcccagcctggacttggggagaatgactttcccttttttgccccataagggctagcataagctgaggtagaacttatctttaagctgcagcaaaatcaaggagtgacttttgtcccctctcctgttgaccctggtttagagccgttaaccacttggtgagttatgtgggtgttgttgccctgggtggcctgtggctccgtccacaagtcatgctgagttttgcagcctctgtgacttggagatgtcccttcacccctcccctttcaccaccatcctcttttcctcatggaaatgtctgctttatgaaactatgcacatattgaaagtgagttgaaacaaatgagggttgggtaggagcttccaggcctgggatttacaccacgcctagcccagcagaggccttagtcccatttggggcttgggagtgacatttgcttgaggcttatacactggtgtggttgcctggcttgcaggaaatgaccaagctcacacatgctggctgaagcgtaagcagacaactgaggtactcttttgaaggatgaaggtggtggattctcagccctgggggtcttcctcacctgaggacccttcagagccaccctttctagtttgcatttcctggtgcacacatttaaggcataacagcacattcatccctttggtttgggatctcaggaatacagtcccatgcaaagattctctggttttatggcttttttccctttctttacaccatcctctcccataagcacccatgtctttgaatatgaatgtatttgtaaaataccacgtttcatgtgtgaatatgtgcttttactgtacatagtgctattgtgcaataggtcttatgctgttttcactcaatgtgtgctaagatctagccccattgactcttctagaaatgcagtattgctttgacctgccatgtggcactccacaatgtcaattgcagtttacacacattgcctaaagtgggggacacctgggtgcccctgaccccttggcaccggatacaggccacgataaacatcctttcgtgtgttcccttctgtgcttgtgtggcatgtgtacccaggatgggcctataggtcacagaggtcagtttctctttggttttccagattttctttagaacggtgactgaccctcctacttgaggccgcccttttctccttatccttgccagcacttgtattgccagactacctaatttttgccagtctcatgggtagatagtggtgcagtgctttaacatacattcatctgatcagcattaatttggggaattttttcacttagcctttctggtttcccttcctgtgcattgcccattttctcatggagtttcttatcttttttggtttattctcaggagttgcttgtacattcttgggcaattgcagataattccaagaatgcatatttgggctgggtatggaggttcactggtaatcccagcactttgggaggcccaggcagaaggatcgctgcagcccaggagttcgagactagcctgggcaacatagcgagacctcgtctctacaaaaaaaaattaaaaagggggctttgggaggccaaggcgggcagatcatgagggcaggagattgagaccctcctggccaacatggtgaaaccccgtctctactaaaatacaaaaaattagctgggcatggtggcgcacacctgtagtcccagctactctggaggctgaggcaggggaatcgcttaaacccaggaggcggagattgcagtgagccaaggttccaccactgcactccagcctggcgacagagcaaggctccactcaaaaaaaagatttaaaggggaaaaaattgaaattttctttgtatctaggggtatccgtcactgaacagaaattcttaattttggctaggcgtgatggctcaggtctgtaatcccagcactttcggtggccggggtgggtggatcacttgaggccaggagttcaagaccaccctgaccaacttggtgaaatcccatctctactaaaaatacaaaaattagctgggtgcagtggcgcatgcttgtaatcccagctactcaggaggcagaggcaggagaatcacttgaacccgggaggtggaggctgcagtgaacagagacagtgccactgcacatcagcctgagtgacagagagactttgtctcaaaaaaaaaagaaaattttaattttaatgtagacagtatgaattatcttgttctgcagttggttgctttttgattgcttatttaatagagttgttaagatattttacatcttctcctgttagctgttcagcttttcctttcatattgagaacactacacagtgctgaagtccagctggtacacaccggggtgacaccttggctgcatctgttctcaacagtcagacacttcttctaattggttgatgctgggctgtactggttgctaaatattgcacatcattttaaaactatttgagatgcacttttgtactcaggaggccaaggcaggaggattgcttgagcccaggagtttgagaccagcctgggcaacacagcgagaccttgtctcttaaaaaaaaaaaaaaaaaaaaa

SEQ ID NO: 5713 - DNA, 1824 bp, Homo Sapiens
  NM_032822
gcggtgagggggcgggcccgtacgccgattccatatgggcgccggcgcggagcgccgcggggcagcgcggggtcgccatggctgagctgcagcagctccgggtgcaggaggcggtggagtccatggtgaagagtctggaaagagagaacatccggaagatgcagggtctcatgttccggtgcagcgccagctgttgtgaggacagccaggcctccatgaagcaggtgcaccagtgcatcgagcgctgccatgtgcctctggctcaagcccaggctttggtcaccagtgagctggagaagttccaggaccgcctggcccggtgcaccatgcattgcaacgacaaagccaaagattcaatagatgctgggagtaaggagcttcaggtgaagcagcagctggacagttgtgtgaccaagtgtgtggatgaccacatgcacctcatcccaactatgaccaagaagatgaaggaggctctcttatcaattggaaaataaaagtatttgccagtggccatcagggctgagggcaagaatatattttttataaggaattgggaattttagtcttttaagcaaagtttacgaatgaagaaatgaaggatggccacaagcgtaaggcatatgtcacttgcctctggacactggttattttatgtttcagtccctaaaaaatgaaatggaaaaaagtggtgctaaatcgagtcagagatattacaggagagttttagagcttattatttcctgtggccagtgcttgtcctggcagtaaggctttcccctgtaacaagccagagccctccaaggtaccagactcttcttactacacaggtactaacaggctggcaggttagagttggtggagtctgaggagagatattttctctttgttgccaacatcctgtttaccaaaagtgtcaccccaccatcttccataagctgtgaaacaaaatcaatgaggtcactaacttagaagggaaagaaagttttctgggtctttgttttcttgatttggggtaatttatacaagggcatacaagttgattttaagatgtggaactgggaggtagactagtttggataagaactttgaaatgttccttgtggatccccatttctggtcatcaagatgtggatgtacatttcttaaaattattacatgctgcatctttcagcctggagactgtgcagaaacatgagaggtgatgacacactaattatgggaagcagaattactggctgatggcccctgaggctgtgtgtaacaaaatgacaggacaatcttgcagtaacactttccccttgaagagaagggggttttgattgtgatatatactagtatctaggaatgaacagtaaaagaggagcagttggctacttgattacaacagagtaaatgaagtactggatttgggaaaacctggttttattagaacatatggaatgaaagcctacacctagcattgcctacttagccccctgaattaacagagcccaattgagacaaacccctggcaacaggaaattcaagggagaaaaagtaagcaacttgggctaggatgagctgactcccttagagcaaaggagagacagcccccattaccaaataccatttttgcctggggcttgtgcagctggcagtgttcctgccccagcatggcaccttattgttttgatagcaacttcgttgaattttcaccaacttattacttgaaattataatatagcctgtccgtttgctgtttccaggctgtgatatattttcctagtggtttgactttaaaaataaataaggtttaattttctccccaaaaaaaaaaaaaaaaaa

SEQ ID NO: 5714 - DNA, 5228 bp, Homo Sapiens
  NM_032824
gcgctcgggctgccagccctcccttgcacgttccggctcctcttctatcttcacgcccacgctaggccctgagcccagcctccacgtctcgccgccaactccacatcctggctcctatctctgccttccaggcatctcccagctgcacgctcgggcccggctcagagccctaagccctgcctcccggtcctggccgggtttcccagaactgcacggcgcctctccgcccaggcccaagcgcgagcccctcctccacacccgagtccgagccccgcgtcccggattcggacccgcctgcctggggcggtgctgcaccaggtgcgggtgtggcaggcgtctcggagcgccaggtgcagcttcctggtcaagatggtcgccgcctgccgctcggtagccgggctcctgccacgccgccgccgctgctttcccgcccgggccccgctgctgcgcgtcgccctctgcctcctgtgctggaccccggcggctgtgcgcgcggtccctgagctcgggctctggttagagacagtcaacgacaaatcaggacctttgatatttaggaaaactatgtttaactctacagatatcaagttatctgttaagtcattccattgttctgggcctgtgaagtttaccatagtgtggcatttgaagtatcatacctgtcacaatgagcattctaatctggaagagctgttccaaaaacataaacttagtgttgatgaagacttttgtcattatttgaagaatgacaactgttggacaacaaaaaatgaaaacttagattgcaacagtgattcacaggtgtttccctctttgaataataaagaactaataaatatcagaaatgtttcaaaccaggaaagatcaatggatgttgtagccagaacacaaaaagatgggtttcatatctttattgtttctattaaaacggagaatacagatgcaagctggaatttgaatgtttctctttctatgattgggcctcatggatatatctctgcatcagattggcccctaatgattttttacatggtgatgtgtattgtttatatattatatggcatactctggctgacgtggtctgcctgttattggaaagatatattaagaatccagttctggattgcagctgttatttttttgggaatgcttgaaaaagcagttttttatagtgaataccaaaacatcagcaacactggactgtcaacccaaggcttattgatatttgcggagttgatttctgcgattaagaggacgttggctcgccttctcgtgatcattgtgagcctgggctatggcattgtgaagcctcgtttaggaacagtcatgcaccgggtgatcggactggggcttctatacttaatctttgcagctgttgaaggcgtgatgagagtcattgggggttctaaccatttagctgttgttcttgatgacattattttagcagttattgactccatttttgtgtggttcatttttattagtttggcacaaactatgaagaccctaaggctaagaaagaacactgtgaaattttcattatatagacattttaaaaatactctgatctttgctgtgctggcttctatagtgtttatggggtggacaactaagacatttagaattgcaaaatgccaatcagattggatggaacgctgggttgacgatgcattttggagcttccttttttcgcttatccttattgtaatcatgtttttgtggagaccatcagcaaacaatcagagatatgccttcatgcccttaatagatgattctgatgatgaaattgaggaattcatggtaacttctgaaaatttaaccgaaggaataaaattaagagcctcaaaatcagtttccaatggaacagctaagcctgccacttctgagaactttgatgaagatttgaagtgggtagaagaaaatattccctcttcattcacagatgtagctcttccagtgttagtggattcagatgaggaaatcatgaccagatctgaaatggctgaaaaaatgttctcttcagaaaagataatgtgattggaacccgtataagaaatgtagttaagcctgaaggactatccttcatcaagactgaaagtgagctttgatttgatattgcctaaaaatttttattgtgttatcttggaagtctgtgtatcaaaatgaagaattcagatggtaggaggttctatagtccttttaaagctgactcttgagtgtcagttgaatatccattaaattggatttggaaataacctgaggaaagtattatgataaagatctgcacagatgcctcttagctgataggtggcaggcctgtgggtttgggttctccctcttttctctggaacatatgacaattccagattaaagaaaaatgttttttaataaatacccttggtctttcttctagtcacctttgaggtagatattgtgattttctggagtatagtatatccgtgtctctgtgtcttaggtttactagatgcaataatacttctctttgacatttgtactgaagtgatttgatattaagtaaaacagttaatgtttgaatataggcatatttataggttttttccgctcccccccaacccaccctttttaaaaaatctatacaaagcccttgtttgagtctcatcatgcacatcaaatcatggagttaggtcttctctgagctcaggggaacacaagtgcacagagagagatgtcttgagggtcactaccaaagaattaccctcattgtccctcactcaggccatgtgtacatgcgatgctgctgagtgtgctggggtgggtggtggccacgtggctcccccagagcacttcctaactggcaagctgggagacccattactggtgaactttgtggaaattagaactgtatcttttacataatcttggcatattacatttcataataaaaacatacatttagttgcatgctacatcactattgattttataattaatttcttaagcttcaaccatgttttataccttatttcgttacatcatatatttgtaatgtgtaatatgaaatcttttgctttaatgtctttttttaaaatgtagaatgttctaaacttgaaaggcaattgaatgtagtatgatgaaaatgtgaatgttttgctgctttcatgaccaaagatacagggctagtggacatttagaataataattaaagctagagtcttgtatgtcttttctttgaaggagttctaaccttgtaaattgagaatgacttcagagaattttgattaagaaaacattaaaatcttaaccggcacaaacactccaatttttttcactgtgaagccgcaagcaattttttttctttttctttcaaaagcctaccttctgaatttatttcttgtttactcatttcagagagggtagtaaagaagatctatttctggtagtcatatcgcttgaaaggtattggtaaatgtgttttcagtcgtgaccatgtggaaagtgaacagtgttggcaaacattaccgagaaaatcatgcttttcaagatgcccttgctttgggatatccttcctagggagaaaaaaaaaaagtagtttaacaattgtgaattccatttcttatttcagtttctgctgcagtaatgggttcccacccactataattcccagcatttatgttctgttgtattctccccttagcccagtaacatttttatctaataccccattccccaagttttgagacagattgaccccctactcattatgtggctctagttgaattttaaaatgtggaatattgggcttgcaggcagtaggagctgcaaatctggtagagtgggagtgtggagttaatggtgagtatgttaataaagggaaactgtctctgacagaatctcagtaatgtttaccaaaacatgtctttctacagctggtaggataaatgatgctaccctgtagctcagctacaggctgcagtgcaaacttttcttccatccagagaaagcagaattccctcctagtaacctcattacaaatactgttactagaagggcatgtgctgtctgtcaccttcagtaatatttgtgccatctcttgatgactgatgacctggatcgagtatttctatgaagggtcttcttaggccccttacatacgcaagaggggtgctctagtgccatagctgtagttcacaggaaggacaccaggagaagttatacctagggctactgagcagctcatcatccctgtttctgcacagtttcctgaaactggccatcagggcctctgaggcactcaaatcagtttacttttagcatgcccccatcagggtgggtctcactgttagtgaggatacgggtctggtttgatgtttttctaggcaaaatgcttaagtgttctggttatgccattcattcatacgatgtgtgaaatttgcttaaaagggaattttcatgatttgatttagattagtatttaaatatctgctttagatagcaattaattttattgtaaaaataaggaaaaatatgtgaatatgtgaattttttaagcctgagagatgatagaatgttcccatatttttcttgtaaagaaaataatattttaacttacacatcctgtagaaaataccaccttttccccttgtattacagtacaatgtttacattactatactgtcaagctgaaagtataaaaaatgtacatatacattttgagttatgtatcctttttttaaaaaaaagttcgagtctgttgcactaggctgtacatgactaaagttgacagatgctatgctagatttataatcactagttctggtacttgtgtctttgtatgatcaaagcatgcaataagcaatacaaaataccaagccttatacttaaaagaagtttaacatattggttaatatactggttaatatactggttaaacatattgaatgtatataagtggcaaaactagatttttaaggaagtgtacattataatattggagctcagtactgcatgaagagacttcattaaaactaagaaaacatttatttggggagaaattttaggcatttaagaacttgtatttttctattttaaaaagttaaattattccgtaatttggaagaagtttcgttgaatgtaggacataaccgtttgaagggttttcatttgaaaaattgatgtattttgtgccttaatattttgttcttttaataaaaatgctctgaatttgaatgataaaaaaaaaaaaaaaa

SEQ ID NO: 5715 - DNA, 6816 bp, Homo Sapiens
  NM_032826
gtcctctctggcggagctgcctggcggaagcgggaacgtcgcatcctgaggtaaaggtgcacggcatcctgggacatgtagtctggccggggctcggacgccccctcggatgaatgggaccgaagctgactgcgaactacagcttcttggcagcgtcggtgttggccgcgggagaaggggagaccgcggcggcccccagtgagagcggctttccaggacggtgcgatgtgctgcgcagcgaagaggcaggaggccggcttcctggggtagcggtacaggcgggcgcttactctgtgcgcttgcttccccaaccctgcaccggccatgcgcccggccttggcggtgggcctggtgttcgcaggctgctgcagtaacgtgatcttcctagagctcctggcccggaagcatccaggatgtgggaacattgtgacatttgcacaatttttatttattgctgtggaaggcttcctctttgaagctgatttgggaaggaagccaccagctatcccaataaggtactatgccataatggtgaccatgttcttcaccgtgagcgtggtgaacaactatgccctgaatctcaacattgccatgcccctgcatatgatatttagatccggttctctaattgccaacatgattctaggaattatcattttgaagaaaagatacagtatattcaaatatacctccattgccctggtgtctgtggggatatttatttgcacttttatgtcagcaaagcaggtgacttcccagtccagcttgagtgagaatgatggattccaggcatttgtgtggtggttactaggtattggggcattgacttttgctcttctgatgtcagcaaggatggggatattccaagagactctctacaaacgatttgggaaacactccaaggaggctttgttttataatcacgcccttccacttccgggtttcgtcttcttggcttctgatatttatgaccatgcagttctattcaataagtctgagttatatgaaattcccgtcatcggagtgaccctgcccatcatgtggttctacctcctcatgaacatcatcactcagtacgtgtgcatccggggtgtgtttatcctcaccacagaatgcgcctccctcaccgtcacgctcgtcgtgaccctacgcaaatttgtgagcctcatcttttccatcttgtacttccagaaccccttcaccctgtggcactggctgggcaccttgtttgtcttcattgggaccttaatgtacacagaggtgtggaacaacctagggaccacaaaaagtgagcctcagaaggacagcaagaagaactgaggcctgtctggagtacgtagaccagtgtcgtcgtgagggtgggaccctgtgaaggtctgaccaccgtttcgcttttgttaatgccgagctacccgcagtgctgagccagccgtgcaaaaggaaatcttcaggaggggacttctcacgttgctcagactgacacatgtagactaaatagaaacccctcagccctaaaatagaaaaaagaacagttctggactattgaacagcccattcatttatttctgttttgtttaccgacatattcagtattattcttgttttctgaattctgagtctcctgaacaaaaggcttactatccatggtcttggaaaagattgtcccttctcttgctgttgtaatgcatctctgctacagcagtcattgtcatcctgtgaccttatcccttttgtctcccatcaccttttccttcttcagcagcacctcacagtcagtcagacgctgcaggcaccactatcaccaggagtggccaagtaaaccgagacaccagtaacagcagggctggacttcctccagcgttttgggaaggaaagagatgttcccctgagctgattcccagtgacagtgcagcaagactagtgggactcctctttcccacattttgcttttttttttttctatgcaaaagtcagatgcttctatccattgctttctgtgattagggcggccctgcagcatatctcacagcagacacagtgttcataacaaagaaaggttgtgccgggcacggtggctcacacctgtaatcccagccctttgggaggctgaggtgggtgtatcacttgaggtcaggagttcaagaccaatctggccaacatggtgaaaccccatctctactaaaaatacgaaaattagctgggtgtgatggcgcatgcctgtaatcccagctacttgggaggctgaggcaggagaatcacttgaacccgggagatgaaggttgcagtgagctgaggtcgtgctactgcactcccgcctgggtgacagagtgagactctatctcaaaaaaaaaaaaaaaaaagaaaggttgttatggactggacacccctgaagcccattgcctaggccacagtggtgacggcaggatggccctgctcagcaccgcaagagccatggctgtccctgttggcccagccgggcactcacagggcagaagggtgggtctcaagtgggaggataaggcttcaccaccaggagattcccctctgcccgatgactctgttaagagtcacgacccatcaagggaatgcatagatggagatatatagtgtgtgatgtgtaaatcaggtcaaacctcaacgacaattgaaagttgttattgtcctatgaggtatcttagcattctcgatgggtattgaggatggttggatgtgctttattgtgtgtggaaacatgcctctctttgctaatcatttcagaggtccagttttcctttcactggacaatcttgaataggaggaacgctgttgctgtaatatgcgtagcttctgtgtgctcttgtgtagtctgtgtgtgatcaaagggcacggaagtggctgcactttcacatcccttttctttacttagctggaaccttacataccagtacatgctcctctgtaagcagctgaactcaccggccacttctctgtttgcctatagacaaagactgtgtgtgtgtgtgtgtatgtatgtgtgtgtgtgtggtgcacacattgtgttcttaaactgagacgtggctctgcaggtctcctgggctcattccatggtgtggtatgtttattccactgtccagagctattctctgatggatttgagcaacagcagtggagataaatgtcctagagtcaccaggtcgcttggagaagtcatttaagctgcctcgggtttttgttacttaaaatgtggatattatttctccacctaaatcactgagtttacagagtaataatgtgttgctctggacattgacagctttctagagccagtaatgggctcttctgaaggatgctgaattagaagtgaacctattcataggatcaaaagccacttgctttgaaatatgtagagttcctcagaattgacggtgctagaaatatccaagtgttaaataaccttttaaaagcaacaaaagctacttttttcttaccacttaatagaagaacctgtccctagaggcgacttcattgctatggatctggagtctctgaactcttaataggatgcagcctcacatacataatgtcacccattttatgttgatgaaaacattacaagttttcttcattgggtatgtgttgatgttcacagacagtacttgggcccattaggttttcgcgtctggtcttagagcatgtgtattcatctcagcgtgaatacctcagccagtcttatgaataggaggctatgtatgggcagggaatagattagattagaacactcgcacaagatgaccacatatagaagcagaaagccccaaattccctgggaactgttttttctctagtagctgaatataaggaaatatgtctaatggacaccagttaatactttttaaaactactctttaaaaaaaaaatacgttccccttggttaactgattttttaatccagggtggacattttttcaacctttattaaaaagacaaataaactattttgtagaagatcagactcctacttaactggaagagaaatgtctattaaatgtctctcctctttctctgggtcaagaccatgtaattttatgcttcagagatgaagatactgtttgtttacaaagagtttagtttttaagacatccaaaactctatgctagagcaaaaatcaaatagcaaaggacactagccagaaaatacagtgtgtgtgtgtgcacctgtgtgcctgctgaacaacttgacagtgtaacagataaggtaactgaagatggtggatatttgaattgtattagcttaatgtctacatatctttggccaaaactctattgtcatattagaaacatgttatctttttcatgtttattagtaatttatttttgattctttgttttctttttcgtccaactaaaacaactgtaatgtacttgatacatttatatcaagttctaaagtatttagacaaatccaaatactttgtttttagttttttcctcctttccatcctgttaaccacagtgaaacgctgcagtattttgatttggtcagtgctacggaggaagaccatgaaagctgaattggtctgtgccacccagagtaaacctcttctcttcttctggaaagatggcgtgatgtttttcaaggattctaataaatatcccgcagtcatctcctgagcagctttcctctgtttcacttcagaactccttcccccactttcttcactccagtttcttcacttgcagcgttttctgctaagaaagacttatcatcttgtatctgtttatgcctctcttctttggggcccctggatgtttttgtggatttttacagagtatttatatctgcacagcgtgtattttgttatacattcttacaagcattgatattggggggtacattcataatagtgagaatatctggcagaatgtgtgaatgccatatctgtagatgacgatgaatgtgaagggttaatgtagaaatgtttgtttattctgttacagctcaaaatggaggctgagaatctctaccaccattcccttctctatttgagaatctctaccaccattcccttctctatttgggaaacaatactctcttattttgctatttttaccttcccattaactggcttcactcaacagtgccagatacctatggagaggggaagtaaaacaccttaggtcaggaataataaaccaatgagttagctcagggccggtggacatgttcactggtggaccagttggcattgacctaaacggacagagaaatgcacatggaggagaactacgttgaaatcaagatcctatgtctgttgtattttctctttgcctggagtaaatagcattataagtcattccacccttattagataaccaaagcatattggtctcaatagctttctcctgaaaaatgtgattgaatcttacctgtagcagttcactcttaaggttgaaagaactgtcaatatagataaaatccattccttattattattgattggtgtgacatttgaaaatgtgtctaaacaatatttgtaagtaaaagaaccagtcataagcctcaaatgtgttcagtgtgtaccaagctggaatgggagactggcccctcttggctttaaagtagcatgttgtctttttctagcagcttcttcctagtagacattccagggatgggaggggccagggatcatgtcttactcatttctgtatcgccagcccctggcatagtgtctggcttatgttatgtgaataaatgaatgcttgccaagatctcttcttccctcaagtttctggaaaacctgagggttcgtgatacctgttcccactcctcatcagcgggttggcaagaaagcaaataaggggaaacatttttaacattccaagcaagagaaggaagaacgactattgggaggaggtacaccagagattgctcagtgtgcagcctgctacctcacttttggctctggattgcctggtggtagaagggaagagtattatgtagttagcaccttacatatttgatgctcaggaagaaagtgcaagaagatccctaatagaacattaaagattcttaaaagtttttgaagtaggctgcttggggtgaccagccccacccttacatctccatagttggtacagttagcttgtagcagctgaagctgatgcctggagatcactgtctgttggtctgatctcagtatcatactgagacacctcccctgagccttacctacttaaattggtaaccgtcctaccaaaatttgtcaattttaatcaagtgaggcaagttgcaagggagccagagatacgtgaaaaaagaaaagcagaaatactgatactttctaagaaagaagttgtaataatttctttggcacattgacttactgatatcttttgaaatgcatagatgactcttgtgaaccaaagagagcagtagtggttattccccggcgcaataaaaatgcctttgtgtatcacttgcgattgccagtcatttctgtgccagttgctttcattccagagaatggcctcattctccaaaaaaagatgatgattttagaagtaggatttcctaacaaattatgtggtggggagggacggcggggattttattcatcccgtctgagctcttcatacagtattaccattaggttttaagaacaaagatgggggaggagggagtagaaagctgagagtacgtagaacagctacaagacattagtgggtattcagattttgagctgtgtaaatatcaaacatcggcttccagccttaagagttatttgagcagagagttaaggaggaatgggagattttgtgaataaaatgttttgccaaa

SEQ ID NO: 5716 - DNA, 2268 bp, Homo Sapiens
  NM_032830
aggagcacttccggggcagagcctgagagcgcgcgcgcacgtggggccggggcggagagaggcgagcaccgggaaggggagcgtggggccgctggaatgggtgaatttaaggtccatcgagtacgtttctttaattatgttccatcaggaatccgctgtgtggcttacaataaccagtcaaacagattggctgtttcacgaacagatggcactgtggaaatttataacttgtcagcaaactactttcaggagaaatttttcccaggtcatgagtctcgggctacagaagctttgtgctgggcagaaggacagcgactctttagtgctgggctcaatggcgagattatggagtatgatttacaggcgttaaacatcaagtatgctatggatgcctttggaggacctatttggagcatggctgccagccccagtggctctcaacttttggttggttgtgaagatggatctgtgaaactatttcaaattaccccagacaaaatccagtttgaaagaaattttgatcggcagaaaagtcgcatcctgagtctcagctggcatccctctggtacccacattgcagctggttccatagactacattagtgtgtttgatgtcaaatcaggcagcgctgttcataagatgattgtggacaggcagtatatgggcgtgtctaagcggaagtgcatcgtgtggggtgtcgccttcttgtccgatggcactatcataagtgtggactctgctgggaaggtgcagttctgggactcagccactgggacgcttgtgaagagccatctcatcgctaatgctgacgtgcagtccattgctgtagctgaccaagaagacagtttcgtggtgggcacagccgagggaacagtcttccattttcagctggtccctgtgacatctaacagcagtgagaagcagtgggtgcggacaaaaccgttccagcatcacactcatgacgtgcgcactgtggcccacagcccaacagcgctgatatctggaggcactgacacccacttagtctttcgtcctctcatggagaaggtggaagtaaagaattacgatgccgctctccgaaaaatcacctttccccaccgatgtctcatctcctgttctaaaaagaggcagcttctcctcttccagtttgctcatcacttagaactttggcgactgggatccacagttgcaacaggcaagaatggggatactcttccactctctaaaaatgcagatcatttactgcacctaaagacaaagggtcctgagaacattatctgtagctgtatctccccatgtggaagttggatagcctattctacagtttctcggttttttctctatcggctgaattatgaacatgacaacataagcctcaaaagggtttccaaaatgccagcattccttcgctctgcccttcagattttgttttctgaagattcaacaaagctctttgtagcatcaaatcaaggagctctgcatattgttcagctgtcaggaggaagcttcaagcacctgcatgctttccagcctcagtcaggaacagtggaggccatgtgtcttttggcagtcagtccagatgggaattggctagctgcatcaggtaccagtgctggagtccatgtctacaacgtaaaacagctaaagcttcactgcacggtgcctgcttacaatttcccagtgactgctatggctattgcccccaataccaacaaccttgtcatcgctcattcggaccagcaggtatttgagtacagcatcccagacaaacagtatacagattggagccggactgtccagaagcagggctttcaccacctttggctccaaagggatactcctatcacacacatcagttttcatcccaagagaccgatgcacatccttctccatgatgcctacatgttctgcatcattgacaagtcattgccccttccaaatgacaaaaccttactctacaatccatttcctcccacgaatgaatcagatgtcatccggaggcgcacagctcatgcttttaaaatttctaagatatataagcctctactcttcatggatcttttggatgaaagaacactcgtggcagtagaacggcctctggatgacatcattgctcagctcccaccacccattaaaaagaagaaatttggaacctaaaacagggcactgtctgtgtccttccttgaactgtctaccctgttgcttttcacaaatcatggtaataaaacaagttattcttgaggactagtcattaaaaaaaaaaaaaaa

SEQ ID NO: 5717 - DNA, 10660 bp, Homo Sapiens
  NM_032831
gcggaaggagggagggggccgcgctcggcgccccggccgggccactgggccacaggccacgcggccacgcagtccgagcgggagccgagccgggcggggcgagggcagctccgcctggctcccaccatgagtgctgagcttaacgtgcctatcgacccctctgctcctgcctgccctgagcccggccataagggcatggattaccgggactgggtccgccgcagctacctggaactggtcacctctaaccaccactcggtacaggccctgtcgtggcggaagctctacctgagcagggccaagctgaaggcctccagcaggacctccgccctcctctccggctttgccatggtggccatggtggaggtgcagctggagacgcagtaccagtacccgcggccgctgctgattgccttcagcgcctgcaccacggtgctggtggccgtgcacctgttcgccctcctcatcagcacctgcatcctgcccaatgtggaggccgtgagcaacatccacaacctgaactccatcagcgagtccccgcatgagcgcatgcacccctacatcgagctggcctggggcttctccaccgtgcttggcatcctactcttcctggccgaggtggtgctgctctgctggatcaagttcctccccgtggatgcccggcgccagcctggccccccacctggccctgggagtcacacgggctggcaggccgccctggtgtccaccatcatcatggtgcccgtgggcctcatcttcgtggtcttcaccatccacttctaccgctccctggtgcgccacaaaacggagcgccacaaccgcgagatcgaggagctccacaagctcaaggtccagctggacgggcatgagcgcagcctgcaggtcttgtgaggggccgagggccggggctgggagcggccctgtgcccgggagtccgcagaggcggggatttgtcagatgcagacattttgcaaggctgccgggtagttcaagaccaaagttttcctcttgtcttaataccataaggactggatgacttctcctgagatagaaccgtttggttcaatgagggactgtgttgctaagagcgttgggggcaaagccaggctggttccttggcctcggggtttcctgggtcggggacacggtgaagaggctccagcgggacctgcccatcagtcctgggccaggaggggctccaagcagcacccagcggtccgggggagtctcagacccggcatgcgtggctggcagacctgggagagccagggcagggttttgcgttcagagaaggattgccccagagacccgtggtggacttcatgggtgctgagtggcccgtgtgacagtgatgacacgaaggcttcggcgtttgagtgggtgcaggtgcacgccagggcttggtgcttccctgcctggccctggagggagctgggtggcctggcttcaggggaagacaggagccaggacacacgtcagcccagcaggtgtggggggtgctgcagccctcggcagtggggtcaggccctgggggatgtttccaatggtgggcagcctggccaggccggagaagacatgttcacgggcatctatcagatgcccccttgaggaggctgagttatttgagggctgctgcaaagtacgctaggctcaaattctcttttcccagccagagccctggccacacggactcagaggggccaccggggtggggaaaggacccctcccccaccccccgcagccactggcctccagctctcggccacagaatggcctctaaggctgactcagccactcccttgggctgtggcagcaggaggcgggggctctggctcaggccccggagcctgtgcagcttgcccatggccctaggcagcgaggggacagcctgggggacttcctgcctaggcaaggtcattggccgggcctggcctgtggatagtggggccaggggccggcccaggccaaatgagtgccctccttgttatgacaccaagtgactacaagggaggcaagacccctccaggcctctcagccgacactgggtcccaccacacacagtgactgtgccgtgcagtgcaggttctggccttttccttgaaggcatctggtagacccgaagccacgctctcgggccgcacatgcacgccgcagcaccagctgccctgagctgcttgtacaaccaaacacctttcccctcttctccagctgtaacctggagagtcagccatgccttgtcttttgttctcataaatagtcactggggccgggcgcagtgactcacgcctgtaatcccagcactttgggaggcctaggtgggcggatcacttgaggtcaggagttcgagaccagcctggccaacatggtgaaaccctgtctctactaaaaaaatacagaaaattagctgggcgtggtggcgggcgcctgtagccccagctacttgggaggctgaggcgggagaatggcaatggcgtgaacccgggaggcagagcttgcagtgagctgagatggcgccactgcactccagcctgggcgacagagccagactccatctcaaaaaaaaaaaaaaaattagccgggcgtgatggcgggcacctgtagtcccagctactcaggaggctgaggcaagagaatcacttgaacccaggaggcagaggttgcagtgagctgagatcacgccattgcactacagcctgggcaacaagagcgaaactttgtctaaaaaaaaaaaaaaatcactgggcttcttcatgctctgatcacatctctcgtaaaagcttaagctctctccggggtccgggttggccgtgccgtggaattctgggtggcctggctggggtctctggaaatgtggctgcagcagagaacagagaccctgacatgcagttttccgtgctgaggggccctaggggagtcacaccaagggtccccacgagaaagttgtggcatccccgggggccggagaagagccccgtgtcttctgaggggttcgtcctttgtgtcccctgcagacatttgtctgcgacctttgccctccagcatgtatgtactttcctgcagcctgtagaaacgcctcttacggtttaatatgtgttcgctttgctaaagaatatcaacatcggccaggcgaggtggggcacgcctgtcatcccagcactttgggaggctgaggtgggaggatcacttgggcccaggggtgcaagaccagcctgggcaacatagcgagaccccatgtctaaaaaaattattttaaattagccaggccgggtgcaatggctcgcgcccgtaatcttagcactctgggaggccgaggcaggcagatcacttgagatcaggactttaagaccagcctcggcaacaacatggtgaaaccatctctagcaaaaatacaaaaaattagccgggtatggtggcgggtacctgtaatcccagctactcaggaggctgaggcaagagaatcgcttgaacgcaggaggcagaggttgcagtgagctgagatcgtgccactgcactccagcctggacaacagagcaaaactctgtctcaaaaaataataaataaaaataaattagctgggcgtggtggtgcatgcctgtagttccagctacttgggaggctgaggtgggaggattgcttgagcctgggaagtagaggctgcagtgaactataactgtgctagtggccgggcgcagtggctcacgcctataatcccagcactttgggaggccaaagcaggtggatcacttgaggtcaggagttcgagaccagcctggccaacatggtgaaactctgtgtctactaaaaatacaaaaaattagctgggtgtggtggcgctcgcctgtagtcccagctacttgggaggctgaggcaggagaatcacttgaacccagaaggcagaggtagcagtgagccaagatggtgccactgcactccagcctgggcgacagagggtgactcctcaaaaaaaagaaaaatagctaaaatatgattgtaccactgcactccagcctgggtgacagagtgagaccctgtctctaaaaaaaaaaaaaagaaaataaagaaaaaagaatgtcagcatgtcagcgttcctccaaggagtggctttgggtcaagaagacaggctggctctcctaaacaaacggctccccacggctgggagaggcagcaggcccttactctggcctgagtcttttgggaggggccctgctgggccttctcctgccacctaccttcctggaccatctgtgcccctgcccacgcagtaccacactccccagactgtggaacgcatctccagtgccatctgggggccagttactgtacctggtccccaggcagagctcttggcctggcagcatccaggcaggtattaagtgcccagtgatggtggcacatgggtggggacggagccacatccaagtctagccctctgattaggaggatgacagtcttggaatttcttgttctctttctcctagggttctcgttctcccagctccagcctttctagtttcgaggcatgaggcaaaccattgctgtgggaatagcagtgaccattggtagggccatggtggccgggagaggaaacctcagggtcaccccagagcctgtggggagacggagggtgagctgttgttggagctgcagaaacgccttgaagggcagcatgggcgatgaggaatgccattgcagcctagaaattcggtttctggaggtttagcctgattttgaagagtatttaagaacagagggctccagaccaggtgtggtggctcacatctgtaatcccagcactttgggaggcagaggtgggcggatcgcctgagatcaggagttcgagaccagcctggcccacatggtgaaaccctgtctctactaaaaatacaaaaattagccgggcgtagtgacacacgcctgtaatcccagctgctcgggaggcagaggcaggagaatggcgtgaacccgggaggcggaggttgcagtgagccgagatcacgccactgcactccagcctgggtaacagagcaagactctgtctcaaaaaaaaaaaaaaaagaacaggggcctctgcctcagtttgcccgggagccagccagggcccatcctaatttggagcacagtcttcctggtgcctagacatgccaaggcccctcccacgtggtacaccctctccgtttagtacctgaccacctgtttcaaaacgcaggtgtttctggtttagaaacttggaaggcggaatgtgttttcgtgtcttctaggaagggtctgctgaggaccagaccacgtaagcctgagtggatcctgactcagctgcagcccttacctgcctcgtgctgatgatctatgcatggcgttatgtagatcacgtgcggcagagacagccactgtcctgtgtgcgggtttttaaaacagctgccctggatgaaacggaataaaccagtgatgctattcaaagtctttctgttcttgggggatgctgtgggcagaggggataaattgcagcccctggccctcccgtggcatctgctgactgggggacccacatcgtggcctgaaaaactcctggagcgccctctggcctcctgtcgctggtcactggccagtgtcctcccaggctgccccggcaagggggcgtggacatctctagaatggaggcagggtactcatgtccagacacgccgccatggggctccgccccgagagcgcagggtgcctctgcctggcgcttcccctcccagacagggccctctctttccagaaacaaaagaaggggcagccccagagggtggctgagcgacaacagagcccacctggacagggtcagcttggcgttccccccagtcccttgaggagaggagctaccagagcactggtcacctcaggacattctccagccccaagtccctgtggggcagcaggaacaggtgggtccctcctgcgggctggtggcactgctaaggaagcaccagacagccttttttttttttttgagacagagtcgctctgtcacccaagctggaatgcggtggcatgatcttggctcactgcaacctcctcctcccaggttcaagcgatcttgtgcctcagcctcccaagtagctgggattacaggcacgcaccaccatgcttggctaatttttgtatttttagtagagacgggggtttcaccatgttggccaggctggtctccaactcatgacctcgtgatctgcccacctcggcctcccaaagtgctgggattacaggtgtgagccagcttgcccagcttatgtttatagatttattttagagacagggttgggctctattgcccaggccagagctggagtgcagtggtgcaatcatagctctctgcaggctccagcttctgggcgcaagcaatcctcccacctcagtctcccaagtagctacacttgggagactacgggcgcacactaccatgcccagctaatgttttttttgtagagatgggatcttgctatgttgcccagtctggtcttgaacttctggcctcaagcgaccctcctgccttggcctcccaaagtgctgggattacaggtgcgagccaccatgcctggcccattctgttttttgtcggccactgaggtagaggccctcttctaggaaagaatttctgtttgttttgttttgttttgttttgtttttttgaaacagtctctctctgtctcccaggctggagtgcagtggcgtgatctcagctcgctgcaacctccacttcccaggttcaagcaattcttctgccaagctgggactacaggcatgcaccaccaccatgccctgctaatttttgttgttgtcgttggtttttgagatagagtttcgctcttgttgcccaggctggagtgcagtggcacgatctcagctcaccgcaacctccgcctcccaggttcaagcaattatcttgcctcagcctcccaagtagctgggattacaggcatgcgccaccacacctggcttatttttgtatttttagtagagatggggtttctccatgttagccaagctggtctcgaactcccgacctcagatgatccgcctgcctcagcctcccaaagtgctggggttacaggtgtgagccaccacacccagcctttctttttgcatttttaatagagactgagtttcatcacactggccaggctggtttcgaactcctggcctcaagtgatccgctggcctcagcctcctaaagtgctggattacaggcatgagccaccgtgccaggccttgttaatatttttaactctggcacttcaccctagaggctgctaggaatcaggtgtgccaagcaactggcaccactccatggaaagcgtctagggcagtgccttggttctgccaatcctgagaagccaggctgccccttgggctgggcagtggcctcagtaccgagccccaggccagcaagcccacaagcctcgagaaagactgcacttccggtggaggctgcagtttccttaaagggaaaatctgccccacccctgtcaagggcaggacacaagtcactggcattgaaggacccactccacacccagcagatcatcgacgcagactttttttttcccagatagagtctcactctgtcgtccaggctggactgcaatggtgtgatcttggctcactgtaacctccgcctcccgggctcaagtgattctcctgcctcagcctcctgagtagctaggattacaggcgcccaccatcacgcctggctaatttttgtatttttagtagagacggggttttgccatgttggccaggctggtcttgaactcctgacctcaagtgatcctcctgcctcagcctcccaaagtgctgggattataggcgtgagccacctcgtccggcccaagactttttgcctcagatgctgcagagccctggtggggcccaggagggcaaggcccacacaggagccgaaacccatgtagaacctgccaacctgtagctcacacctataatcccagcactttgggaggctgaggtgggcggatcgcttgagccaaggagttcgagaccagcctgggcaacattacgagaccctgtctctacaaaaatacaaaaattacccgggcttggtggctcgtgcctatagtcccagctactggggaggctgaggtgggagaatcatctgagcccagggaggttgagactgcagtgagccaagattgtgccactgcactccagcctgggtaaaatgagtgagaccacgtctcaacccctttcacagcccgtctgcggcccacccacccatgggtactgtgggatgggggacaggctggcttaacacaaatcgaggcaggaataaccccagagaatgggctttgcatggagcttggctcctgtccctgcctgtgagggaggaccagactcggcctcaccacctgccactctgagcaaacaggcaacggtgtttcctgaacatctttctgaagcggctgagggatgtcagctgagcccccgctgggcctgctctggagcgggatgtctccagaagccgcccttggagcgggcacttccctatttgggcgtgtcccagtcccatgcctcaccatccccttgcttgaagctccaagagcatgagagtgggcagcctggtctgctgaggaaagtgtctgatggatgcggaaatggccaccccaaacaccggtaagcagatgttaccctgcaggcggtggctcctggggcccagccctgcagaaacacatggggcaggctgggcagaggggctcacacccgttattcccagcgctttgggaggctgaggcgggaggatcgcttgagcccaggagtttgagaccagcctgggcaacatagcaagactctatctccactaaaaatcaaaacaaaacaattagctgggtatggtggcacacgcctgtagttccagctactggggaggctgagggggaggatcacttgagcccaggagttcaaggctgcagtgagccatgattgcgccactgcactccagcctgggcaacagagcaagaccctgccccgccgcctgaaagaaagaaaaaagaaagagaaaggaagagaaagaaaggaaaagaaaaaggaaacatacgaggctatggggccgtgtacgggggccaggctgtggcagaagcatcctggcgtggccttctccagccccatcctggttgggtaaggtgtcgccgtgggtcttcgtgtcacagcttcaaggacagacccaactctggtatcacaaacttaacaggtaatggagtttcctaaagtgtgctctgcaggagtgctggaagggccagcatggaaggaccccagggagggagatttctttgctccacagcatccccaagcctcacgaggcctctcccctccaagtctctatgtgcatcgttctccagatgttggagcatcctgcaggggccagcccagcctgtcaggggcagagaccctgcactggccccctcgagagtggacccctgggctggcttatctgctccagtgcagtgaggatcagctggagctccgacctgactcacatctggatgcgcagtgaggggcccgttggggccgtgatactgggaggaagccgggctctgtgctcttgctccaagtgagttgaccagggagccgaagttaaggtggcctgggagccacgtcctcccacctagcggctgggctctcacagccactagaaacccatcagcctttcccctgggtctatgcggggctcttcagccctcctgggagctcagtggctgggatgctgctttacagacagtgcacggctctgccatctgacagctcccagagggttctgggggtgactgtaaagagtggtgctggccccgaacctttcctgttcccctggatttagttcccagcaggtggtgaggaactgaacattttgtcccatagtggtgggagagagggctggccacatgggtccaggccaccccctcagcctccacagcctgccccgcacccagccacaggaacagcagagcagctcccccatccaggtaagcgcccccaccacagccccatcacaaaggaatagcctcctggtgtagtgggaggtgaggagctttttttgttttccttttatttattttagggacagggtcttgctctgttgccaagttaagtgcagtggtatgatcatgagctcactgcagccttgacatggtggtaaagccatcctcccgcctcagcctttcgagtagctgggactacaggtgtgtgccaccatgcccagacgcccagctaatgtttgtattttttgtagagatgggggtctcactatgttgcccaggctggcctcaagcaatcctcccacctgagccccgcaaagtactcggattacaggtgtgagtcaccgcgcctggccgggagctttaatttttcctacttgttaacagcgttatggggctggaaggaggctctcagatttccctgccctcctcacatcccccaaccctccctgggcgtgggggtgtcaagcatgagtcaggctgagcctgactctgaagctgttcccagctctttagtctaaacttcaaatcttcaaccctgttccctaatccaacacattccccaaatgaagggactggacagtgagatatcgggaaaccccatgaaaatagatgcataataaaggtgaaaatcattt

SEQ ID NO: 5718 - DNA, 2679 bp, Homo Sapiens
  NM_032836
gggtggaagtgacgctgcccccgctgcccaaaatgtcggcgcccagagggaggtagagagcccccacataccactgtattccccgccaccatggatgacgtccccgccccaacccctgcaccagcaccgcccgccgctgccgcccccagggtcccgtttcactgcagtgaatgtggcaagagcttccgctaccgctcagacctgcggcgccactttgcccggcacacagcgctcaagccccacgcatgtccgcgctgcggcaagggtttcaagcacagcttcaacctagccaaccacctgcgctcgcacaccggggagcggccctaccgctgctctgcctgccccaaggggttccgcgactccaccggcctgctgcaccaccaggtcgtccacactggtgagaaaccctactgctgcctggtctgcgagctccgcttctcctcacgctccagcctgggccgccacctcaagcgccagcaccgtggggttctcccctctcccctgcagcccggccctggcctgcccgccttgagtgcgccctgctccgtctgctgcaatgtggggccctgctcggtgtgcgggggctcaggggccggcggcggagagggccccgagggggcaggcgcgggtctgggcagctgggggctggcagaggcggcagctgcggccgcggcctccttgcccccatttgcgtgcggcgcctgcgcgcggcgcttcgaccacggccgcgagctggcggcccactgggcggcgcacaccgacgtgaagcccttcaagtgcccgcgctgcgagcgcgacttcaacgcgcccgcgctgctggagcggcacaagctgacgcacgacctgcagggcccgggcgcgcccccagcgcaggcctgggccgcggggccaggcgcagggcccgagacggcgggcgaaggcaccgctgcggaggcgggcgacgctcctctggcttcggaccgcaggctgctcctgggccccgcggggggcggcgtgcccaagctcggggggctgctccccgagggcggtggggaggcgcctgcacctgcggcggccgccgagccctcggaagacaccctgtaccagtgcgactgcgggaccttctttgcgtcggccgcggccctggccagtcacctggaggcccactcgggcccggccacctacggctgcggccactgcggggctctgtacgcggcgctggccgccttggaggagcaccggcgggtcagccacggtgagggcggcggggaggaggcggcgaccgccgcccgggaaagggaaccggcgtccggggaacccccgtctggctccggccgcggcaagaagatcttcggctgctccgagtgcgagaagctgttccgctcaccgcgagacctggagcggcacgtgctggtgcacactggcgagaagccgttcccgtgcctggagtgcggcaagttcttccgccacgagtgctacctcaagcgccaccggctgctgcacggcaccgagcggcccttcccttgccacatctgcggcaagggcttcatcacgctcagcaacctctccaggcacctgaagctgcaccggggcatggactgactgccaggctgcgtgcgccctgccctccacccagcctcctggactcggcctggaccaggggacctcgggactgcgcgtgaggccccggccctccaaatccaaatccagacgcaggccctgaaatgaggggaccctgactggagaggtgggggccaccaaaaacccacaaaggccccggagctgggggaccacaaacaaacagggtccttagctggggcaggggagcccaaatctagggagagactcctgagcctgaggtccctggaatgagtgtgggtagccgtaagtccccaagacatggggactttgcagtgagcaatgggtctccacaagtacctctcatcttgagagccctaatactaaaagatgggcacccacccccaccaagggaagactgccccattccctgagagccatcattcctaacgaccttgatctggagaatgtggagggagcatgtccctgaattttcctagatccctccaaatgccacccaccagagtcactggtgaccccagaaaatggatatagccgaaatctgcctttcccctttttcattccctgtgctgaaagagggaccagggtagatgccccctgccctcgaatcccccctccccgactgtggaatggatcgaccctaacgatcttccccgccccaaacactagaatagactggcctgaaatccccttgcccagtagaatggactgatctatgtgcacacacccccatcacatggaatgggctggtctaggctgtggcctgccaccttccttagagtgaatagggcggacactcctctcttttcctgtagcgtgtggaccggtccacgcaattctttatcctgtgaactcatctgagtgggaggtggtggacactggggtttccttccctctctccgtagcatccgttggtctttctctccatctctgttggtttgtctgtctctgtcttcctcccaatccctaggggaagggggcatttggctagggggtgcccctgtgagcctcgaccttgccccctcgtccctctccccagtgtttccaggacccccaataaaccttgtcctgtcagtcgctgaaaaaaaaaaaaaaaaaaaa

SEQ ID NO: 5719 - DNA, 3348 bp, Homo Sapiens
  NM_032839
aggcgcaccaggcgcggtccggaggccgagggcgaccacagcagcctccgcctcctgctgctccggactattctgcgctgggctagtcggcggtgacccggactgcgcccggcagtggcttcgcgggcgacgcgtcgccatgggctctcgctggagcagcgaagaggagaggcagccgctgctggggcccgggctcgggcctgggctgggggcctcctggagaagccgggaggcggcggcggcggcgctgcccgcggcggtcccgggtcccgggcgggtatacgggcgccgctggctggtgctgctgctcttctcgctgctggcgttcgttcagggcctggtctggaacacctggggtcccatccagaactcggcgcgccaggcctacggcttctccagctgggacatcgcgctgctcgtgctgtgggggcccatcggcttcctgccctgcttcgcgttcatgtggctcctggacaagagaggtctccggataactgtgctcctgacatccttccttatggttttgggaactggtctaagatgcatacctatatcagacttaatccttaaaagaagattaattcatggaggacagatgttaaatggattggcaggtccaactgtaatgaatgcagcaccatttctctctacgacgtggttttctgcagatgaaagggccacagccacagctattgcatcaatgctcagttatcttgggggagcatgtgcatttttagttggaccacttgttgttccagctcccaatgggacatcacctcttcttgctgcagagagcagcagggcgcatattaaagatcgcatagaggctgtgttatatgcagaatttggagttgtctgcttaatattttctgcaacactagcttatttcccaccccgacctcctcttcctcccagtgttgctgcagctagccagcggctgagttatcggagaagcgtttgtagattattaagcaattttcgatttttgatgattgctttagcatatgccataccacttggtgtatttgctggctggtctggagttctggacttaattttaacaccagcgcatgtcagccaagtagatgctggctggattggattttggtccatagttggaggctgtgttgttggaatagctatggcaaggtttgcagattttatcaggggtatgctgaaactaattcttctcctcctgttttcgggagctacactgtcatccacgtggttcaccctgacctgtttgaacagcatcacacacctacctttaaccacagtgacattgtatgcctcctgtattctcctgggagtgttcttgaatagcagcgtgcctatattttttgagctttttgtggaaactgtctacccagttccagaaggaattacttgtggagttgtcacttttttaagtaatatgtttatgggagtacttttattttttctcacattttatcatacagagttgtcttggttcaactggtgccttcccgggtcgtgtttgctcagtctcctcctcattctgtgcttcagggaatcctatgacagactctatcttgatgtggttgtctccgtttaatagcacagacttgaaggagtttaaaaggaggctggaaatcaatactgcacactgcacatttgctcagaattgcacatctaacaggaaaagagggagaagaaagaaacttcattcagaggttttgttaggttacagattatcacattaatttaattactactaggtaataataatgggagacttgagtgataataggggattttaaaactctacagatggcatacctgtgcctgcttctggggttggaagtgtgacttcttacacataaagcactacctaagtaattctctctctgttttgtgccagtgctaaactactgattacttgtaattatgaaaagaaataaagggtgtctatcatatgaagataacgccttccctaagtcacatatcagaataggaagatatgccactaacttctaaagaagttcaaaccctgtatccaattttaatgataaaatagccaagaggtatatcgatgatggaaattagccacatgtacactacattttttctaataaagccatttcttatatgactccttattttaatcaggtcagaagcccttggccatctttactatggtgatcaggtgctttccagtgacttctgagcataggcactgtgtctccatctcaacttatccttgtttctgtgaaatacaatttcatctactaggcccttaaataattatgtgagggtgtctaaatgtttaatatgattacattaaatattgtatgaaaaaatgtaattccattaggatctagcactttgttacaagtgaaatgacaagtcacatggacatactgtgtcttctgcctgtatatggtggcatgagatgtaatgtccagagccaacaattatttaccagggttagattttattcagtgacccttgtttaaaaataataatttatcacattgaaactttcagctctgtcgaatgatttctgaattacatcctgtgtttcagcttaggttgtaaaatactccgttctctgtggagtcagcatatttgagagggcagcgttttgccagtacctatcttctttctacagaagatagctttttaagaaataagagttccacattgagtggctgtcagacacagatttcactgtgacgtaaaatacactgcagtgagaatatggtatcaccactattcatatttacatcattcccctcacacagaaaaaccaacccttttcccaaaaagtcaagaatactgctatacctttattattctcagcttcctccagcccttcttgtttttcctcacttgaaattgaaccttcattgtcagctaagtatatatacttttgtgttttcctggacagagtgcaagtggctcttatcagccaaggtggtgaaggttcaggaaagctgggcagcactgggccctgctcctctctgcacctgtgtgcgccatgacacacccacatgcagattcccaagtctgtctcccctcccccttagcaagtacaaggctgtgcattaactcacctcggtcctagaggagtatcctagtactgcttggcaacttctaagaccctaacttgtgaaactagggaagtaagaaaccgttcaaatttaacatctgtcttcagtcatctttaaatcgtctctctttataaacactctgctcacttagcagaaggactgaaggaactaaggaacttgctaaagagaagaagaaaacaaaagctagacttagttccagttaattctgttattcttctgaaataaaaatgaaataaaaggaaaaaaaaaaaaa

SEQ ID NO: 5720 - DNA, 2949 bp, Homo Sapiens
  NM_032840
cctctaggagtgaaggaaaggcggggacccggatgtgtgtggtggcggcggccgaagagcttgtgtgcggagctgagaggcctatggatgaggaggacgcggcggccccggtttgttctcatgaacaagatggatgacctcaacctgcactaccggtttctgaattggcgccggcggatccgggagattcgagaggtccgagctttccgatatcaggagaggttcaaacatatccttgtagatggagatactttaagttatcatggaaactctggtgaagttggctgctacgtggcttctcgacccctgaccaaggacagcaattattttgaggtgtctattgtggacagtggagtccggggcaccattgctgtggggctggtccctcagtactacagcttggatcaccagcctggctggttgcctgactctgtagcctaccatgctgatgatggcaagctgtacaatggccgagccaagggccgccagtttgggtcaaagtgcaactccggggaccggattggctgtggcattgagcctgtgtcctttgatgtgcagaccgcccagatcttcttcaccaaaaatgggaagcgggtgggctctaccatcatgcccatgtccccagatggactgttcccagcagtgggcatgcactccctgggtgaggaggtgcggctgcacctcaacgctgagctgggccgtgaggacgacagcgtcatgatggtggacagttacgaggatgaatggggccggctacatgatgtcagagtctgtgggactctgctggagtacttagggaagggcaaaagcatcgtggatgtggggctggcccaggcccggcacccactcagcacccgcagccactacttcgaggtggagatcgtggaccctggagagaaatgctacatcgccctggggctggcacggaaggactatcccaagaacaggcaccctggctggagcagagggtctgtggcttatcatgcagacgatgggaagatcttccatggcagtggtgtgggggacccctttgggccacgctgttacaaaggggacatcatgggctgtggaatcatgttcccccgggactacattttggacagtgagggggacagtgatgacagttgtgacacagtgatcctgtctccgactgcccgggccgtccggaacgtgcggaatgtcatgtacctgcaccaggaaggggaagaggaagaggaggaagaggaagaggaagaggatggggaagagatagagccggagcatgagggcaggaaggtggtggttttcttcactcggaatggcaagatcattgggaagaaggatgctgttgttccttctggaggcttcttccccaccattggaatgctgagctgcggggagaaagtcaaagtagatctgcaccccttgagtggctagggcctcccctccagacctgctccttctccctgctcaccctctgctgggccaggcacccagttcctgacttcccagaggcttcgtttacccagcaggcccctggaggtgtgtagtcactctgcccccactggctcaggcccctgtcacgcttctctgtgcccacgtttctgacctggtgctgccactgttgtcagtccctgggcctgagtccctggttggacaggaatggacccaaagaatggtgttggtatgtgggtggtcccactcgctttggtcagtgggcttctgggtccccctttccctcaccggccctgtgtgggtggagaggcgtgagcaccctatctcagctgctattcgggcatgatgctttgtagagggtagagtagacagccccctcccctactcaccatggtatttctccttgaattcctctttcttgttttctttcctggttgtgtgaaccagttgctgctgtcatacccctggcagggccaggggacctctctttggtcatctctgtcctttcactggctgctgccccaggaagactcctctaggctctccatctttcccttgagagctggctccccaccccaacctgctcaggcaccacagaggatctaggtctctggctccccatacctggacccacatgggtgggtgcctgttgcatgtttaagagagaggggctgtgaggtgacagggcactagggccttcactcctttctccccttccatcctttctttaccagtgccacccatgtccctagctcccgggtattggggctgaggctctggggcctgtctccctgccagcgtgagggcaagaccccagagccttagctgagcaagcccagaggggcagcgtggcccctccctccccttttcctgccccgtcccatgcctcagcttgctgcttgtgccagttgcctgtttcgcttcagtgtttgattctagcacttacatgtgtcctccccaccaagccctctatctccttctaatccttcaacccctggccccctccccgtaacagtgacttttccagggaggaagaggcagcaggagctgttggccttggtttgcacagagcgggtagggctgtagggaaagcgggtgagctgttgtgctgctgggcctccctttggccctcgcttcccaccctacgatgtatgaaatgtatgtacagaccagagatgtttatacagccgataaagatggagtttccgtatttatcagtatggccggaaccaggagcctttctagtccactgggctaggaacaggactgctggatgggggcagccgaaggcagcttgctcatggggagatgtggaccaatgttgggccagggatgggaatcatatgttccatgggcctggctacaggcctgagcacagatacgtcccctgggagatgaggctttgaccttcctgtgaataagtgttgactccaatttcggctaaagtttatagaaattctttattattagacaaaaatagactctcttttttcccctaaaaaaaaaaaaaaaaaa

SEQ ID NO: 5721 - DNA, 3560 bp, Homo Sapiens
  NM_032842
gagaagagactacctagttcttccggtaactttagagccgcttgccggtggcctcccgcttgagcttggctttgcgcatgcccagagagagtggcgcgagcctgcgttttccggccagaggacatgatgcagggggaggcacaccctagtgcttcccttattgacagaaccatcaagatgagaaaagaaacagaggctaggaaagtggtcttagcctggggactcctaaatgtatctatggctggaatgatatatactgaaatgactggaaaattgattagttcatactacaatgtgacatactggcccctctggtatattgagcttgcccttgcatctctcttcagccttaatgccttatttgatttttggagatatttcaaatatactgtggcaccaacaagtctggttgttagtcctggacagcaaacacttttagggttgaaaacagctgttgtacagactacgcctccacatgatctggcagcaacccaaatccctcccgctccaccttccccttcaattcagggtcagagtgtgttgagttatagcccttctcgttcgcccagtaccagtcccaagttcaccaccagctgtatgactggttacagccctcagctgcaaggtctgtcctcaggtggcagtggttcttatagccctggagtgacctactcgcccgtcagtggttataataagttggcgagctttagcccctctcctccttctccgtaccctaccactgttggaccagtggagagcagtggattgagatctcgctaccgttcttcacctaccgtctacaactcacctactgacaaagaagactacatgaccgacctacgaactttggatacttttctcagaagtgaagaggagaaacagcatagggttaagctggggagcccagattctacctctccttccagcagtcctactttctggaactatagtcgttctatgggggattatgcacaaactttaaagaagtttcagtatcagcttgcctgtaggtctcaggccccatgtgctaacaaagatgaagccgatctcagctctaaacaagccgcagaagaggtctgggcaagagtggctatgaatagacaacttcttgatcatatggattcatggacagctaaatttagaaattggatcaatgagacaatattagtgccacttgttcaagagattgagtctgtcagcacacagatgagacgaatgggttgtccagagctacagataggagaggctagtattactagcttgaaacaagctgccctggttaaagcgcctctcattccgactttgaacacaatcgttcagtatctagaccttactccaaatcaggaatacttgtttgaaaggatcaaagaactatctcagggaggttgtatgagctcatttcgatggaacagaggtggcgacttcaaaggacgaaagtgggatacagacctgcccaccgattctgctatcatcatgcatgtattttgcacctaccttgattccagattacctccacatccgaagtatcccgacggaaaaacttttacttctcagcactttgttcagacaccaaataaaccagatgttacaaatgagaatgttttttgcatttatcagagtgctatcaaccctccccattatgagctcatctaccagcgtcatgtatacaacctgccaaagggcagaaataatatgtttcatacattgttgatgtttctctacatcataaagaccaaagagtcaggaatgcttgggagagttaatcttggtctatctggtgtgaatatattgtggatctttggcgagtagcaagtcatatatttaattctgacatttagactatttcactgaaccagaagtcgaaactaaacatctctgagccactgactcttctgaaataaaatacacatgggtgtatgttacagactctttagatttaacagaaaatgtagctgttatgaaatgtaattgtaaaaatatgtcccgtatcttctatatcgagacattgcctttaattttatatcgcttttcagaaatttcagttgactacaaaactgcaacccttcggatttttattgactcaaaatagtgccattccccttaatgaaatagattttgagtctttttttcattgtaacccccaaatgagaatcatctacctgattcttgtaccaaaaaaaaatttttttcagtcttttttttttttagagagggtctctgtcaacgcagactggagtgcagtggcacgatcttagctcactacaacttctgcctcccaggctcaagcaattctcctgcctcagcctcctgagtagctgggattacaggcatgcaccaccacgcccagctaatttttgtatttttagtagagacagggtttcaccatgttggccaggctggtcccgaactcctgacctcaggtgatccacccacctcggcctcccaaagtgctgggattataggtgcgagccactgcgcccagcctcagttattttatttaacagtgtaagtacttagaaagtaagaaaattgctgatttagtttttttttttttttttttaatgtttccccagcattctgcaagttaggccaaagcccacattcaaagaaatgagattaactcttaagtaatgtattaagtttatgtatattttaaaatattattaaaggaggtttgaaagtattgacatttaaaaagtcaacacttagattaaatttagctggtagttttaatttgggttttagttaagagtgtgaggacatcaggaaaactgtttactactttggttttagcagctcagttttactattccataatgtgttatttttaaagttctctttttaagatcacagtgatatcctatcttcaaattttttaaatatgttcaaaatatctggagggtgagaagttaccaagtttgtatgttttgtttgactcaccatctttattttctgtatatgtagtagctggcaattgcatatattttcttgattaacatattagagactgcttccatcatcttatgtaaacctggaaacagctgaaactagtcttttctgaagaaccgtgtatcagtgttagatgtgcatcccgttttgtcattccctcagactttgaatacagtcattactctctggaagagaaatgtaagtatattttttgttatctgcagtatggtttaacatgtattaataatacacatatgcagactcactaaagtatccccagtaattagtaaattccaaatttaagtcagtacagttctgtatttgtaaattctgtctttcaaaaagttgttcgtgtttttaaaagttgatgtccaaaggaaaggagcttcttttaagtacttttggtgtatgttgaatatttatttgctatgatattctagaagaaaatatcaaacatgttaaatataagaacatgttaaaatttaaatttgctatttcaaaagttactgaagatgtcttggaataacaattgtcatgctgttaaactagttgcatatacttcattaaaagcaccatggagaaacattttaacaatgaaaaaaaaaaaaaaa

SEQ ID NO: 5722 - DNA, 2956 bp, Homo Sapiens
  NM_032846
aagggggagaagaagaagatcggtagattgagtggctagagaggtcggaggtaagtggctatagaagtcgggcggacccggaacccagaggacgcgacaccatgacttatgcttatctcttcaagtatatcatcatcggagacacaggtgtggggaagtcatgtctcctcctgcagtttacagataagcggttccagcctgtccacgacctcacaataggtgtggagtttggagctcgtatggtcaacattgatggaaaacaaatcaaactgcaaatctgggatacggctgggcaagaatccttccgttctatcacccgttcctactacaggggagcagctggagcactgctggtgtacgacattacaaggcgtgaaaccttcaaccacctgacctcatggttagaggatgcccggcagcactctagttccaacatggttatcatgctcattgggaataagagtgacctagagtcccgcagggatgtgaagagagaagaaggagaggcctttgctagggagcatggacttatattcatggaaacttcagccaaaacagcctgcaatgttgaagaggccttcattaacacagccaaagaaatatataggaagatccagcagggtttatttgatgtccacaatgaggcaaatggcatcaagattgggccccaacagtcaatttcaacatcagtgggacccagtgcctcccagcggaactctcgtgacatagggtccaactctggctgctgctgaacatctggcttgaactttttttgtccttcctggaatagcttcagatcaataggcttaatgaaagaggtctttcttgctttggctgagagcagcctctttttaaagtgtgatgttttgcctttccacctaaagaccaggagagaatttgggcccttactgacctgtcctccttcagggacatgagcattccctatagattagggttcttcttatcctcctatacaaatttcttaaattgttaggatcaaagttgattatcacagtagttaaaaaataatttcatggcggggcgccatggctcatgcctgtaatcctagcactttgggaggccaaggtgggcagatcacctgaggtcaagagttcgagaccagcctgaccaacttggagaaatgccatctcaactgaaaatacaaaattagctgggtgtggtggtgcatgcctgtaatcccaggtactcgggaggccaaggcaggagaatcgcttgaacccaggaggtgaaggttacgctaagccaagatcacgccattgcactgcagcctgggcaacaagagcaaaactctgtctcaaataaataaataattttttttttctttttttttttttttttttggggggatggagtctcactctgtctccaggctggagtgcagtggcatgatcttggctcactgcaacctccactttccaggttcaagcagttctcctgcctcaacctcccgagtagctgggactacaggcatgtgccaccacacctggctcatttttgtatttttagtagagacagggtttcaccatgttggccaggatggtcttgatctcttgacctcgtgatccgcccaccttggcctcccaaagtgctggattacaggtgtgagccaccgtgcctggcctaaataaataatttcgtaagcatatacaatccacttcccactaagaattagggtcaaagacattctatttgaacacttgcaattacctagatctagttggcctttggttgatagatcctctgcctcggaatttcattgagtttttttcttccttgcctttgggtgtctgcttgccacttcctaagaattcttgtagaaggcagtttcctctacttgcccaagagcactgagtacttctctactatcctattattagcttctatctcttagtgtaacttcaaaacttttaagagcagtgaagttggtcagggacatgtggccacttattattacctaaagaaaacatttgttccctgttcattttattttaggggccagatctaacattgtagtgtctttcaccagatagacttctactgtttcatcaaactcccttcttaactagacctagactttctactccaatcaggctaatctacttactgaatgtgacatatttattcctagttccatacctttgcacatgccctactctccactaattatacttaaaagtccaaaaattttttctttagtaacagacttaggtactgctaagcagttattaacacaatattccttagttttcatatgttggttattcatatgtctatttatatgtatatttatttttatgtatgttactatgtaaatatggtttgcagttgtttttgtgtggaatcttgtctttccgtataagttgtaagctccttgagagcaggatccatgtcattcctttatttttataaattattccccctatcattcctttacagtgcctagtgctactcattatgtgttcattgaatttgactgacatagttaaaaacttaaggtttattttagactttcaaggaaacaaaagactttagagtcctctctctgtaattctgccccactcatttgtttaccctgggttttatacagttctcttccttctcccctcccacctttccctggctttttgcctccattccatgaggcatacagtaaggctgcctgctagtaagcagtcacataagtgggtacctatccagccattctcttttcagagcatataatactatcttagccaaacttgcctttgcttcactcatcatgcagccttctgggttggttgctatatatatcttttttccttgatgtcccgttctcttccacagccctgaggtcttacgaatttttctactttctttttgctgttgatgaattgtttcattattaaatatatgcatgtatcaaagctaaaaaaaaaaaaaaaaaaaaaaaaaaaaa

SEQ ID NO: 5723 - DNA, 1775 bp, Homo Sapiens
  NM_032848
gtgcaaagtgctgggttctgggtttctggattcgcgggccgttcacacgtagcctgtgccggctcctcgggtgagtccgtccgcgcgcggtgccccgggacggcctaggctgccgggggtccggggccccaggcattccgggctgcagattgacggggatcccggatgcaccgcgcgcccccgcgccctcaccgacgggtccagacctggtgggaagaaggtgcggggacgggtccctgaggatcccgatgcctacgagccaagatgctcagctttataggtgtgacctacacatgtgacttcacctcagttttgtgatccgtaaaatggacaaattcgaagctacttcacagtgctgttgagaggattaaatgaaacaatgcttgtaaagctctttgcaggagggagcctcggaagcagggcctggccggcagagcacacctgctgtcaccagggaccacaggcagcatgaagacccccgtggagctggccgtcagtgggatgcagaccctcggccttcagcaccgctgccgaggtggctaccgggtcaaggccaggacgtcatatgtggatgagactctgtttggcagcccagcaggcacccggcctaccccaccggacttcgatccgccctgggtggagaaggctaacagaaccagaggcgtgggcaaggaggcatcgaaggccttgggggcaaaggggagctgtgagaccaccccctcaaggggcagcacccccaccctcacaccaaggaagaagaacaaatacagacccatcagccacaccccgtcttactgtgatgagtcgctgtttggctcccgatctgaaggcgccagcttcggggccccgcggatggcgaagggggatgccgcaaagctccgtgctctcttgtggacgccaccacctacccccaggggtagccactcgccccgccccagggaggcaccactgcgagccattcacccagctggtccctccaagacagagccggggccagcggcagactcccagaagttatctatgggtgggttacactcttcacgccccctgaagcggggactttcccattccctcacccacctgaatgtccccagcactggtcatccagccaccagtgccccccacacaaatgggcctcaggatctcaggccttccacgtcaggggtgaccttccggagccccctggtgacttccagggctcgctcagttagcatttcagtgccatctaccccacgacgaggtggggccacccagaaaccaaagcccccttggaaatgatactctttcatcagggttgcctatggggccacggcgacaggtatggccccttgccagggtaggaggacattcatcacccagggaaccccaggtattaaagaagcccctgtgggggcagacagacatagcaggggtgggcagtgcctccctttatcctgacaatctctagtcgattcttgcctttttctcccgattgcggatttgggggccacctctaagatgcctctctccagccctgtctcaaccatactccaaattagtgccaacccaggggcctggcacctcccacatcatccattgtcttgctgccaagtgcgaataaacggcgtgattgccaacctggagggtcccctcttatcccttcaagccaagcttcctgctcaggattagtttccagctaagtctgcaagccctagaggagtttttccaggctgtctgtgaagcctggggaacacaacggcaactgggagatttgtgagtgaacactgtttcatctt

SEQ ID NO: 5724 - DNA, 2738 bp, Homo Sapiens
  NM_032852
ctcttactacggtggccggggtgctcaaagtacctgtagctgcggcgctgaggtcggaacgtctgcgtgtgtgcgggctggttttgtggcggctgctgctagagctggagcatttgccgggttggtggctcctgcacatttttacagttctccagtccttctctttcgtcagtataaaagattaaactctacagaagaatgcaatcaagtgatggcttttcctttagaatttgaatatggaggctacaggaacagatgaagttgacaagctaaaaaccaaatttatatctgcttggaacaacatgaaatatagttgggtgttgaaaacaaagacgtattttagtagaaattctcctgtattattgcttggaaaatgttaccattttaaatatgaagatgaagataaaacgttacctgcagagtcgggatgtacaatagaggatcacgtaattgcaggaaatgtagaagaatttcgtaaagatttcatttctagaatatggctgacctacagggaagaattccctcaaatagaaggctcagctttgacaacagactgtgggtggggctgcacattgagaactggccagatgctcttggctcaaggactcatactacactttcttggtagagcttggacctggcctgatgctttgaatattgaaaattcagactctgaatcatggacttcccacactgtcaaaaaatttactgcatcatttgaagcatcactttcaggggaaagagaattcaaaaccccaacaatttctctgaaggaaacaattgggaaatattctgatgatcatgaaatgcgaaatgaagtttatcataggaaaatcatctcttggtttggtgattcccccttggctctttttggcttacatcaactaatagaatatggaaagaagtctgggaaaaaagcaggagattggtatggaccagctgtggttgctcacattttaagaaaagcagttgaagaagcaaggcatcctgatttacaaggaataactatttatgttgcacaagattgtacagtttacaattctgatgtaattgataaacagagtgcttccatgacttctgataatgcagatgacaaagctgttattattctagttcctgttagacttggtggagaaagaaccaacaccgactacttagaatttgtgaagggtattttaagcctggaatattgtgtgggtattattggtggcaaacctaaacagtcatattactttgctggatttcaagatgacagtttgatttacatggatcctcattactgccaatcttttgtagatgtcagcataaaggatttccctcttgagacattccactgcccttctcccaaaaagatgtcttttcgaaaaatggatcccagctgtacaataggattttactgtcgaaatgttcaggacttcaaacgagcttctgaagaaatcaccaagatgctgaaattttcttctaaggagaaatatcccttatttacttttgtaaatggtcattccagagactatgattttacatctactacaaccaatgaagaagaccttttttcagaggatgaaaagaaacaattaaaaagatttagcacggaagagtttgtcttgctttaaagattagcacatttgtgcttgataagaagaattccattgaaaggggaaaaatgaagagaaacaagtatatctgaaatgtttattttcacaaatatcttaattttatatgttctttaaaaaagaacatttgaaaatataacagttaaagatatttttctaaaagagaaatgatttaatgaatcttgctttctaataaataaattgagtgattctggttgcattcctatttccctaagatctactagtgataattctaccttaactgtaagccttttagtcttcaaagtcttccacctgagcccattgttctcatggaggttttgtgatattaaccctcccccaaagactgggatcaccaaatagtttcaaaattctcagtttgtactgaagaccagaagatcagagaaggaaactttaatgctgtctagcctcctgctattaatgcaatcaaagaatacttttgcatatgtcttgataattaaatagtatttgttaactgtgatatgcatacacttatataagcagaattatgagttaaagtaatacttagcaatatgattttataatggctcctcattatgcttgctgttgaaccttttatgaggagtgaatataaagtattggttttccctcacaaatttaaagattatgttattaatactattataactgcatcaatcaagtcagataaaggcaactataaaatagtagtagtgtttgtttcctatctcaagggcgaaattttatgggaactcaatttattatgcagtttttaagtttaaaataccaagaaagatgtcactagattctcttctatgtgatttttgttttttatataaagcagtgtagtggtgtttagaagctgaggccacctgtaaggcaaatctgccttaagtgtattatgtgttacttaaaggcaaatttgtgatctaaaagtacaagagtgatttttgagctaggattataaaatacataataaagatgtgagaagataaaatgcttttgttttggttttaatgttgggattattttaatcctttcatttgaaaaatcagtgtctcaaatgaattctgttcatttataataaatgcatatattgctctgaaaacaaaaaaaaaaaaaaaa

SEQ ID NO: 5725 - DNA, 4119 bp, Homo Sapiens
  NM_032853
cgcggggagcggcggcggcggcggcggcggcggtggcggaggcggacacattggcgtgagacctgggagtacgttgtgccaaatcattgccacttgccacatgagtgtaaatgatggcggatgccaagtatgtcctctgccgatgggaaaagcgattatggcctgcgaaggttttggcccgaaccgcgacttcaacaaaaaataagagaagaaaggaatattttctagctgtgcaaatcctctctctagaggaaaaaattaaggtgaaaagcactgaagttgagatcctagagaagtctcaaattgaagccattgcttcctcgttagcctcacagaatgaggttcctgcggcacccctggaagaactggcctacagacggtcgcttcgcgtggctctggacgttctgagcgagggctcgatttggagtcaagaaagctctgcagggacaggtagagctgaccggtctctgcgagggaagcccatggagcatgtctcctcgccctgtgattcgaactcctcatctcttccccgcggagacgtgttgggcagttccagacctcacaggaggaggccatgtgtgcaacaaagcctgtcaagttcgttcacttgtgaaaaggaccccgagtgcaaagtggaccacaagaaggggctcaggaaaagtgaaaacccaagaggcccgttggtcctcccagctggaggtggtgcccaagatgagagtgggtccagaatccaccacaaaaattggactcttgcaagtaagaggggaggaaactcagcgcagaaggctagcttgtgcctgaatggatcttccctttcagaggacgacacggagagagacatggggagcaaaggaggcagctgggcagccccgtccttgccctccggggtcagggaggacgatccctgtgccaacgctgagggacacgaccccggtctgccgttgggcagcctcactgcgcccccagcccctgagccctcggcctgctcagagcctggagaatgccctgcgaaaaagaggccgcgcctggatggcagccaaaggccgcctgccgtgcagctggagcccatggcagcaggggccgcaccatcccccgggccggggccagggcccagagagtctgtgaccccgcgcagcaccgccaggctgggcccgcctccctcccacgcctctgcggatgcaaccagatgtcttccttgcccggattcccagaagctggagaaagagtgccagtcttccgaagagtccatggggtctaattccatgcgttctatcctggaggaagacgaggaagacgaggagccaccaagagtccttttataccacgaaccacgttcgtttgaagtaggaatgctagtctggcataaacataaaaaataccccttctggccagcagtggtcaaaagcgtcaggcagagagataagaaagcaagtgtgctatacatcgaaggacacatgaacccgaaaatgaaaggtttcacagtgtctcttaaaagtttaaagcactttgattgtaaagagaaacagacgcttctgaatcaagccagggaggacttcaaccaggacatcggctggtgtgtctccctcatcaccgactacagggtccggttaggctgcgggtcttttgctggctctttcctggaatattacgcggctgatataagctatcctgtccgaaaatccatccagcaggacgtcttggggaccaagcttcctcaactgagcaaggggagccccgaggagcccgtggtggggtgccccctggggcagaggcagccctgccggaaaatgctccccgaccgctcgcgggccgcccgggaccgggccaaccagaagctggtggagtacattgtgaaggccaagggcgcggagagccacctgcgggccatcctaaagagcaggaagccatctcgctggctgcagaccttcctgagctccagccagtacgtgacctgtgtggagacctacctggaggatgaggggcagctggacctggtggtgaagtacctgcagggcgtctaccaggaggtgggggccaaggtgctccagcgcaccaacggcgaccggatccggttcattctggacgtgcttctgcccgaggccatcatctgtgcgatctctgcggtggacgaggtggactacaagacggctgaggagaagtacatcaaggggccttcgctgagctaccgggaaaaagaaatatttgacaaccagctccttgaagagcggaaccggcgccgtcggtgagggagcagccggctgtgctgtcagcggggcctggcggtggaagcgcctccagtgtgcatgagcgtgtctgaagatggggggctcagggggcacgtttgcgtttggacctgtctgtgcgttctcctgcgtggcagtcctgatttccatgcttctggagaatccatttcgttaacactgaaagccagttctcttttcctggcagtttttttcattttatttttggcattttttacaagataccgttcgggaaaggcttttgaaaggacggaagcgtattcactgtgcgccagtactcctggctgtgctgtggtttctcccgacgtgcacatcgatctcgtatgtgtggcatctgatattaaacgggaggttttaagaagcgtctgccgtgatcatggagcttcggaagcgggaatggttcttccgggtttgctgttttgtctgtttcccccttgtgtggtttccgcctgcgacagttccagaatttgctctcccactcagtgtgctctgcagctgtgaggaaacagccttcgttagaggcgggagcagagacgagccgctgctctgtgtcgtgtttgctgtggccgcagggagaggagcaggacacgcacctttccaggggcctctgtgtcccgcactgtgtgtgagtggaccgcagcgcgcagccacatgccctggctgccatgggccagaccgcctccacctcccccgcccgcctggcctgtcctgagtgcatttccctgcactgtgtcgtcactgcacagccagtcaccgcggtctcagtcatcggcgcggatggctatgctggggtcccagggtggccgcagcagtcagggtcactgtgggagccctggggtggagtgacaaaccgcattgtcctgtgcccgccatggcagaagcgcagcctttgtatggaggcccaaccgcgctcccgtctggagaagcggcttccggggtgtggctgccgggtcggctctggtccacagcacggtgccggggctgcaggttgttgagggctgtgactccgtggggctcagccaggctccagcagggtcagacgtgctgttaagagcaaagccacagacgatgacttgtccattctcagtggatgctccaggctgtgcctacacagcagtgctggtgacatgtccagggttccagggcccggtggcctgggagctgctttctccccactggctgggctgcatctggccctggctggaggccttgctttgaggggctgtgaccctcttcccccaggccctccccagccgacgacagccaccggagaggagatcggaacacgattgtctcagatgcagggcgctgtgcgggacgaagccgcaaggactctcgtatcgggcccttgggactcgggaggtgccagaggcggcggctgctctggacctcggtgttcactgacctttgtttcacttgcctctgctcgactccgagagcaggaaacccggccgtggcctggcagctccgcctcccatgcccgcacgctggggtctgtcttgtctggagcagtggggcacaccccggaggaggcgggggtcagggctgtcggccttggccccctgctggtcgctgtttcggggactcggggcggccagtaccaccgcctgaggcggggctcagcagcgttgcatgtacgggcctcgtactgcctcatggaaaatcctccggagccgccctccattgtgggttcctgagagtaggacacattgccatggttttgtgggaatcacgcgcccctgatggaacttttctgctgttgtgaagtacttttatccatttgcttctctgctgaccttgccaagttgttcgaggtggaattaaacacctcccagacctcaaaaaaaaaaaaaaaaaa

SEQ ID NO: 5726 - DNA, 2369 bp, Homo Sapiens
  NM_032855
gtccttcccaagaccacacccaggtccagtcattccctaggacttggcagagagctgtactcacagccaagatcacagcaaaatcagcaaagggaaaaggcatgcagagtgaagtccagaggcaaccagacagaagcatccagaatcctctcacagtggggtcacacaccccatgcttaactcccccaacaatgagttgtaacaacagtcaggtgtggtggtgtgtgcctgtagtcccagctacttgggagcctgaggcaggaggatcacttgagtccagcagttcaagactgcagtgagctatgatcataccactgcactccagcctgagtgacagagtgagactctgtctctaaaatagggctcacctgcttgaggaaacaggaactgcctcggggcagccagccccgccccattgacgtgcagaccttgaatcgaaacccaggctcctgcaggcactggcacagctacagcgagggcctcggccatccaagggtctcccaggtgaccttccctccaccccaggaagctatgacagaggccgggaagctgcccctaccgctacccccacggctggactggtttgtgcacacccagatgggccagctggcccaagacggggtccccgagtggttccatggtgcaatctcaagagaggatgctgagaacttgctggagtcacagccactgggatcctttctcatcagggtcagtcacagccatgtgggctacacactctcctacaaagcccaaagcagctgctgccatttcatggtgaagctcttggatgatgggactttcatgatccccggggagaaggtggcccacacctcgctggacgccctggtcaccttccaccagcagaagccaattgagccgcgcagggagctgctgacacagccctgcaggcagaaggatcccgcaaacgtggattacgaggatctcttcctctactccaacgcagtggccgaggaagctgcctgcccggtgtctgcccctgaggaggcctccccaaagccagtcctgtgtcaccaatcaaaggaaaggaagccgtcagcagagatgaacagaataaccaccaaggaagccacttcctcctgccccccaaaatcccctcttggagagacccgccagaaactctggaggagcctcaaaatgctccccgagagaggccagagggtccggcagcagctaaaaagccacctcgccactgtgaacttgtcgtcactcttggatgtccggagatccacggtgatctcaggccctgggaccggaaaaggcagccaagatcactcaggggatcccacctcgggggacagaggctacacggatccctgtgtggccacatctctcaaaagcccctcacagccccaggcaccaaaagacagaaaggtccccaccaggaaggccgagaggtcggtcagctgcattgaggtgaccccaggggacaggagttggcaccaaatggtagtgagagccctatcctcccaggagtccaagccagagcaccagggcttggcagagcctgagaacgaccagctcccggaggagtaccaacaaccgccaccctttgcccctgggtactgctagagaacaggtccaccctggctctgggactcgctgccaggggctgccacactcctgaatgccttaacatttcttccatggccccacaccatggcatccgggggtcttcgggaacccgggaaatggaataaagatgtttttggggtctgttcctgcactcacccatggggtgagctggttattttagcaacaatcatcagagtgacgctgatggtttggggcaccagctatacatcagccccagtgccagaccttctattcattattttacgcctcagagcaaggccctcagggagggtcatcctccatgttttgaagaagagactgaggttcagagaggataagaggcgtgaccaaggccacagagctatgggtgtcagcaccaggatttgaagccaggtgaatccgagcccttttcccatatcatctgtttgttctgttgtctaaaagcacactgcaagccgggctcagtggctcatgcctgtagtcccagcactctgtggggccgaggcaggcagatcgcttgaggtcaggagtttgagaccagcctggccaacatggtgaaaccccgtctatactaaaaaattcaaaaattacccggacgtggtggcgcatgcctgtaatcccagctacttgggagcctgaggcgggagaattgcttgaacccgggaggcagaggttgcagtgagccgagatcgcatcactgcagtccagcctggatgacagagtgagactccatctcaaaaaataaataaataaataaaaatgaaattaaaaaaaaa

SEQ ID NO: 5727 - DNA, 1855 bp, Homo Sapiens
  NM_032856
ggaagcggtcgttgccatggatcctggggacgactggctggtggaatccttgcgcttgtaccaggatttctatgcattcgacctgtcaggagccactcgagtccttgaatggattgatgacaaaggagtctttgttgctggctatgaaagcctgaaaaagaatgaaattcttcatctgaaattacctctcagactttctgtaaaggaaaacaagggcttattcccagaaagagatttcaaagtgcgccatggaggattttcagacaggtctatctttgatctaaagcatgtgccacataccagattgctggttaccagtggccttccaggttgttatctgcaggtgtggcaggttgcagaggacagtgatgtcattaaagctgtcagcaccattgctgtgcatgagaaagaggagagtctctggcctagggtggccgtcttctccacattggcacccggagtcctccatggggcgaggctccgaagtctgcaggtcgttgatctggagtcccggaagaccacgtacacctcagatgtcagtgacagtgaggagctgagtagcctgcaggtcctagatgcagacacctttgccttctgctgtgcttcaggccggctggggcttgttgacacccggcagaagtgggcaccgttggagaatcgcagccctggccctgggtctggtggagagagatggtgtgctgaagttgggagctggggccagggccctgggcccagcattgccagccttggctcagatgggcgtctttgtcttcttgacccccgggatctctgccatcctgtgagctcagtccagtgcccagtatccgtacctagccctgacccagagctgctgcgagtgacttgggccccaggcctgaagaattgcttggccatctcaggttttgatggtacagtccaggtctatgatgccacatcttgggatggaacacggagccaagatggaacacggagccaagtagaacctctcttcactcacagaggtcacatcttcctagatggaaatgggatggaccctgctcctttggtcaccacccacacctggcatccctgcagaccaaggactttgttatcagcaacaaatgatgcctctctgcatgtgtgggactgggtggacctttgtgccccccgctgacaccagcatctttccatctaggcctctagaaaggggaggagctgctgtagtagcaagggtgctcatgtaggactcaagtgactaccagtccctgttaccagctgtgtggccttgggcaagtctgccagcgtcacttagcctcagtttccttatctgtaaaatgaggatagtaagaactacctcgtagtgatattgcgaaggttagaagaaacgcatggcataattacttggtagctattgttagatctgggagtgtgaaatggtagcgttttgtccctgtcttcacactatcatagggagaatcaaaagagctaacaaatataaacatgctttgtgaatttttttaaagaaaaaaatgtagaggggccaataaacatgaaaaaatcccagccctagtagcaattaaggaaatagcaaaacaggatttctgctcctcttgagtgggtctcatgggaacacaggtgcactttcccacacttgtccccccaggtgactaggttcaagagacatttgcttttggtggccccacaaacatttccttttgagggcccatagtgaatattaaagtgtgctggacatggtggctcatgcctgtaatcccagcactttcagaggctgaggtgggcagattgcttgagctgaggagtttgagaccagcctgggcaacatagcaagatcccttcccttaaaaaaaaaaaaaaa

SEQ ID NO: 5728 - DNA, 2048 bp, Homo Sapiens
  NM_032857
cttccctccgccccgcgccgcggctggcagggtgtgcgtgagtttggtggcggccggctgtgcagagacgccatgtaccggctcatgtcagcagtgactgcccgggctgccgcccccgggggcttggcctcaagctgcggacgacgcggggtccatcagcgcgccgggctgccgcctctcggccacggctgggtcgggggcctcgggctggggctggggctggcgctcggggtgaagctggcaggtgggctgaggggcgcggccccggcgcagtcccccgcggcccccgaccctgaggcgtcgcctctggccgagccgccacaggagcagtccctcgccccgtggtctccgcagaccccggcgccgccctgctccaggtgcttcgccagagccatcgagagcagccgcgacctgctgcacaggatcaaggatgaggtgggcgcaccgggcatagtggttggagtttctgtagatggaaaagaagtctggtcagaaggtttaggttatgctgatgttgagaaccgtgtaccatgtaaaccagagacagttatgcgaattgctagcatcagcaaaagtctcaccatggttgctcttgccaaattgtgggaagcagggaaactggatcttgatattccagtacaacattatgttcccgaattcccagaaaaagaatatgaaggtgaaaaggtttctgtcacaacaagattactgatttcccatttaagtggaattcgtcattatgaaaaggacataaaaaaggtgaaagaagagaaagcttataaagccttgaagatgatgaaagagaatgttgcatttgagcaagaaaaagaaggcaaaagtaatgaaaagaatgattttactaaatttaaaacagagcaggagaatgaagccaaatgccggaattcaaaacctggcaagaaaaagaatgattttgaacaaggcgaattatatttgagagaaaagtttgaaaattcaattgaatccctaagattatttaaaaatgatcctttgttcttcaaacctggtagtcagtttttgtattcaacttttggctataccctactggcagccatagtagagagagcttcaggatgtaaatatttggactatatgcagaaaatattccatgacttggatatgctgacgactgtgcaggaagaaaacgagccagtgatttacaatagagcaagattttatgtttacaataaaaagaaacgtcttgtcaacacaccttacgtggataactcctataaatgggctggtggtggatttctgtctacagtgggtgaccttctgaaatttgggaatgcaatgctttatggttaccaagttgggctgtttaagaactcaaatgaaaatcttttacctggatacctcaaaccagaaacaatggttatgatgtggaccccagtccctaacacagagatgtcttgggataaagagggtaaatatgcaatggcgtggggtgttgtggaaaggaaacaaacgtatggttcgtgtagaaagcaacggcattatgcttcacatactggaggggcagtgggtgccagtagtgtcctgctggtccttcctgaagaactggatacagagactataaataacaaggttcccccaagaggaatcattgtttctatcatatgtaacatgcaatctgttggcctcaatagcaccgctttgaagattgcccttgaatttgataaagacagatcagactgataaccttaacaccataggtgcaaaatgagttgttctgaggtttttttgaaacattaaagttccaaaacatgacatttttaagaataaatttgaaatagagtataactgaatgcagagaattatgtacctctaattgcttaattttgtaatggtcttttattgtagaattggttctttatactcagggaagtaattatattgtttttactttttgaaaaaagtgttaactcttgaaataaaatattctgataaaataaaaaaaaaaaaaaaaaaaaaaaaaaaaaaaaaaaaaaaaaaaaaaaaaaaaaaaaaaaaaaaaaaaaaaaaaaaaa

SEQ ID NO: 5729 - DNA, 1835 bp, Homo Sapiens
  NM_032860
gtggtgaggcctacagaagcggccttcagctggaccttggtctccccgccggacttcgagggtgtcatcgccgcccctgttgggggtgagcgccgcgcggctgcagcatgcctcacaggaagaaaaagccctttatagagaagaagaaagctgtgtcttttcacttggtccaccggagccaacgagatcctttagcagcagatgagagtgcaccccagagggttctattgcccacacaaaaaatagacaatgaagaaaggcgagcagaacagaggaagtatggagtgttctttgatgacgactatgactacctgcagcacctgaaggaaccatctgggccttcagagcttattccctcaagtaccttcagtgcacacaacaggagagaggagaaagaagaaacgctagtaattccaagcactggaattaagttgccttcatcagtgtttgcttcagagtttgaggaagatgttggattgttaaataaagcagctccagtttcaggacctcgactggattttgatcctgacattgttgcagctcttgatgatgattttgactttgatgatccagataatctgcttgaggatgactttattcttcaggccaataaggcaacaggagaggaagagggaatggatatacagaaatctgagaatgaagatgacagcgagtgggaagatgtggatgatgagaagggagatagcaatgatgactatgactctgcaggcctattgtcagatgaagactgtatgtctgtgcccggaaaaactcacagagctatagcagatcacttgttctggagtgaggaaacaaagagtcgcttcacggagtattcgatgacttcctcagtcatgaggagaaatgaacagctgaccctacatgatgagaggtttgagaagttttatgagcaatatgatgatgatgaaattggagctctggataatgcagaattggaaggttctattcaagtggacagcaatcgcttacaggaagttttgaatgactactataaagagaaggcagagaattgtgtaaaattgaatacccttgaacccttggaggatcaagacctgccaatgaatgagcttgatgagtctgaggaggaagaaatgattactgtagtccttgaagaagccaaagagaagtgggattgtgaatctatttgtagtacatactcaaatttatataaccatccacagcttatcaagtatcaaccaaagcccaaacaaattcgaatatcttctaaaacaggaatacctctcaatgtcttaccaaagaaaggactcacagcaaagcaaactgaaagaatacagatgattaatggcagtgatcttcctaaagtatcaactcagccacgttctaaaaatgaaagcaaagaagataaaagagcaagaaagcaagctataaaagaagagcgcaaggaacgaagagtggagaagaaagctaacaaattagcatttaaactggagaaaagaaggcaagaaaaagagctgctgaacttgaagaagaatgttgagggtctaaagctatagacagtggagcatacagggcaaggcactttattaggggctcctcatctttggttattgactagaaacttcagaaagacaaaactgtttgccatttttactggcagataagaggaaaatacaatatttgtattatttttatactagtaagtgtcccctgccaaccatcttgtaaatattgtaatactttaatttttaatattataagcttacatttgctctgaagtaaatgacttcatgaatgtgaaatgtttgataaattaaaggaaaatatcttcataaaaaaaaaaaaaaaaaaaaaaa

SEQ ID NO: 5730 - DNA, 2412 bp, Homo Sapiens
  NM_032862
atgtaccccgcgggccccccggccggcccggtaccgcgccgcggccgccgtcccctgcccgggccccccgcgcccgccccagcccccgtccccgctgcacggccgccgccccccgcgcccgggccgcggccccgcgtggccgtgaagatggccttccgcaaggcctactccatcaaggacaagctgcaggccatcgagcgcgtcaagggcggcgagcggcaggccagtgtgtgccgcgacttcggcgtgccgggcgggacgctgcgcggctggctcaaggacgagcccaagctgcgctggttcctggagcagctgggcggtgaggtgggcactcagcgcaagaagatgcggctggccaacgaggaggagatcgaccgcgccgtgtacgcctggttcctggcgctgcgccagcacggggtgccgctgtctggcccgctcatccaggcgcaggccgaggccttcgcgcgccagatctacgggcccgagtgcaccttcaaggccagccacggctggttctggcgctggcagaagcgccacggcatctccagccagcgcttctacggcgaggccgggcccccagccccgagccccgcgcccggcccgcccgtcaaggaggagcccgcgctgccctccggcgccggccccctgcccgaccgcgccccggccccgccgcccccggccgagggcggctacggggacgagcagatttacagcgccagcgtcaccggcctctactggaagctgcttccggagcaggctgcgcccccgggcgcaggggaccccggggcggggggctgtggccggcgctggcggggcgaccgcgtaacggtgctgctggccgcaaacctgaccggcagccacaagctgaagccgctggtcatcgggcggctgccggacccgcccagcctgcgccaccacaaccaggacaagttcccggcctcctaccgctacagccccgacgcctggctcagccgcccgctgctgcggggctggttctttgaggaatttgtcccaggcgtcaaacgctacctgcgccgaagctgcctgcagcagaaggccgtgctgctggtggcccacccgccctgcccaagcccagctgccagtatgcccgccctggacagcgaggatgcccccgtgcggtgcaggccggagcccctcggtcccccggaggagctgcagacaccggatggcgctgtgcgggtgctgttcctgtccaaaggcagcagccgggcacatatccccgcaccgctggagcagggcgtggtggccgccttcaaacagctgtacaagcgcgagctgctgcgactggctgtgtcctgcgccagcggctccccgctggacttcatgcgcagcttcatgctcaaggacatgctctacctggctggcctctcctgggacctggtgcaggcgggcagcattgagcgctgctggctgctgggcctgcgggctgccttcgagccccggcccggcgaggacagtgctgggcagccggcccaggccgaggaagccgccgagcacagcagggtgctcagcgacctcacccacctggcggctctggcctacaagtgcctggctccggaggaggttgcggagtggctgcacctggacgatgatgggggtccgcccgagggctgcagggaggaggtgggcccagccctgccccctgcagcgcctccggccccagccagtctgccctctgccatggggggcggagaggacgaggaggaggccaccgactatggagggacctcagtgccgactgccggggaggccgtgcgggggctagaaacagctctgcggtggctggagaaccaggaccccagagaggtggggccactgaggctggtgcagttgcgctcactcatcagcatggcccggaggctggggggcatcgggcataccccagcaggcccctatgacggtgtgtgaccaggccagcccagtgacctttctcctgctgcacttggagggaggggacatacacacagtctcccatctctcctcccctccccctggggtggcccaccgcatgggtacagggggttccaggaatccaaatccagcatggcttggaggagctctgttggtgagaggtcgccctgcctcactggcaccctgggggcacagctggaagagaggcctggcccatgctcctctcagggcaggcacatgtacggggcatacaaggcacagcgcctgttggaacaggtggctgtgttcctgctctggcccccgtggggctgggcctccgcccctgcaccagtcacatgcactggacgagggccgaaactcctgtctgctatcgagccctggtgctatgtggccccggagccacagcacaatcatctcagtggcgaagcacaccacttgattctatttttttttaacacattaaatctgtttttaaagata

SEQ ID NO: 5731 - DNA, 2780 bp, Homo Sapiens
  NM_032864
aacatgcagccgccatcattgattcgataggcgacgcggggagcggaagccctttacactacggtgtttccggcttcaagatggtcgcctaagctgtttagtgaaacttcttccacctttctccattcctctaggtgctttttctgaacctggatgtgaggcattaaaggatccgacggaaatagaattgaaggcattctaaaatggctaaccgtacagtgaaggatgcgcacagcatccatggcaccaaccctcaatatctggtggagaagatcattcgaacgcgaatctatgagtccaagtactggaaagaggagtgctttggacttacagctgaacttgtagtcgataaagccatggagttaaggtttgtgggtggcgtctatggtggcaacataaaaccaacaccctttctgtgtttaaccttgaagatgcttcaaattcaacccgagaaggatatcattgtagagtttatcaaaaatgaagatttcaagtatgtccgcatgctgggggcactttacatgaggctgacaggcactgcaattgattgctacaagtacttggaacctttgtacaatgactatcgaaaaatcaagagccagaaccgaaatggggagtttgaattgatgcatgttgatgagtttattgatgaactattgcacagtgagagagtctgtgatatcattctgccccgactacagaaacgctatgtattagaggaagctgagcaactggagcctcgagttagtgctctggaagaggacatggatgatgtggagtccagtgaagaggaagaagaggaggatgagaagttggaaagagtgccatcacctgatcaccgccggagaagctaccgagacttggacaagccccgtcgctctcccacactgcgctacaggaggagtaggagccggtctcccagaaggcggagtcgatctcccaaaaggagaagcccctcccctcgccgagaaaggcatcggagcaagagtccaagacgtcaccgcagcaggtcccgagatcggcggcacagatcccgttccaagtccccaggtcatcaccgtagtcacagacacaggagccactcaaagtctcccgaaaggtctaagaagagccacaagaagagccggagagggaatgagtaatggactcagtttggttttagtccacatggcctcctgtggatataaggatatctgtatgtggaaggattaagatctcccccaggcagctataagaatattttagtttttttcttatcaagtttctcaacctttatttttaatgaaggaggtgctgagttttgtatctttttaatcataatcaacatcagtttttgacccaactaaccttgactgtattcaaacttatgagagtataaaggatctggaggttggggatatgactgacaaggaaaggctgtggccacctgatgaccctttccctttttattaaaccggacacacctgtttcccatttcgctgtagtttagtttttggtttgttgtggttggaactgctttgagaatcctgggatttgtgctgctgctgttattcaaagatcaaaggagtaaaacatagttgctcctaacttttttccagcagcagcaagtggtaataaacatgaaaactggtttgtagcagttttgaaagaatagaatgcattcaaatgtaaggctgcttctggatcattaaagccagtttcatcaaacagttcaacagagagcagcacttaataccctttatacagcccattttttcatagtttcatttgttcttgcccacaagcttgaaatccaggttaaggtatccagcctttatcatataagcattgacattatccaggcctagtcagtagcagtagggtaacgggattgaaaaagatttgatggagaggaaagtatctaatattagtcatggttttgacctaaattgctagacagtcgtgccattcacaaagtcagaaaatacagcaggaagagacagcttttagaggggcagagaattagaggatggtggtagtaatgaaaatgatgcattcagtttaacaagtttaatttgagacagctatggtatagctaaaaacaaaagcccataaagttggagatagggaccagagtttaacatagcgatctaggccagaattgacaatgtttaagtaatggtggaatctgtcaataagacttcccagagtgttaatatatatcagaaatgcacacaacagaaccataggcaacaccaacacaggaagaaatagaagtcacctattgaaaactggaatggcccattcagaaagacaggagaattaggagagagtgagtgaaagaagccaagggtcaagaatgcagaagcaaaggaaggactaaaaagcctccacggacatcgataatcaagagattattaagatctttgctagaagagttcctttacctgtacttaactcccttaaaaagagaaaagtgatggaatgacttctgcaactgtagtcccagcaggaactgtgaagaccagctgccctgcaggatccagtttttcttgggaggttgtatctggtcataaggtaaacattctatatattctatgcctgctctagaattgaaagacttcagcagtattaaagcattttttaatcttatttgagctttcatattcttcaatggttcctttcgtaatacctgagttaataaaagtggtctgaaagagctcttacggtttctgatagaactatataggactaccttttaagattaaatataagcatctgtacgtaaatgtaaaaaaaaa

SEQ ID NO: 5732 - DNA, 10381 bp, Homo Sapiens
  NM_032875
gtttttgttttgggttgaagttgaggctgaggagagagccgagctagcgacgagcagtcgttgcggccgccggcgccgcgggaggtggtggaggcctagccggagccgagaggtctcttgttcccgtcccacggtcccggcgtcacccctccggcgcccagtccccgtcccggaactcccgggcctgtcctgggcccccggtctgtgcactccgctcgccgcagcgcccggcccgggccgcacccgccggccccatgaggagggacgtgaacggagtgaccaagagcaggtttgagatgttctcaaatagtgatgaagctgtaatcaataaaaaacttcccaaagaactcctgttacggatattttcttttctagatgttgttaccctgtgccgctgtgctcaggtctccagggcctggaatgttctggctctggatggcagtaactggcagcgaattgacctatttgatttccagagggatattgagggccgagtagtggagaatatttcaaaacgatgtgggggctttttacgaaagttaagtcttcgtggatgtcttggagtgggagacaatgcattaagaacctttgcacaaaactgcaggaacattgaagtactgaatctaaatgggtgtacaaagacaacagacgctacatgtactagccttagcaagttctgttccaaactcaggcaccttgacttggcttcctgtacatcaataacaaacatgtctctaaaagctctgagtgagggatgtccactgttggagcagttgaacatttcctggtgtgaccaagtaaccaaggatggcattcaagcactagtgaggggctgtgggggtctcaaggccttattcttaaaaggctgcacgcagctagaagatgaagctctcaagtacataggtgcacactgccctgaactggtgactttgaacttgcagacttgcttgcaaatcacagatgaaggtctcattactatatgcagagggtgccataagttacaatccctttgtgcctctggctgctccaacatcacagatgccatcctgaatgctctaggtcagaactgcccacggcttagaatattggaagtggcaagatgttctcaattaacagatgtgggctttaccactctagccaggaattgccatgaacttgaaaagatggacctggaagagtgtgttcagataacagatagcacattaatccaactttctatacactgtcctcgacttcaagtattgagtctgtctcactgtgagctgatcacagatgatggaattcgtcacctggggaatggggcctgcgcccatgaccagctggaggtgattgagctggacaactgcccactaatcacagatgcatccctggagcacttgaagagctgtcatagccttgagcggatagaactctatgactgccagcaaatcacacgggctggaatcaagagactcaggacccatttacccaatattaaagtccacgcctacttcgcacctgtcactccacccccatcagtagggggcagcagacagcgcttctgcagatgctgcatcatcctatgacaatggaggtggtcaaccttggcgaactgagtatttaatgacacttctagagctaccgtggagtctctccagtggaagcaaccccagtgttctgagcaagggttacaaagtgagggagggcagtgtccagatccccagagccacacatacatacacatacacacccttacccccatccactctagctttgtgaccatgggactgaagtttgtgatggcttttttatcaagtagattggtaaaatttaaccattcctgttgaggtgcccataagaaaatcataggccaagatagggaggggcattccagcaaaccccgtgttaatgctactgtggtttttaaatttttgtctaggggtttctttggggattttagaacagcatctgctgtcctccggggtcaagaaaagcatggaaagacaatatatgatgtacccagggaccagaaagaaaatttctttgcatcttagaaatggtagacattcattgtgactaaagagcttctatgcttccttgtttccatgccaacatgctgagcatgctcacaaagaaggctcgtccattcctcctgtgttttagtatttggcccagaggtttcctaaatggttgccttgaaatcactgtggtccaaatgtaattcttacacactcaaattatcactgtctgtagcacacttgtgcacctgtcttacattctctgttgctcccccccacactcttgctcagtctgtcacctgttcagtctgcttactcactcaattgttacccttttgctgttgtcgtgtttacagtttgcattttgaatgattagttgggattaccaaacattttttaaaaagatattatcaataaatatttttttaattctaaattttaccattaggggaccctgcctgaatctttgccaacctgcaaggaaactctaatgaaagcaagaaaagttatgagaagaaactgttttgatgaaaacagatgctaccttttggtttctattttatcttctgatatgtgataattcgcatggtatccccaatattccccctacatattcttccttctgtcagactccaccaactgtatcataaggaaagagagagatgtattattaggaaagagtgaaaatgataaatcacaaaacagagcctgaaagtccccaacacccaagttcagacattaatgattaatgttattatatatttactgaaatctaggagtgatcagtggcatctctgacctatgaggttgttttaacaggaatgccactagaggagctgtgtattctagccagtctgtttctctcttttcccccatttcagcctttcagggatacaagaatggctctataacagctggtcaattgtatgtcagtgttaatggattcatatctagtgttggcaccccaaagggccagaaccttcccataacctgtcagtcatctctcttttctgccccagtctttttttttttttttttttttttttaagacgggttctcactcttgcccagactggagtgcagtggtgcgatctcggctcaccgcaacctccacttcccaggctcaagcgattctcttgcctcagcctaccgagtagctgggattacaggcatgcaccactactgcctggctaatttttgtatttttagtagagatggggtttcacatgttggccagcctggtcttgaactcctgacctcaaatgatccacctgcctcagcctcccaaagtgctgggactacaggcatgagccaccatgcccggccctgttcagacttctgaatgaagtatgaatgtagccaggtgaagcattgaggcagctgaaagagaacactgagaggaagtaaggggtttagtgtctctgcttagcctgggcactagaactgagggaggaatttagtgtccaggactcaagagtccaagaagaagcaccctctgtcttcccaaaaaatcagaggataaaggaagtaaaatgagtttttaaagcataagaagaaaatttctaaaccccaagattagaaacccagtgtgatttttagtagggtgattttggcggggggtgtcctttgagacattaatgtgcaatccatcataatattaatcttctatatgatccagactattaaaaggcttgttttatttatttattttattttattttatttttttagagatggggtctcgctatcttgcccagcctggactcaaactcctgggctcaagccttcctcccacctcagcctcccaagtagctgggactacaggtgtgtgccactgtacccagcttaagaggtttgttttaatgctgcagttgctgattataccagcatatataagaataaagtctgatttatttatccattgatttagaaggcaattggatgaaagggtcttagaagtctatactatccattaatatttatcatattaaatttattttaaatcctgttttattgtgccgctttaaaaacgcagattacttgtttattcattcccctttccccttattctctttcagattaccttataaggaatatagtttttaacatgaaactcagtttcttgtctgtacccctacacataaaaatacatacgtgcatacacacatacttccagatgtggttaataatattcagatccctaggttactcaaacaaaactaaaggagagaactatttaggggccatctgctttaaagtttaaggtgttttgttgttgttttagtgcctgtacaaattgaccataaaacccagattgattagtgagtgtggatttgagttgcctaagttgaggctattaaggtacttctttacttaaaagataagtttaaaagactctattcatcagttcatgatgatcttggaaatgctgtttctctgctcaaaggatatacccacaggcaggtccatggggacttgctctggtgatctctgctattaaggcaaattccagcctgtttgtgccaagaacagagtcaagtgagagagaatgaagactcagagatgtgcagcactggcttgtatgttgtcaggcagaagccttgttcctttctcaagaaaacttcaggcctatcaagcttggaaggaaatacatttttttatgctgatttgcagcctacaccagctgatgaatatgctaggactttgagagaacacaaagcatggtaagttttggtcaggtggaaaggagcctgacatctgaacataatgcttcctctctcaacatctgggatacttttgaaaattcagtaaggcttaatgtaggaaaaattctttacaggaaaagctaattgatctgtttgtctaacctcatagccactccaaaatatgccttttataatggaaaaaaacagtgaacagagagaagagatttggggataagttagaaggtaccctcaaaactactgccgtaaacctacaggtgggcaaggaggaattactgtagtgtctctggagaaagttcttgaacatccaaatcatctcttttctaagcagtttttcccctaatctcataccttacatcttccagcatcatttgctacatcaatgtcttttcatcctcttcatcagccccattgagctgactccagcttatttttgcactgatttccaccatttccttcccacacccatcctttccctctatttaaagcctccatctcaccctcagtaatgctgctgatttactctcagatgtctcaagtctagcttcctttttgaatccttctcctactccaggggctgtcaaaggcagccttaaagttcagtgactgttaggtggctcaggccatttttcattgggtggtctttggtgtttgcatactgaatttgaattcagtttaaaagcaaactgttggatatgaggaagaaagggatatggccttagccctttttccaatatttggaatatgaaagcatattgtgctttgtgtaaaaaatgttttcttctcctattctgctcttgtctttactgaaggtaaaagtattccttaagtagcttttgcaaatttctagtctgatttccacattcattaagttgatttagcagacatgtaagtcagaagtttcacatatcccttgtatcaaacattttatagggaaacctagtaaatttatgatgcttcattttgggctttccagactatttgagttattcaagatagccataatgttttagtagcgacattcttttattacttctaattgccttgtaaaatgcattgttatggcccggcacggtgggtggatcacaaggtcaggagttcaagaacagcctggccaagatggtgaaatgctgtctctactgaaaatacaaaaattagccaggtgtggtggcaggtgcctgtaatcccagctactcgggaggctgaggcagagaattgcttgaacccgggaggtggaggttgcagtgagctgagatcgcaccactgcactccaccctgggcgacagagtgagactatctcaaaaaaaaagaaagaaagaaagaaaaaaatgcatcgttactagtttgatagcccactaatgccatgggggactaaacaaaatatgtgatgaaacctgtcttggtttgaagttgttagaaagtgtgagagtgtcactggaaagaagagagtggcttcctgcctgcttgtttagtcagcatgtccttaggtgactgtgttgttgggagaagagcactcatgggtcatgggtgacccttggccattttatgtttattgtgctgaaagtcacaggcggctcatgccagttgctaccagtgagaggaggggtttaaaggaaattgctctattttgccttattcctccttatgtgtatgatttaagggtaggcttttatcctggttgtatctcctggctgacagactttctcaatcatatgtttgagctctgaagcattttacaaaaagattgcctctctatctgcctgccaatcctagaatctttagccacctcaaacccaggcactgtgaattagccaagtcctgtttgagaagaaatgtaggatgtttggttggaattcttgagacagaacctctctccccattaatgatgttgtaccaaagaattctaaagcagtaaaaggataatggggaaaaatggagtcacagcctttcctcgcctatatttcttttttttttttttttttttgacatggagtctcgctctgtcacccaggttggagtgccatggcacaatctcagttcactgcaacctctgcctcctgggttcaagtgattcttctgtttcagcctcccaagaggccaggattacaggtgcccaccaccacgcccagctaatgtttgtatttttcatagagatggggttttgccatgttggccaggctagtctcgaacttctgacctcaagtggtccacctgccttggcctcccaaagtgctgggattacaggtgtaagccaccgcacctggccagtttctatcataaattttaaatgtaagattggaagatacagagagctgtataaaatcataccagtagggtataattagcccaggtagtttaggaataaaattgggttgtatccgagtgccctaacttgacattttgattctccagcaaagaacataggttactaggttactaaccttgccttctcacttgggataaactttttttttttttcttgttgcccaggctggagtgcaatagtgagatctcggctcaccgcaacctccgcctcttgggttcaagcgattctcctcccttagcctcccgagtagctggaattacagcctgtgccaccacgcccggcaaaatttgtatttttagtagagacggggtttcaccatgttggtcaggctggtttcaaactcccaacctcaggtgatctgcccacctcagcctcccaacatgctaggattacaggcgtgagccactgcgcccagcccaggataaacattctacctgcctgaaagtaccataagaggcaagtgagtttcttgcatgatgggcttctgcagcttccccctcaagtcacatctacctgttgtatttatttatttatttatttttgagacagagtctcgctctgtttcccaggctggagtgcagtggcgtgatctcggctcactgcaagctccacctcccaggttcacgccattctcctgcctcagcctcccaagtagctgggactacaggctcccgccaccacgcccggctaattttttgtatttttagtagagacggggtttcaccctgttagccaggatggtctcgatctcctgacctcatgatccacccgcctcggcctcccaaagtgctgggattacaggcgtgagccaccgcgcccggcccgttgtatctattttttttagacgcatcaattcagtgtctctgaagcctttgatcgttaggaaggtcagtacataacctcttaggtgaagctgagttgatctttggagcccaagagagttaattttcaggagaaaaagaattagggcaagctcccctgtgggatgttaagagaaagtccatatgcgcttcttccatctctgcctcttgtttttaaataagtgcttgtgaagttcagtttatagaggttgagtctcagtgcttcctcagccagggtggtttattgctgttttacaaagaaccatgaacaagcaaaatcctatcaatagtcctttctgttttatgttttatagtcttattttgaagaatcggcatggtaaaatgatagacaagtttcaaataaagcagataattagctctagaattggggtactttgcctcaggtacagcatctgtcttgaatacatagtgatggctgtgtcacacatgggtacatttactttcctctctgatcaactgcacccctttttactggcaaagagggctcctactttctacacacttaaccagtcaaacagataggttttggcaccaccgaaagaaccacaagtgcaccccagctgcatctgggcatggttttggtactaggactagagaagtgagcagtaaatgacagtccttaccctaggaagagatgggagaagagaggtgtccagacatatttaccttttctcttctgtcatgccccaagaaccaaggatcatctttgaagtgacgtcttttttgttaaattggaagaagaaaactttgcagccaggcgtggtggctcacgcctgtaatcccagcactttgggaggccgaggcgggcggatcacaaagtgtcaggagtttgagaacagcctggccaacatggtgaaaccccatctctactgaaaatacaaaatcccagctacttgggaggctgaggcaagagaatcacttgaacctgggaggcggatgttgcagtgagccgagatcacgccactgcactccagcctgggcaacggagtgagactccatctcacaaaaaagagaaaagaaaagaaaactttgcttcactaagtttctcttgccattatctcattaattcagatctgtacctcattgctgctcacacatatatgtttcttaccttagcctgaaccttctcaggccttgaagtcattattctactctttttttttcttttccttttttatggcactagagaatgaaaacctaaggtcttagaaaatcttaacttgaaaaagtctctaactggcatgatttgattacttttttcccctgtggacaaataattttctttcctatataatagatttttagtaagtgaaacctttgctgctgctttcctgggtttacattagttttttcctgcccttaagaataatttatctgtgcttctctgatgactgttaatttctaatagtgcaggaagggatgagcttttgatttcttctcactcccctcctcaccctacttccaaattacacactaacttctaacccttacagcctgttggcacatacacaagatccacgagaccatgctcctcagaagctacccatgtcctttctcaccatggtgtggctcttggagccctgagtatctgtgactacccactccaaaggttgactgtaagaggagagcggccttcttaattttgcatttcttaattttgtttttctccattcctgttttatgacttggccttcagatgcttcctactctggcctcctccttttttctcctaggaattgtttccaggtaacctaccatgtgcacttctcagctgctctgctcacctttgcccaccttcccgtgaccctgagagtacagatccgaataatgtggcctgtgcagagctcagagaactgtgaggactacccatgcctgtcagactctgctcagggacagagatggatgggtaaatggtgctgttggagacatttttatcttcataccaggctctgtttcatccctgcaccccgcacccccactcactcccctgagggggtaaaatgcagaggtggttgacctgaagggtctgattccctccttcccaagccttagggcctaccctggagtgctgcagtgtgtgagagctgctgcttgcttgtttctccactaggcctgctccaaatgcttagccaatctctggagccgacacagttgcctacggggtgacttagcaccaggttccattagctctccaagtgactgtttccacccagtacttttggcgcttgaggatggggggagggggattatttaaaataaataaaatccgaggtggcagtagaggattccttttgctttaaaaatctttggactaaaaaaaaaaaaaaaaagttttttatatataaatatataaagtaaattgttatgtaactattattgtttcttgtatgttctaattttgttttatgatgtaattaaagaaagtaagctgtgaagacttttcattttcctgtg

SEQ ID NO: 5733 - DNA, 1929 bp, Homo Sapiens
  NM_032885
ctggggacgggggccgagtagcgccttccccgggccccgtgaaccggctgcgggtcgcccttggggggcagcggccgcagccccccacctgggccctcggtccgccctcccggcgcgtccatgaactcagtgtcgccggccgccgcgcagtaccggagcagcagcccggaggacgcgcgccgccggcccgaggcccgcaggccgcggggtcccagaggcccagaccccaacggcctggggccttccggagccagcggccccgctcttggctctcccggggctggcccgagtgagccggacgaagtggacaagttcaaggccaagttcctgacagcctggaacaacgtcaagtacggttgggtggttaaaagccggaccagctttagcaagatctccagcatccacctctgtggccgccgctaccgtttcgagggcgagggtgacatacagcgtttccagcgggactttgtgtcccgcctgtggctcacataccgccgggacttcccgccccttcctgggggctgcctgacctcggactgtggctgggggtgcatgttacgcagcggccagatgatgctggcacagggccttctgctgcatttcctgcccagagactggacatgggccgagggcatgggcctgggcccccctgagctgtcagggtcagcctctcccagccggtaccatgggcctgcccgctggatgcccccacgctgggcccagggtgcccctgagctggagcaggaacgccggcaccggcagattgtgtcctggttcgccgaccacccccgggccccctttggcctacaccggctggtggagcttgggcagagctcaggcaagaaggcaggtgactggtatgggccatcgctagtggcacacatcctcaggaaagccgtggagagctgctccgacgtcacccgcctggtggtgtacgtttctcaggactgcacagtgtacaaggcggatgtggcacgcctggtggccaggccagaccccacagccgagtggaagtctgtggtcatcctggtgcccgtgcgactgggtggcgagactctcaaccccgtgtatgtgccctgcgtgaaggaactcctgcgttgcgagctgtgcctgggcatcatgggtgggaaaccgcgacactcactgtacttcattggctaccaagatgacttcctgctgtacctggaccctcactactgccagcccactgtggatgtcagccaggccgacttccccctggagtccttccactgcacctcgccccgcaagatggcctttgccaagatggacccaagctgtaccgtgggcttctatgctggagacaggaaggagtttgagacactctgctcagagctgaccagggtcctcagctcctcctcagccacagagcggtaccccatgttcaccctggccgagggccatgctcaggaccacagcctggacgacctctgctcccagctcgcccagcccacactccggctccctcgcacagggcggctcctcagggccaaacgccccagctctgaggactttgtgtttttataaagggaggggatgaggggaaagatacaacactatttatttttttatttatgtcatgtcgggtgtgggatcttgagctctggcagtgatgatggtacttcctgttgtcagcccctcaagcccagctgcaaccagtctggggccattcagccagggacagagcccacagagcccatacacctgtctcccaccagcggggccctcctggcagggtagggaaggaggaccccgggcacccccctcagggcctgactcacgtactgtagtttgcactggacgcccgggccctccctgtcccaaagcccccttgggggaactgtggctgctgggggccaataaagctgtgtaacttgaaaaaaaaaaaaaaaaaaaaaaaaaaaaaaaaaa

SEQ ID NO: 5734 - DNA, 1781 bp, Homo Sapiens
  NM_032889
gtcacgtgatgaagccatcatggcggcggccagaggcctgcccggctcccggaagcaggctgtgaggggcgggagcgctgctggaacccgagccggagccggagccacagcggggagggtggcctggcggcctggagccggacgtgtccggggcgtccccgcagaccggggcagcaggtcgtccgggggcccaccatgctggtgactgcctaccttgcttttgtaggcctcctggcctcctgcctggggctggaactgtcaagatgccgggctaaaccccctggaagggcctgcagcaatccctccttccttcggtttcaactggacttctatcaggtctacttcctggccctggcagctgattggcttcaggccccctacctctataaactctaccagcattactacttcctggaaggtcaaattgccatcctctatgtctgtggccttgcctctacagtcctctttggcctagtggcctcctcccttgtggattggctgggtcgcaagaattcttgtgtcctcttctccctgacttactcactatgctgcttaaccaaactctctcaagactactttgtgctgctagtggggcgagcacttggtgggctgtccacagccctgctcttctcagccttcgaggcctggtatatccatgagcacgtggaacggcatgacttccctgctgagtggatcccagctacctttgctcgagctgccttctggaaccatgtgctggctgtagtggcaggtgtggcagctgaggctgtagccagctggatagggctggggcctgtagcgccctttgtggctgccatccctctcctggctctggcaggggccttggcccttcgaaactggggggagaactatgaccggcagcgtgccttctcaaggacctgtgctggaggcctgcgctgcctcctgtcggaccgccgcgtgctgctgttgggcaccatacaagctctatttgagagtgtcatcttcatctttgtcttcctctggacacctgtgctggacccacacggggcccctctgggcattatcttctccagcttcatggcagccagcctgcttggctcttccctgtaccgtatcgccacctccaagaggtaccaccttcagcccatgcacctgctgtcccttgctgtgctcatcgtcgtcttctctctcttcatgttgactttctctaccagcccaggccaggagagtccggtggagtccttcatagcctttctacttattgagttggcttgtggattatactttcccagcatgagcttcctacggagaaaggtgatccctgagacagagcaggctggtgtactcaactggttccgggtacctctgcactcactggcttgcctagggctccttgtcctccatgacagtgatcgaaaaacaggcactcggaatatgttcagcatttgctctgctgtcatggtgatggctctgctggcagtggtgggactcttcaccgtggtaaggcatgatgctgagctgcgggtaccttcacctactgaggagccctatgcccctgagctgtaaccccactccaggacaagatagctgggacagactcttgaattccagctatccgggattgtacagatctctctgtgactgactttgtgactgtcctgtggtttctcctgccattgctttgtgtttgggaggacatgatgggggtgatggactggaaagaaggtgccaaaagttccctctgtgttactcccatttagaaaataaacacttttaaatgatcaaaaaaaaaaaaaaaa

SEQ ID NO: 5735 - DNA, 4743 bp, Homo Sapiens
  NM_032890
gctctgtggagctgcgcctgccaactcattgctttctgctgtgctgtgatcctgcagtcagttgccgctgttgctactgcaatcatttgcaccaaactgagccagagaagttccctcttttaacataaagagtcaagaaattggagcatggctatgagcaatggaaacaatgattttgtggttctgagcaacagcagcatcgcaaccagtgctgctaacccgagtcccctcaccccctgtgatggagaccatgcagcccagcagctcacacccaaagaagcaacaagaacaaaagtgagtccaaatggatgcctgcaacttaatggcacggtcaaatcatcctttctgcctttagacaaccaaagaatgcctcagatgttaccccaatgctgccatccttgcccataccatcaccctttgactagccatagcagtcaccaagagtgccatcccgaggctggccctgcagcaccctctgctttggcctcgtgttgcatgcagccacactccgagtattctgcatctctttgtccaaatcattcacctgtgtatcagactacgtgctgtcttcagccctctccatccttctgcctgcatcatccgtggcctgaccattttcagcatcagcctgtgcaacagcacatagccaacataagaccatccagacctttcaagttgccaaaaagttatgcagccctgatagccgactggccggtggtggtcttgggcatgtgcaccatgttcatcgtagtctgtgccttggttggagtattagtgccagagctccctgacttctctgatccattgctgggttttgaaccaagaggaacagcaataggccagagattggtcacatggaataatatggtgaaaaatacaggatacaaagcaacattagcaaattatccctttaaatatgcagatgaacaagccaaaagccatcgggatgatagatggtcagatgatcattatgaaagagagaaaagagaagttgactggaacttccacaaggacagctttttctgcgacgttccaagtgaccgatattccagagtggtatttacttcatctggaggggagacattatggaatttacctgcaattaaatcaatgtgcaatgtagataattccaggatcagatctcatccccagtttggtgatctctgccagaggaccactgctgcctcctgctgccccagctggacactgggaaactacatcgccattctgaacaatagatcgtcctgtcagaaaatagttgagcgagacgtttctcataccttgaagctgcttcggacttgtgccaaacactaccaaaatggcactctggggccagactgctgggacatggcagccagaagaaaggaccagctcaagtgcaccaatgtgccacgcaaatgtaccaagtacaatgctgtgtaccagatcctccattacttggtggacaaagactttatgaccccaaagacggctgactatgccacgccagctttaaaatacagcatgctcttctctcccacagagaaaggggagagcatgatgaacatttacttggacaactttgaaaactggaactcttctgacggcgtgactaccatcaccgggattgagtttggtatcaaacacagtttgtttcaggattatcttctaatggatactgtgtatcctgccatagccattgtgattgtccttttagttatgtgtgtctacaccaagtccatgtttatcactctgatgacaatgtttgcaataatcagttctttgattgtttcctattttctctatcgtgtagtatttcacttcgaattttttccttttatgaacctcactgccctcattattttggttggaattggagcagatgatgcttttgtcctgtgtgatgtttggaactacacaaaatttgataagcctcatgccgaaacctcagaaacagtaagcatcaccttgcagcacgctgccctctccatgttcgtcaccagttttaccactgctgctgccttttatgctaactatgttagcaacattacagcaatccgatgctttggggtttatgcggggacagctatattggtgaattacgttttgatggtcacatggcttccagcagttgttgtgctgcatgagcggtatcttcttaatatattcacttgcttcaaaaagccccagcagcaaatatatgataacaaaagctgctggacagtggcttgccagaagtgccacaaagtactctttgccatttcagaagcatctcgaatttttttcgaaaaagtattgccatgcattgtcattaagtttcgctacctttggctgttttggttccttgccttaactgtaggtggggcctacattgtatgtataaatccaaagatgaaactgccctcactggagttatccgagttccaggtgttccggtcgtcccatccttttgagcgttatgatgctgaatacaaaaagcttttcatgtttgaacgtgttcaccatggcgaggagctccacatgcccatcacagtaatctggggcgtgtccccagaagacaatggcaacccactaaatcccaagagtaaagggaagttgacattagatagcagttttaacatcgccagcccagcttcccaggcctggattttgcacttctgtcaaaaactgagaaaccaaacattcttttaccagactgatgaacaggacttcaccagctgcttcattgagacattcaaacagtggatggaaaaccaggactgtgatgagcctgccctgtacccatgctgcagccactggagcttcccctacaagcaagagatttttgaactgtgcatcaagagagctatcatggagctggaaaggagtacagggtaccatttggatagcaaaaccccagggccgaggtttgatatcaatgatactatcagggcagtggtgttagagttccagagtacctacctcttcacactggcttatgaaaagatgcatcagttttataaagaggtggactcgtggatatccagtgagctgagttcggcccctgaaggcctcagcaatggttggtttgtcagcaatctggagttctatgacctccaggatagcctctccgatggcaccctcattgccatggggctgtcagttgctgttgcatttagcgtgatgctgctgacaacttggaacatcatcataagcctttatgccatcatttcaattgctggaacgatatttgtcactgttggttctcttgtcctgctgggctgggagctcaatgtgttggaatctgtcaccatttcggttgccgtcggcttgtctgtagactttgccgtccattatggggttgcctaccgcttggctccagatcccgaccgagaaggcaaagtgatcttctctctgagtcgcgtgggctctgcgatggccatggctgccctgaccaccttcgtggcaggggccatgatgatgccctccacagttctagcttacacccagctgggcaccttcatgatgctcatcatgtgtatcagttgggctttcgccaccttctttttccagtgcatgtgccggtgccttggaccacagggtacctgtggtcagattcctttacctaaaaaactacagtgcagtgccttttcccatgccttgtctacaagtcccagtgacaagggacaaagcaaaacacataccataaatgcttatcatttagatcccaggggcccaaaatctgaactggagcatgagttttatgaattagaacctctggcttcccacagctgcactgcccctgagaagaccacttatgaagagacccacatctgctctgaatttttcaacagccaagcaaagaatttagggatgcctgtgcatgcagcttacaacagtgaactcagcaaaagcactgaaagtgacgctggctctgccttgttacagccccctcttgaacagcataccgtgtgtcacttcttctctctgaatcagagatgtagctgcccagatgcctacaaacacttgaactatggcccacactcttgccagcagatgggggactgcttgtgccaccagtgctctcctaccactagcagctttgtccagatccaaaacggcgtggcacctctgaaggccacacaccaagctgtcgagggctttgtgcaccccatcacgcacatccaccactgtccctgcctgcagggcagagtaaagccagccggaatgcagaattctctgcctaggaattttttcctccacccagtgcagcacattcaggcccaagaaaaaattggcaagaccaatgtacacagtcttcagaggagcatagaagagcatcttccaaagatggcagagccatcgtcatttgtctgcagaagcactggatcgttactcaaaacgtgttgcgaccccgagaataaacaaagggaactctgtaaaaatagagacgtgagcaatctggagagcagtggagggactgaaaacaaggcaggagggaaagtggagctgagcttgtcacagacggatgcaagtgtgaactcagaacatttcaatcagaatgaaccaaaagtcctatttaatcatttaatgggggaggctggttgtaggtcttgcccaaataattcacaaagttgtggcagaattgtgagagtgaagtgcaattctgtggactgtcaaatgccaaacatggaagccaatgtgcctgctgtattaacacactcggaactttctggtgaaagtttgttaataaaaacactataataaatgcagcattcaattcag

SEQ ID NO: 5736 - DNA, 2326 bp, Homo Sapiens
  NM_032902
gtgaaaagaggactctcaggggctcacaggggctctcactgctggttggccctgccctcccttccccctcagcagggtgcccggaagctggaaccttgttatctgggtaattagtttcagaccctgcactgaggccggccaggtctcggggctgcctcccataggttgtgcaccctgaccccgagagggaggcgaggcgctgcttgtcgacagctagaggctggcctggggagcaggtttggggtgccctcccacactgccctccctgccccggcccatgccccccagggctgcctgggcctggttattgtgtggggcctcctgacccagccaagggcacgaagctctgggaaggggatgcccccgagggtgccagtccagctagctgccccacccctcaggcccagcctggcccccaagctccccactctggtgccccgagcagccctgtgggcaagcagccgccgccatggccgagcacctggagctgctggcagagatgcccatggtgggcaggatgagcacacaggagcggctgaagcatgcccagaagcggcgcgcccagcaggtgaagatgtgggcccaggctgagaaggaggcccagggcaagaagggtcctggggagcgtccccggaaggaggcagccagccaagggctcctgaagcaggtcctcttccctcccagtgttgtccttctggaggccgctgcccgaaatgacctggaagaagtccgccagttccttgggagtggggtcagccctgacttggccaacgaggacggcctgacggccctgcaccagtgctgcattgatgatttccgagagatggtgcagcagctcctggaggctggggccaacatcaatgcctgtgacagtgagtgctggacgcctctgcatgctgcggccacctgcggccacctgcacctggtggagctgctcatcgccagtggcgccaatctcctggcggtcaacaccgacgggaacatgccctatgacctgtgtgatgatgagcagacgctggactgcctggagactgccatggccgaccgtggcatcacccaggacagcatcgaggccgcccgggccgtgccagaactgcgcatgctggacgacatccggagccggctgcaggccggggcagacctccatgcccccctggaccacggggccacgctgctgcacgtcgcagccgccaacgggttcagcgaggcggctgccctgctgctggaacaccgagccagcctgagcgctaaggaccaagacggctgggagccgctgcacgccgcggcctactggggccaggtgcccctggtggagctgctcgtggcgcacggggccgacctgaacgcaaagtccctgatggacgagacgccccttgatgtgtgcggggacgaggaggtgcgggccaagctgctggagctgaagcacaagcacgacgccctcctgcgcgcccagagccgccagcgctccttgctgcgccgccgcacctccagcgccggcagccgcgggaaggtggtgaggcgggtgagcctaacccagcgcaccgacctgtaccgcaagcagcacgcccaggaggccatcgtgtggcaacagccgccgcccaccagcccggagccgcccgaggacaacgatgaccgccagacaggcgcagagctcaggccgccgcccccggaggaggacaaccccgaagtggtcaggccgcacaatggccgagtagggggctccccagtgcggcatctatactccaagcgactagaccggagtgtctcctaccagctgagccccctggacagcaccaccccccacaccctggtccacgacaaggcccaccacaccctggctgacctgaagcgccagcgagctgctgccaagctgcagcgacccccacctgaggggcccgagagccctgagacagctgagcctggcctgcctggtgacacggtgaccccccagcctgactgtggcttcagggcaggcggggacccacccctgctcaagctcacagccccggcggtggaggctcccgtggagaggaggccgtgctgcctgctcatgtgaggctgttgctcagcatgcaggggccctgtcgcgggcacagcccaaggctgcctccccacggtgcgtgccctggtgctgcgggtgcagcacggaaaccccggcttctactgtacaggacactggcccctctcaggtcagaagacatgcctggagggatgtctggctgcaaagactatttttatcctgcaactcttgataaagggctgttttgccatggaaaaaaaaaaaaaaaaaaaaaaaaaaaaaaaaaaaaaaaaaaaaaaaaaaaaa

SEQ ID NO: 5737 - DNA, 3342 bp, Homo Sapiens
  NM_032905
gcaggcgcaggcgcaggcggggcgcaggcgcgggcgcgctctcccggcagcccgcgctccctgaccccgcgccgccgagcgccctgaggactcagcgaagggtgggcgccgccgaggcctcctgccgctggcgggtttccgcggagtgccgcccggctccgctctgccgccggcgcggctcatgggcagagtcggccgggcgggccggcattaaactgaagaaaagatgtccctgtacgatgacctaggagtggagaccagtgactcaaaaacagaaggctggtccaaaaacttcaaacttctgcagtctcagcttcaggtgaagaaggcagctctcactcaggcaaagagccaaaggacgaaacaaagtacagtcctcgccccagtcattgacctgaagcgaggtggctcctcagatgaccggcaaattgtggacactccaccgcatgtagcagctgggctgaaggatcctgttcccagtgggttttctgcaggggaagttctgattcccttagctgacgaatatgaccctatgtttcctaatgattatgagaaagtagtgaagcgccaaagagaggaacgacagagacagcgggagctggaaagacaaaaggaaatagaagaaagggaaaaaaggcgtaaagacagacatgaagcaagtgggtttgcaaggagaccagatccagattctgatgaagatgaagattatgagcgagagaggaggaaaagaagtatgggcggagctgccattgccccacccacttctctggtagagaaagacaaagagttaccccgagattttccttatgaagaggactcaagacctcgatcacagtcttccaaagcagccattcctcccccagtgtacgaggaacaagacagaccgagatctccaaccggacctagcaactccttcctcgctaacatggggggcacggtggcgcacaagatcatgcagaagtacggcttccgggagggccagggtctggggaagcatgagcagggcctgagcactgccttgtcagtggagaagaccagcaagcgtggcggcaagatcatcgtgggcgacgccacagagaaagatgcatccaagaagtcagattcaaatccgctgactgaaatacttaagtgtcctactaaagtggtcttactaaggaacatggttggtgcgggagaggtggatgaagacttggaagttgaaaccaaggaagaatgtgaaaaatatggcaaagttggaaaatgtgtgatatttgaaattcctggtgcccctgatgatgaagcagtacggatatttttagaatttgagagagttgaatcagcaattaaagcggttgttgacttgaatgggaggtattttggtggacgggtggtaaaagcatgtttctacaatttggacaaattcagggtcttggatttggcagaacaagtttgattttaagaactagagcacgagtcatctccggtgatccttaaatgaactgcaggctgagaaaagaaggaaaaaggtcacagcctccatggctgttgcataccaagactcttggaaggacttctaagatatatgttgattgatcccttttttattttgtggttttttaatatagtataaaaatccttttaaaaaaacaacaatctgtgtgcctctctggttgtttctcttttttattattactcctgagttgatgacattttttgttagatttcatggtaattctcaagtgcttcaatgatgcagcatttcttgcactaaaaaaaaaaaaaaaaaaaaaactagaaagttttgggacatggggttatattaaattattctttgtttttctttttcttttaataaagcctgcaagttactaaattgtagtttcataaattctgtagtaaagtatcatcttggcagtgtgccaaaggtgaaaatgatgctttctctaacagagaaattcttagtgactccagtcgtagaaaaacgtctttacaacctgaataagattgaagaattgtgaacataccatggcctattggatgaatcatttgccgtaggctaaatcagactgtagggtttgtgatggatttatggagtatgtgggtatagaaatcatgaatctagcatttgttttcagagattcaagcatagtcttaagggtagatcagaaatgacaaatgaattcaaaacctagcaggtgcattgtaaatgtgtgcccagttatgttttggaaatggcagttccttggggtcatgtttctactggcaaaatttgcaatagtgttctattgtatgtaattttaaaatttataagattatccacgttggccaagtaaactgtactgccaatagaattctggaattgtgagaaattgtatcattgaagttcagtaggatgtgtggcttaaaaatttatcaggaccacaaaaaagaaaacaaaaatatttggtactgaggttcattgccagggcaggaggtatttccagaaaatactcatgcctgtgttctgttccttgctttcccaaatactgcatgtgactttcctaagcggcagctgaaagactcgagcccgtgctgtctcctttggttattatgacatgaaagtgtatcaagaactcagcatttctttgcatccatggacttggtttggagacataaggaatattctgaccctttttaaaaaaggattttctcatgtttttatttaacataaataaaagaataacattttatcttttgtggtattattttattgaataaaattgagttttatgataaaagtgcacctgttctgtaaagtaagttggggttaaggaatgtgaggtaaattacataattgaacattgtggaagacagaatcaaaagcagccctggaacttcagttatctatggaattaggcataccattcctcaagtggaaaccatgtttgtgcttacaagtaccggagtgtgcttgtttaattttagaaactaatggttccaacccacctttcatgcatgcatttattgttgttatgctttgtaaaacattgtttgcacctaaatgggtggcttttcctaacattctcatggtcagcaaccagagagttgcaaccaactcatactacttgatttccgttcgcatgaggacagcttggtgtgtgcctttctccccagtcttttatttttaaaataactgtgttaatcagttagtgctttatttataatgaatttctgatagtcgaataatttctaaatctcctgcaagttagtacttgagaaatttgaaattaattttcaatattaacatttaagctaatataaaaattttaaatttcaataaaaattaaaaattatgtaagctacaatgtaactggcaaaaaaaaa

SEQ ID NO: 5738 - DNA, 2837 bp, Homo Sapiens
  NM_032924
aaacgagggggaacttccgttctttgttctgtccccggtgtgtgggtctgtgacagggtccaacagggcctggtccgtgtccggtcccccaaatctgtcgtccctgcccccaggcattggcatcaacaaaagtcagaattcccgggaacttgaacagaggctgctaaattcccagtaattgctcctttggccttctagggactgacttcaaagaaggaaggaaagaatcagtgcttcctcattctcttttaaaacccgcttcccgctgagtctgcacccaggagaccagagagcaccttgcccttccatggaaactcaggctgatctcgtatctcaggaacctcaggccctgcttgacagtgctcttccttcaaaagttcctgccttttccgacaaggacagcctgggggatgagatgttggcggctgcgctcctaaaggccaagtcccaggagctggtaacctttgaggatgtagctgtgtacttcatccggaaggagtggaagcgtttggaacctgctcagagggacctctatagagatgtgatgctggagaattacgggaatgtgttctcactggatcgtgagaccaggactgaaaatgatcaagaaatttctgaagacacaagatcacatggggtcctactgggaagatttcaaaaggatatttctcagggtctcaagtttaaagaagcctatgaacgagaagtcagtctgaaaaggccgctggggaactcccctggagaaagactgaacaggaaaatgccagattttggtcaagtgacagttgaggagaagctaacccccaggggagagagaagcgagaaatataatgattttgggaacagcttcactgtgaattccaaccttatctcacatcagagactccccgtgggagacagaccccataagtgtgatgaatgtagcaagagctttaatcgaacttcagaccttattcaacatcagagaatccacactggggaaaagccctatgaatgtaatgagtgtgggaaggccttcagccagagctcacaccttattcagcatcagagaatccacactggggaaaaaccttatgaatgtagtgattgtgggaaaaccttcagctgtagctctgccctcattctgcatcggaggatccacacgggggagaaaccctatgaatgtaatgagtgtgggaagaccttcagctggagctccaccctcacccaccatcagagaatccacactggtgagaaaccctacgcctgcaatgaatgtgggaaggccttcagcaggagctcaacccttattcaccatcagagaatccacactggagaaaaaccctatgaatgtaatgaatgtgggaaagccttcagccagagctcacacctctatcagcaccagagaatccacactggagagaagccctacgaatgtatggaatgtggaggaaagtttacctacagttcaggccttattcagcatcaaagaatccacaccggggagaacccctatgaatgtagtgagtgtgggaaagccttcaggtacagctcggctcttgttcgccatcagagaattcacactggagagaagcctttgaatgggatcggcatgagcaaaagctccctcagagttacgaccgagttaaatatcagagagtccacgtgaaagagccacacacccattttcctcactttccctgagtctcaagagctcttgccttaccctataaatctcaacagcttaggatgtgtccctttcaactcagacttttcattttagagaatggggcagatggggcaaatcgttgaattttcccagaaatcacaccagccttagaaagcgtcaaggcaagtggatggcgtgctgggaatagaaagcagctctgggaccagttaccccatttaggaaaggagtttgcactaaactgtttttctcacagcagaggaacctttccaaggtggggatggaagcacagtcgggacagaattcgatggattcctttagttggagtccgcgtagtcagcacagacagcagtggaaaggacgctctgggtcctgttatttgctagggagggtaaagggagactatttcaaagctactgttcctagtccagctttaagtttcggtaagaaacatgctgttttgtttcatgatttcgttaattatggaaatttggcattgagggattattttattgagggtagaagagattccagaatcatcatctgtgatgatggtgtcctttagggctcttggagcagccagaccatgtttccaagagaaacctggtgatattgccagcagaccccctgccatcccccccagttgtcctggggctgaatgggcaaatctgtccaaacagctagtaaccggctgtgagggagagggtcagaagcacttagcgttggcctctgattgctgtcctctcttgtcctcttcccactccaatgatgaaaatgattttctctaaatgcctgggtaaggatgctttcaaggagctcacttggcctgcttgccctgccctctcacctctgacacccagccccaggagccagaccactcctgcctccacctctgactcttcagcagctgaagattaatgcagagaaagagcaaagcccaaaagggagaaaaaaaaaacaaaaaaacaaaaaaacgaagcccagagaaggcaggctgtgcctgagcctggtagcagagctcgttgctgggtgaggatggcactccccgagttttcccaaccgacgggatgaccttccattgtgttttcccaaccctgctcatcctgtagcataaatgaagtgcactattaaacagaatagtttttcagaagagaaaaaaaaaaaaaaaaaa

SEQ ID NO: 5739 - DNA, 1142 bp, Homo Sapiens
  NM_032926
gtgggcaccagcccccgcgcccgcccgcccgccctgcggtccggtcctggcgcccgcgcagaaccagctgtctgagctgcccgggcagcgggggagcagcgagcgggcttccgcgagccggagaaggcacaggcctgtcccgggtcccggcaggtctgcgcgtctgttcccagcgctctgcgaggcctaaaaaggaggagcaacctgtccagaatccctgcaggacaggaaaaggaggggaaatctcgacatggaaaaaccctacaataaaaatgaaggaaacctggaaaacgagggaaagccagaagatgaagtagagcctgatgatgaaggaaagtcagacgaggaagaaaagccagacgtggaggggaagacagaatgcgagggaaagagagaggatgagggagagccaggtgatgagggacaactggaagatgagggaagccaggaaaagcagggcaggtccgaaggtgagggcaagccacaaggcgagggcaagccagcctcccaggcaaagccagagagccagccgcgggccgccgaaaagcgcccggctgaagattatgtgccccggaaagcaaaaagaaaaacggacagggggacggacgattcccccaaggactctcaggaggacttacaggaaaggcatctgagcagtgaggagatgatgagagaatgtggagatgtgtcaagggctcaagaggagctaaggaaaaaacagaaaatgggtggttttcattggatgcaaagagatgtacaggatccattcgccccaaggggacaacggggtgtcaggggagtgaggggtggaggtaggggccagaggggcttacacgatatcccatacctttaatgcctttggccttccattctgatttctctgatgagaatattgctggccctgctttccctggtaggtatttgccaggcccaatgctttaaccttaagctgatactttgctttagatgtcagtctcgttaccagcagccttttgacccaactacggcgctctatattttagtagaggattttcacccatgtgcatggaaaagatgttcatggtacattgtaaaaaaataaaattaaaattaaaaaaagtttgcagaaccgcaaaaaaaaaaaaaaaaaaaaaaaaaaaaaa

SEQ ID NO: 5740 - DNA, 875 bp, Homo Sapiens
  NM_032928
cttccgcctgcgcctgcgcaggcccgctccccgagccctgccaaccatggtgaacttgggtctgtcccgggtggacgacgccgtggctgccaagcacccgggactcggggagtatgccgcatgccagtcacacgccttcatgaagggcgttttcaccttcgtcacaggcaccggcatggcctttggcttgcagatgttcattcagaggaagtttccataccctttgcagtggagcctcctagtggccgtggttgcaggctctgtggtcagctacggggtgacgagagtggagtcggagaaatgcaacaacctctggctcttcctggagaccgggcagctccccaaagacaggagcacagatcagagaagctaggagagctccagcaggggcacagaggattgggggcaggaggagtctggaacacagccttcatgccccctgaccccaggccgaccctccccacaccctagggtaccccagtcgtatcctctgtccgcatgtgtggccaggcctgacaaacacctgcagatggctgctgccccaacctgggacctgcccaggaggttggagcagaaagggctctccctggggtggtgtttctcctctagggtattgggatgcatgttctgcactgccagcagagagggtgtgtctgggggccaccacctatgggacacggggtcgaaggggcctgtacactctgtcatttcctttctagcccctgcatctccaacaagtccaaggtgacagctggtgctaggggcgtggggttaataaatggcttatccttctctccacccaagtttccacctgaccaggtgaaaaacaaatcagaagggtaagatgatgacaggtcaaaaaaaaaaaaaaaaaa

SEQ ID NO: 5741 - DNA, 8665 bp, Homo Sapiens
  NM_032932
ccttcccctccccactcttctccttccctcccctcccctcccttcccctccggagcggctggggctgcggcgccgctgctgacacggatcggccgcggccgccaccgggcggaggctgcgcggcgcagacccagacgggcggccccggagggcgcgcggcgatggcggcggcgggcaggcggcgggcgcggcgggcgaggggtccgggctgagctgcgggccggcccggatggcgggcggcgcgggctggtcgggcgcccccgcggctctgctgcgctccgtgcgccgcctgcgcgaggtgttcgaggtgtgcggccgcgaccccgacggcttcctgcgcgtggagcgcgtcgcggcgctcggactgcgcttcggccagggcgaggaggtggaaaaacttgtgaaatatttggatcccaacgacctggggagaatcaacttcaaggacttttgccggggggtgttcgccatgaaagggtgcgaggagctgctgaaggatgtgctgtcggtggagagcgcggggacgctgccgtgcgcgccagagatcccagactgcgtggagcagggcagcgaggtcacaggccccacctttgctgatggcgagctcatccccagggaacccggcttttttcccgaggacgaggaggaggctatgacgctggcgccacctgagggcccccaggagttgtacacagacagccccatggagagcactcagagcctggaggggtctgtcgggagtcctgccgagaaggacgggggacttgggggcctgtttctgccagaagacaagtccctggtccacactccatccatgacgacctcagacctttctacacactccaccacctcgctcatcagcaatgaggagcagtttgaagactatggggagggtgacgatgtggactgtgcccccagcagcccttgccccgatgatgagaccaggaccaacgtctactcggacctggggtcttcggtgtcttccagtgcggggcagacgcctaggaaaatgcggcacgtgtacaacagcgaattgctagatgtttactgctctcaatgctgcaagaaaatcaacctgctcaatgacttggaagcccgactgaaaaacctgaaggccaacagccccaaccgaaagatctccagcacggcctttggacggcagctcatgcacagcagcaacttcagcagcagcaatggcagcaccgaagacctgttccgggacagcattgactcttgcgacaatgacatcacagagaaggtaagcttcctggaaaagaaggtgacagagctggagaatgacagcctgaccaatggggacctgaagagcaagctgaagcaagagaacacacagctggtgcacagggtgcatgagctggaggagatggtgaaggatcaggagaccacggccgagcaggctctggaggaggaggcgcggcgccaccgcgaggcctacggcaagctggagagggagaaggctaccgaggtggagctgctcaatgccagggtgcagcagttggaggaagaaaatacagagcttagaacaacagtgactcggctcaagtctcaaacagagaaactggatgaggagcggcagcgcatgtctgaccgtctggaggacaccagcctgcggctcaaagatgagatggacctgtacaagcgcatgatggacaagctgcgacagaaccgccttgagttccagaaggagcgggaggcgacgcaggagctcatcgaggacttgcggaaggagctggagcacctgcagatgtacaagctggactgcgagcggccaggcaggggccgcagtgcctcctctggcctaggcgagttcaatgccagggcccgcgaggtggagctcgagcacgaggtcaagcggctcaagcaggagaattataagctgcgggatcagaacgacgacttgaatgggcagattttgagcctcagcctctacgaagcaaaaaacctctttgctgcccagactaaagcccagtctctggctgcggagatagacaccgcctcgcgcgatgagctaatggaagccctgaaggagcaggaggagatcaacttccggctgaggcagtacatggacaagattatcctcgccatcctggaccacaatccctccatcctcgagatcaaacactaaggcacggggctggctgcagagcagccttaggaccctgggaccaagggcagaccctgcccaaggatgcaggcctaagccgggcctcacactcacactgtaaatgtctctctggccaccatgcgttacgtgtacccgtgtatatgtggggaggctgtgcacacgagcgaggggtgagtggccgtggctgtgggcagcatccacacggttagccgtgcatgcactttgtggcccctttgcaaggggcagagggtactggaagtgggaggaggcaaggtctgctatcaggagttactgtaaaaacaagaactggaagctcgtgtttccggtactgggtaaaatgattctacctctggggataaggattcacattcgctctagtacgatgggctctttcaccccactcctagtccccttgggagtgggagcaaaattgtgatctttcctaggagtttgaatgccccatatttgtgtcctcgccagctctttggccacctttcaagccccagtgttcaagctcagagaggatgaaggggcatctggagggtccatgagatggggccctcaccaaatgccttggccaccggccagcagccctctgtgatgtgtgtgcagagtgaacagaggactcaggtttcatagcagctagtgcggggcatcctcatcctgtacctatagagttcgtgcactcccccatccatgctacctacctccccgtttctgtttcagttttaagacaatgaagcagcattcactgcgtcattgtaacatgaagggataaaaatgaaggagaaggagggtttgggatgggtgtctaaggcaggagttgacatcgggcaaccaaagaaatgagttttggggaggaacacaactcccatcccagtcagtttccttcccatggctgcatcttaagatggatgcacggagaaaccgtctgcctggctccctgtcttcattctccacgcagcctggtgatggcaggcctgggtttggatttcagaatcctagctccgggctccactcgtgtggcagcaagactgcttcgttccagcgtttagaaacacacctgtatttgattctcagccaggggagcactcgctgcactggtgggaggcggttgggaaagttgcaggaaaaccttagtcttccatccttctgacccatggtggaaattcacaccatggatttttaatggatctttgttctaggcagctgggaatagacatggtacttaccttagagttttccaatttatctcaattttatatggcttgtgattcattttcttaatccaaatatatataaacgtgtgtggtcttattcttccccctgcagtttcttgctttcttcagcacatcttatagtatgagaaggaaggtttgggcatgttgggaagggcggtggagggggagttgcagaaagagagggcagtgagggtgaggagaggggatctggggacttgggtgtgacacctgcttgacagaggcagggctgtggccaggaccaaccttcaattccattccaatcagcctttgcatttgttggatctcgtggcttctttttaatcttttgttggggattagtttcatgctgcacataatggggttgcactggtctgacccaggactttggagccacccacactgggaagactaggctaggcagtcggtcttctaggagtttctcagccccttaggacgcgggtctccttgggctcccccaagggttctgcgaagaggcagtggaagaaggcatgaggagagggtctcttgagaatttgccaataggaaggagtggccacggctgaaaggaacaagacagatcctgacatagctttggcctgggtgttaggtcagaaggagtactggtgcgtgggggccttaccccagggttgagtattttatctgtaaaatgttatctgccctttggctgcattggaatttcagagaaggctgcagaggcctgggttacacagcctgagtcacaacgtgggaaggaatctctgccacgggaaaggtgggcggaagcagctggcagcctggggcgtgcttcaggctcctccctctaaggggcgccatgggaacaggctccggagggagccggcgtctgaaaggcccccgggacctgctgcagtgccagaggggcctctggagcaggcctggcttttaaatggggggctgaattccagctcacacacacctcaagtccaaccttactttcttcagccagaatacatttcttgtaaaacctggcttgttgcttggcttttaaagatggtgtatgtttgtaaaaatattcttctgggctcaaaagctagcttgagggggcagatgccccaggtgtcccagctccacagcccctggcagatcccagaccccttggtggcaggtcccagagcctaggtggtaggagcttgatctttgtttctgcccttacccctcagtagtggggctgcgaggtagtagacaggatgcccagttaagtttgaatttcagatagaaaataattttagaataaatatgttctatctaatacatgggacagatgttatttttagagataggatcttgctctgttgcccaggctggagtgtagtggtatgatcatagctcaccacaaccttgaactcccaggctcaagcgatcctcccgccttaactgcctgagtagctgggactacaggcatgcaccaccacgcccagctaatttttcttattttttgtagagacagggtctcactgtgttgcctcactcgagctgctgacctcaagtgatcctcccacctcagcctgccaaagcactgggattacaggcatgagccaccatgcctggccaggacatatttgaaatggggagattttaaaaattctgatgattagactgaatcctcagacgttctggtttgattgttgtgggtgtagcccaggcatgggattttttaaagagctgctcaggtaattccaatttaattgcgtgtcctacttgggttttttgtttgtttttattgtttttgctaaacctggcaaccctaccgagtagggattagcagtaacttatctgaaatttagaggtgttttgggggtggggcgagggtttctgtagtagactcagattttacatggccctgagctgcccttgcgttcagttggaagccacgcaaaatgaactgaaccaggagtgagcttcgtgtacattatctattagaaaatgaagtaccttctggttcagctagtccctgtgcgttgagaggctttaagaaacttctagtaaaaatgtttttttcttttagctttgaattggccagagtttatcctagattattttattttaaattggtagaattctttgcgaactgtcacagagaaattccttttcatgactttatttctgacctattaaaacatgaacaggccaggcatggtggctcacgcctgtaatcctagcacttgggaggcagtggcaggcggatcacttgagctcaggagtcctaaaccagcctgggcaacatagtgataccttgtctctaccaaaagttaaaaaaaaaaaaaaaaaagctcaagaacctgcacgagggcctaaaacagtgggctcagctttggctgtgcattggaatcacctggggagatttgtaagcttctgctgtctgggctgaacccccagaggttcggattgaattggtgtggggtgtggtccaggcatcgagatgtgtaaagacctccccaggtgatgatatgcagtccgaggttgagactgccctgtcctgcaaggtcgttggccagaggtagaggaaactggtcaaagtggctgttgggcttgtcaagcccgtggctgaatgacagtgagctctcttgctgggagggttccttttcctgttgttgaatggtcctggcctgcaggatgggaggccagatgccttcaggagctggtggatccagctgttctcaccagcctggaggttagcagaccagagtgggtgggcaggaccttggcctggtgcccctggaatcagtgggtggcatgtgttgggatatactggctacaggctcatctcaaagagcaggtagaacagagtcagcagggaactgacaggtggggctgtccccctgaaagcagccgcagaaacagctgccacctatttgcatagctgagcaggaggacatactgtctttgtgggttttgcttctggtctgtttcctgactgggttgataaagggagtcccagctcgttccctgttagccaaaccagcatcctactcacacaccggacactccaggtgctagtccactggtgctggtgttcaggggagttggggggggggggcgcggggacagaagcgcgggttcttggttccaatgagggacttagcagaagcctccaggggccagcagggccaggtgaaactgggagaaatgaagccctctgtgtcctgtgtgtgtggtggggtttaatgcattagcaaatttaaacttaaaaactaactctaggccgggcacggtggctcacacctgtaatcccagcactttgggaggccaaggcaggtggattgcctgagctcaggagttcgagaccagcctggacaacatggtgaaactcttgtctttatttttttaaaaaaacaaaaagtaactttcgatgtgatcataccaggaaagttttgcgtggtcaccatgccaagaaaatgactttggttgcccagcagatccacagcgactctttctcaagggctactgtggattctagattgaggaaaggggccacttaggactcagtgctggtatcctccacagtcctttctcccagactctggccctccctttgggacccaggaaatcccctctagggtgacgctgctggctaggaagactgaggtctgctgcgccaaggggcctcaagttagaagggccatgccgttcagtggatgactttgagcgctgatcctagggacctgccaggtcctcacttcctgccctgggtgcacacatgaatggggcagccagcaggaagcgggagaggctggaaccaggagcctgccctacctgcatggcaggacaactctgaggcccttctgccatattctctgctacccaccagagaaaataggctgccttctagaaagatttgtttctaaaagcgtagaccctggggaagtataatgtcaccatgctcaccaggcgaggtttcccatatgacctccctgccccgacctcgtaggttgctcctttccccatctgtaaggtagagatgtctgccccggagctaccagctggggatggcatccaggccatgtctcctgcaggatccaagtgctgttgtccccagggtgaccctgcctcctgctggggcccatccgctttgctgtgctgcacaggctgttttcatctgcatggtttggggtctttgtccttgtgccttttcttccccatcgccactgtacaggattttccacattgcccactgcctccttttctacatcgtctcatctccctggcctttcccgagccctgtaaatgtgtactttttcaacgtgcctcccccaggtgaggccagctctcccgggcacattcgtccacaaggatcaggccccacttacccttggctcgctcagcctgtagacttggtaactttgtacagaatctttcattattgtcttaagcatggggggctaggacccacttagtccctcctccagcctgcagctaatttaggagccttgcattccagaaaagggcaactttgtgtaaagcagcttctcccacagagctttccctgcattgttagtgatgtcgggcaaagcatcactctttaacctggggcattggccccagcagggatatcatgggaccgcagccgctccgtgcactgtctctgcccccagaggaagccctgtccatggttcctggtgcacggccacaggcctgccttgaggccaccacatctggtgtctagaacagctgcgggccccacttgggcagaaggaagaggtgctagctgctgcccctgcctgctgtgaacacctgcccagcccttccttgtctgctgaggtgctcagaccagagtgccattaaataccaactgatgtcacggagcggacggtgcattgccaaggactcacagctgtgggctcccttccagctcctcccactttcttggctgggtcttctgaggcctacgtggaatgaactacacatgtggcctcatgcccaagggtttgttagatggcctctgactctgtgggattcaacttgacttttttgccccaggaggctctgtctggaaacaggcttagctttagtgctggggtgggacctgccctgtgggccccagggaggggacagtgggggtgaggccctgaggctgtccagggtctgagctctttgcctccaacctgcttctgccccaaaaggaacaggctgttggtggcaggctcctcccggggagctgtactgtacagaccaaggtgtaaataaacagtttgctcttctcgcaaaaaaaaaaaaaaaaaaaaaaaaaaaaaaaaaaaaaaaa

SEQ ID NO: 5742 - DNA, 882 bp, Homo Sapiens
  NM_032936
ctgagagatcctctaccgcagtcgtttgaggaggcggaactgaagttttttcttaattatcatgtgacgggttctggatttaatggggggaaaagggcggaaaaggacaaggatccaaactggcgaatttgctgatcttcgcgtccctctccgctttccggccggcagcgctgccagggtatatttccttttttccgatcctgcaacagcctctttaaactgtttaaatgagaatgtccttggctcagagagtactactcacctggcttttcacactactcttcttgatcatgttggtgttgaaactggatgagaaagcaccttggaactggttcctcatattcattccagtctggatatttgatactatccttcttgtcctgctgattgtgaaaatggctgggcggtgtaagtctggctttgaccctcgacatggatcacacaatattaaaaaaaaagcctggtacctcattgcaatgttacttaaattagccttctgcctcgcactctgtgctaaactggaacagtttactaccatgaatctatcctatgtcttcattcctttatgggccttgctggctggggctttaacagaactcggatataatgtcttttttgtgagagactgacttctaagtacatcatctcctttctattgctgttcaacaagttaccattaaagtgttctgaatctgtcaagcttcaagaataccagagaactgagggaaaataccaaatgtagttttatactacttccataaaacaggattggtgaatcacggacttctagtcaacctacagcttaattattcagcatttgagttattgagatccttattatctctatgtaaataaagtttgttttggacctcaaaaaaaaaa

SEQ ID NO: 5743 - DNA, 3598 bp, Homo Sapiens
  NM_032941
atctgtgattggctgaacggaccgacccggaagggtggatgctctcagctggctggcgggaagattttactcccgagtagcggaaagatctgctcgaggcctgggtgctttggtgtcggagatccgagagtcggagatcggagagtcggacacaggacagtcggacaccggacagtcaaacaccggagagttagaccgggcttctcggtggggagaggctctgggataactactgttacagctttgaagggtcaagggaggattggccaccaaagcctgtttattagcagctgccatttgttgaaagaaatttggattattttagaaacaaatttggaaagaaaaagaatggcgtccgtttcagctctaactgaggaactggattctataaccagtgagctacatgcagtagaaattcaaattcaagaacttacggaaaggcaacaagagcttattcagaaaaaaaaagtcctgacaaagaaaataaagcagtgtttagaggattctgatgccggggcaagcaatgaatatgattcttcacctgccgcttggaataaagaagattttccatggtctggtaaagttaaagatattctgcaaaatgtctttaaactggaaaagttcagaccacttcagcttgaaactattaacgtaacaatggctggaaaggaggtatttcttgttatgcctacaggaggtggaaagagcttatgttaccagttaccagcattatgttcagatggttttacactcgtcatttgcccattgatctctcttatggaagaccaattaatggttttaaaacaattaggaatttcagcaaccatgttaaatgcttctagttctaaggagcatgttaaatgggttcatgctgaaatggtaaataaaaactccgagttaaagctgatttatgtgactccagagaaaattgcaaaaagcaaaatgtttatgtcaagactagagaaagcctatgaagcaaggagatttactcgaattgctgtggatgaagttcactgctgtagtcagtggggacatgatttcagacctgattataaggcacttggtatcttaaagcggcagttccctaacgcatcactaattgggctgactgcaactgcaacaaatcacgttttgacggatgctcagaaaattttgtgcattgaaaagtgttttacttttacagcttcttttaataggccaaatctatattatgaggttcggcagaagccctcaaacactgaagattttattgaggatattgtaaagctcattaatgggagatacaaagggcaatcaggaatcatatattgtttttctcagaaagactctgaacaagttacggttagtttgcagaatctgggaattcatgcaggtgcttaccatgccaatttggagccagaagataagaccacagttcatagaaaatggtcagccaatgaaattcaggtagtagtggcaactgttgcatttggtatgggaattgataagccagatgtgaggtttgttatccatcattcaatgagtaaatccatggaaaattattaccaagagagtggacgtgcaggtcgagatgacatgaaagcagactgtattttgtactacggctttggagatatattcagaataagttcaatggtggtgatggaaaatgtgggacagcagaagctttatgagatggtatcatactgtcaaaacataagcaaatgtcgtcgtgtgttgatggctcaacattttgatgaagtatggaactcagaagcatgtaacaaaatgtgcgataactgctgtaaagacagtgcatttgaaagaaagaacataacagagtactgcagagatctaatcaagatcctgaagcaggcagaggaactgaatgaaaaactcactccattgaaactgattgattcttggatgggaaagggtgcagcaaaactgagagtagcaggtgttgtggctcccacacttcctcgtgaagatctggagaagattattgcacactttctaatacagcagtatcttaaagaagactacagttttacagcttatgctaccatttcgtatttgaaaataggacctaaagctaatcttctgaacaatgaggcacatgctattactatgcaagtgacaaagtccacgcagaactctttcagggctgaatcgtctcaaacttgtcattctgaacaaggtgataaaaagatggaggaaaaaaattcaggcaacttccagaagaaggctgcaaacatgcttcagcaatctggttctaagaatacaggagctaagaaaagaaaaatcgatgatgcctgatatgaatgttactaaattttctaattaaagatggtttatgcatgtatatgccattatttttgtagttagacaatagtttttaaaagaatttcatagatattttatatgtatggatctatattttcagagcttatctctgaagatctaaacttttgagaatgtttgaaaattagagatcatgaattatataattttccagtataaaacaagggaaaaatttttatgtaaaaccctttaaatgtaaaatatttgagaataagttcatacaatcgtcttaagttttttatgcctttatatacttagctatattttttcttttgacataactatctttttgaaagcaatattatactgacagaggctcactgagtgatactttaagttaaatatgtagatcaaggatgtccaatcttttggcttccctgagccacattggaagaagaattgtcttgggccgcacataaaatatgctaacactgatgatagctgatgagcttaaaaaaaaaattgcaagaaaaatctcatgttttaagaaagtttacaaaaaatgtaaaatatttgagaataagttcatgtaattgtcttaagttttttatgcctttatatacttagctatattttttcttttgacataaccatctttttgaaagcaatattatactgacagaggttcactgagtgatactttaagttaaatatgtagatcagggatgtccaatcttttggcttccctgagccacattggaagaagaattgtcttgggccgcacataaaatatgctaacactgacgatagctgatgagcttaaaaaaaaaaaaattgcaagaaaaatctcatgttttaagaaagtttacagatttgtgttgggctgcattcaaagctgttctgggctgcattagacccgtgggctagagttggacaagcttgtagatgatttcaggttataaaaccagaagtacaattcaacaaaaaaggagtaagtcatcaatataaatattagcaaacgagatattgctacatctctatttaaagtaaaatacaaccgattttaaagttcctgaaaccatagccatattttgacatttcacaaagaatggttctagtctactagagtacatttggctaagtagataacttacctaaatttgctccaaagctaaatcacaagtaaacatatttatgtttaaaacacagaaataaataacttaagatttttatctaagcggtcagtgttgtattggaaagatatatctataaataaactttgaactgatttcaaacttaaaaaaaaaaaaaaaaa

SEQ ID NO: 5744 - DNA, 4280 bp, Homo Sapiens
  NM_032943
gggcgacacccgggccgtgccgccagcgtccgtcgggagagtgaaggctcgcaacgccttgcccgggggaaggtaacgcgccgcgcccggggctgcgcggtttgcaccgccaggccgagggctgggggccagaagacaagagagacggcgaggcgcgctccctgcccggcagcgactcggaggtaggtgatgctctgatgctgctgcctcttatgaattgacgacaggtgcagagagagaataaactgtgtctaagactggaccagagagtgagtgtgctggaagccaccataggaacaagcgacctgtttggcaaggaatacagcatccttctgagagcctcttctcgacactatcccacagaccaggacttcctcatgggaaagagcacttaggatcttgctatcagctgccctaaacttttgctgagccaaaataagactttgatgcagaactgaacaagatatttcatttttgtgtgttttaatcttcctggttgcagtcttagttgttcagccctgagaattttgagccacatttgttgctattatttttgcatgcacttttcaaaatgattgacttaagcttcctgactgaagaggaacaagaggccatcatgaaggttttgcagcgggatgctgctctgaagagggccgaagaagagagagtcagacatttgcctgaaaaaattaaggatgaccagcagctgaagaatatgagtggccaatggttttatgaagccaaggcaaaaaggcacagggacaaaatccatggcgcagatatcatcagagcatctatgagaaagaagaggccccagatagcagctgagcagagtaaagacagagaaaatggggcaaaggaaagctgggtgaataatgtcaacaaagatgctttccttcctccagagctggctggcgttgtagaagagccagaagaagatgcagcaccagcaagcccgagttccagtgtggtaaatccagcttccagtgtgattgatatgtcccaggaaaacacaaggaaaccaaatgtgtctccagagaagaggaagaatccgtttaatagctccaagttgccagaaggtcactcatcacaacaaactaaaaatgaacagtcaaaaaatggaagaactggtttatttcagacttcaaaagaggatgaattgtcagagtcaaaagaaaagtcaactgtcgcagatacttcaatccaaaagttagagaaatcaaagcagactttgccaggcctttcaaatgggtcccaaatcaaggctccaatccccaaagccaggaagatgatctacaaatcaactgatttaaacaaagatgataaccagtcttttcctagacaaaggacagactccctgaaagcgagaggggctccgagagggatcctcaagcgcaactccagttccagtagcacagactcagaaacccttcgttataatcacaactttgaacccaaaagcaaaattgtgtcacctggcctaaccatccatgagagaatttctgagaaggagcattctttagaagacaactcttccccaaactccctggagccattaaagcatgtgagattctctgcagtgaaggatgagcttccacagagtcctgggctaatccatggtcgggaagtaggagaatttagtgttttagaatctgacagattgaaaaatggaatggaagatgcaggggacacagaagagtttcagagtgaccctaagccttctcaatacagaaagccttcgctttttcatcaatcaacctcaagcccatatgtatcaaaaagtgaaacacatcagccaatgacttctggttcttttccaattaatgggctgcattctcattcagaagttttaactgcaagaccacagtctatggagaattcaccaaccatcaatgaacccaaagataaatcatcagaattaacaaggcttgaatctgtattacccagaagccctgctgatgaactgtctcattgtgttgagcctgagccatctcaggtgccaggtggcagttctagagaccgtcagcaaggttcagaagaagaacccagtcctgttttgaaaactttggaaaggagtgccgctaggaaaatgccttccaaaagtctagaagacatttcatcagattcatcaaatcaagcaaaagtagataatcagccagaagaattagtgcgtagtgctgaagatgatgagaaaccagatcagaagccagttacaaatgaatgcgtaccaagaatttccacagtgcctacacaacctgataatccattttctcaccctgacaaactcaaaaggatgagcaagtctgttccagcatttctccaagatgaggtgagtggcagtgtgatgagtgtttatagtggagactttggcaatctggaagttaaaggaaatattcagtttgcaattgaatatgtggagtcactgaaggagttgcatgtttttgtggcccagtgtaaggacttagcagcagcggatgtaaaaaaacagcgttcagacccatatgtaaaggcctatttgctaccagacaaaggcaaaatgggcaagaagaaaacactcgtagtgaagaaaaccttgaatcctgtgtataacgaaatactgcggtataaaattgaaaaacaaatcttaaagacacagaaattgaacctgtccatttggcatcgggatacatttaagcgcaatagtttcctaggggaggtggaacttgatttggaaacatgggactgggataacaaacagaataaacaattgagatggtaccctctgaagcggaagacagcaccagttgcccttgaagcagaaaacagaggtgaaatgaaactagctctccagtatgtcccagagccagtccctggtaaaaagcttcctacaactggagaagtgcacatctgggtgaaggaatgccttgatctaccactgctaaggggaagtcatctaaattcttttgttaaatgtaccatccttccagatacaagtaggaaaagtcgccagaagacaagagctgtagggaaaaccaccaaccctatcttcaaccacactatggtgtatgatgggttcaggcctgaagatctgatggaagcctgtgtagagcttactgtctgggaccattacaaattaaccaaccaatttttgggaggtcttcgtattggctttggaacaggtaaaagttatgggactgaagtggactggatggactctacttcagaggaagttgctctctgggagaagatggtaaactcccccaatacttggattgaagcaacactgcctctcagaatgcttttgattgccaagatttccaaatgagcccaaattccactggctcctccactgaaaactactaaaccggtggaatctgatcttgaaaatctgagtaggtggacaaatatcctcactttctatctattgcacctaaggaatactacacagcatgtaaaagtcaatctgcatgtgcttctttgattacaaggcccaagggatttaaatataacaaaatgtgtaatttgtgactctaatattaaataagatatttgaacaagctaggaaaattgaatttctgctgctgcttcaaagaaaaagctgccccagagcattaaacatggggtattgttaagaagcaaaatgttcttgtttgccatcatgtgtttcacaccacaattctgtgccacagttaagagggtctggtacccttgcaggacctttgtaggttgtgggaaaaagtcgcagaaagatactcaaagtggagcagggaatggagacagacatcagtgatgataaaaaaaaaaatggaccttaagaaactatttactctgtaatctctaataaaatatggaattccatattagggcaatgagactgaaactactggtgtttttctgccttgagaaaacaaacagttaaaacaagcctcaaatgtattttagtgccacccactggccataggtacaattcagttgttggcttgttttgacttaattctaaaataggtctcaagcctgtatttttatgagtttatttttttaaaaccctgcatatatatgattgtttttcttataactttactatatgaaagcagcataagagtagtcacaaacatgttttgcaacaaagttttaattagaatgtaagttgctcagttatactgttcttcttatgtatgtaaaattttcgtattttgtaaaaacccttagaataaattatcatttgatttaaattgtattagaaaattagcgtgacttctcattttaaataaaatattttaggaattctaaacatctaaaaa

SEQ ID NO: 5745 - DNA, 1458 bp, Homo Sapiens
  NM_032945
ctgaccactgcaaagccagaggacttccccctgctgcacaggttcagcatgtttgtgcgtccacaccacaagcagcgcttctcacagacgtgcacagacctgaccggccggccctacccgggcatggagccaccgggaccccaggaggagaggcttgccgtgcctcctgtgcttacccacagggctccccaaccaggcccctcacggtccgagaagaccgggaagacccagagcaagatctcgtccttccttagacagaggccagcagggactgtgggggcgggcggtgaggatgcaggtcccagccagtcctcaggacctccccacgggcctgcagcatctgagtggggcctctaggatgtgcccagcctgccacaccgcctccaggaagcagagcgtcatgcaggtcttctggccggagccccacaaggaccatgagggcgctggaggggccaggcctgtcgctgctgtgcctggtgttggcgctgcctgccctgctgccggtgccggctgtacgcggagtggcagaaacacccacctacccctggcgggacgcagagacaggggagcggctggtgtgcgcccagtgccccccaggcacctttgtgcagcggccgtgccgccgagacagccccacgacgtgtggcccgtgtccaccgcgccactacacgcagttctggaactacctggagcgctgccgctactgcaacgtcctctgcggggagcgtgaggaggaggcacgggcttgccacgccacccacaaccgtgcctgccgctgccgcaccggcttcttcgcgcacgctggtttctgcttggagcacgcatcgtgtccacctggtgccggcgtgattgccccgggcacccccagccagaacacgcagtgccagccgtgccccccaggcaccttctcagccagcagctccagctcagagcagtgccagccccaccgcaactgcacggccctgggcctggccctcaatgtgccaggctcttcctcccatgacaccctgtgcaccagctgcactggcttccccctcagcaccagggtaccaggagctgaggagtgtgagcgtgccgtcatcgactttgtggctttccaggacatctccatcaagaggctgcagcggctgctgcaggccctcgaggccccggagggctggggtccgacaccaagggcgggccgcgcggccttgcagctgaagctgcgtcggcggctcacggagctcctgggggcgcaggacggggcgctgctggtgcggctgctgcaggcgctgcgcgtggccaggatgcccgggctggagcggagcgtccgtgagcgcttcctccctgtgcactgatcctggccccctcttatttattctacatccttggcaccccacttgcactgaaagaggcttttttttaaatagaagaaatgaggtttcttaaagcttatttttataaagctttttcataaaa

SEQ ID NO: 5746 - DNA, 2344 bp, Homo Sapiens
  NM_032947
acactactgggctccaagactgctcaaggtctcactgatagtcaaggcttgtgctcctttttttcagaagagtaagattaaagaaaaccactgtgaattaaaaagtgtgggtgccaacatgggacgggagtcccccctcactccatggatgacatagagggggcagaagattacagaattggcattgtcctgcgtggaagctgggccacccacagtggcgtgggaagcctctcagatgctggattctaatgggctcttgatcaccttggattgggctatttcattgttatcacaaaataaacaggatgctccaagtcatgttatggcagagaaccaaccagcttcacactggtcctctaaaccaatcctcacaacaggactgggagacaggtgttacctttcccactttacagagaatgaaacagagtggcaaagcctccgaaggaccctacacttcggacatcgcaaagcaggatctgagtcccggctcctctgtccaaacctacttgctaggctttctttcccatgtctactctatagctggaaaggtcgtggaggacacattttaggccaaccctctcggtttacaatccagagaggggagaccctcagaagccaagcgacatgtccacggctacgcggcgagtgtgtggcaacgtggaaggggagcccgagacgccctggtctctcccttctctcgcaggttcctttctccccgaacgcagcccgcaggggacgctggaggaggagctgagctggagttgccggggccccgggaccgggcgttccgggggcggtccccagcagccgcgcattccagagccagcagcgcgtcctggccgctcctgcgctctcccgcctcccggggctcggaggagccggggcacgttccaggagctgcctagggctgaggttccaggcctgggggtcgcttccagctgccagatcccgtgcagtcctggggaccctgagaagcaccgagccatccctgacccaggaactttccgcagactcgccgccatctgggagtgaagcaacatggatgcagtcagccaagtccccatggaagtcgtgcttcccaagcacatcctggatatctgggttattgtcctcatcatcctggccaccattgtcatcatgacctcgttgttgctgtgcccagccactgcagtaatcatctatcgcatgcggactcatccgatccttagtggggctgtttgagagcctcccaagagggccgggtgagggatgaggacaggcatcctatccccagcctcttcctgtcttcagaaaagcagcaggagggactttggggcatggacctgagttctggttttgattctgccacgagccagctgtgtgaatttggtcaagggacctaactctctgagttccaggttccttatctttcaaatggggatggtgatccctgccctttctacctcatagggatgtgagaaccacctgacttagtggatgtgaaagctgtttgtgatcagtaaagctaccacagatataagggtgttatgctgaatcctgagaagctttcaagaaccagagaacctgattgctgatgatggccttaaaggtggtgagggagatactgggggcagagcagactttgccagtgcccctcaggtcaaaccaagccaagagcaccctgtccccattccaaggggccagcagcactttggcccaaagtattttctttaaggtgccattccttcatgttttctcagtttggagggtgatgggtagagctttccagaaccttctccattccagaatctctgcccctgtgtaatctgaaggaaggctgtgccatctttgggcactgccaagggagttggggtgatgggcttctttctgcactggagtctcacatctgttagctttgacactcaagcaatgttggaaaatgcagggtgactgagttccctgcccagctttcgggatctctggcccccatccccttgtgtgtgtccctctgcccagctcctgctgtaattagctccacgtgtacccccttcactccctcccaccagctctgcagccagcctatggcaattatattttaagaggtgttcccaggacttttgggacctactaaaacaatgatggttattttagatgtgatgatttatatttatgtagagatatttctggaccactcaagctcttcgataccaaaatcaggagcatcttgggatttattaaattatgtaagaagatagcacagatatcgggatattattgtgtgaaaatgctgcttttactttgatgtgatctcattgatgtacacaaccaagttccaataaagtgctagaatgtgcaaaaaaaaaaa

SEQ ID NO: 5747 - DNA, 3071 bp, Homo Sapiens
  NM_032960
gcggccgcttccccccggccgggcccccgccgccccgcggtccccagagcgccaggcccccggggggagggagggagggcgccgggccggtgggagccagcggcgcgcggtgggacccacggagccccgcgacccgccgagcctggagccgggccgggtcggggaagccggctccagcccggagcgaacttcgcagcccgtcggggggcggcggggagggggcccggagccggaggagggggcggccgcgggcacccccgcctgtgccccggcgtccccgggcaccatgctgtccaactcccagggccagagcccgccggtgccgttccccgccccggccccgccgccgcagccccccacccctgccctgccgcaccccccggcgcagccgccgccgccgcccccgcagcagttcccgcagttccacgtcaagtccggcctgcagatcaagaagaacgccatcatcgatgactacaaggtcaccagccaggtcctggggctgggcatcaacggcaaagttttgcagatcttcaacaagaggacccaggagaaattcgccctcaaaatgcttcaggactgccccaaggcccgcagggaggtggagctgcactggcgggcctcccagtgcccgcacatcgtacggatcgtggatgtgtacgagaatctgtacgcagggaggaagtgcctgctgattgtcatggaatgtttggacggtggagaactctttagccgaatccaggatcgaggagaccaggcattcacagaaagagaagcatccgaaatcatgaagagcatcggtgaggccatccagtatctgcattcaatcaacattgcccatcgggatgtcaagcctgagaatctcttatacacctccaaaaggcccaacgccatcctgaaactcactgactttggctttgccaaggaaaccaccagccacaactctttgaccactccttgttatacaccgtactatgtggctccagaagtgctgggtccagagaagtatgacaagtcctgtgacatgtggtccctgggtgtcatcatgtacattctgctgtgtgggtatccccccttctactccaaccacggccttgccatctctccgggcatgaagactcgcatccgaatgggccagtatgaatttcccaacccagaatggtcagaagtatcagaggaagtgaagatgctcattcggaatctgctgaaaacagagcccacccagagaatgaccatcaccgagtttatgaaccacccttggatcatgcaatcaacaaaggtccctcaaaccccactgcacaccagccgggtcctgaaggaggacaaggagcggtgggaggatgtcaaggaggagatgaccagtgccttggccacaatgcgcgttgactacgagcagatcaagataaaaaagattgaagatgcatccaaccctctgctgctgaagaggcggaagaaagctcgggccctggaggctgcggctctggcccactgagccaccgcgccctcctgcccacgggaggacaagcaataactctctacaggaatatattttttaaacgaagagacagaactgtccacatctgcctcctctcctcctcagctgcatggagcctggaactgcatcagtgactgaattctgccttggttctggccaccccagagtgggagaggctgggaggttgggaggctgtggagagaagtgagcaaggtgctcttgaacctgtgctcattttgcaattttatcagtaatttgacttagagtttttacgaaacctcttttgttgtccttgccccactcctctccaccagacgccttcctctctggatactgcaaaggcttgtggtttgttagagggtatttgtggaaactgtcatagggattgtccctgtgttgtcccatctgccctccctgtttctccacaacagcctggggttgtccccgctggctcacgcgttctgggagctcaaggccaccttggaggaggatgccacgcacttcctctctcggagccctcagacatctccagtgtgccagacaaataggagtgagtgtatgtgtgtgtgtgtgtgtgtgtgtgtgcacacgtgtgtatgagtgcgcagatctgtgcctgggatcgtgcatttgaggggccaggggcaggcagggctgcagagggagacggccctgctggggcttaggaaccttctcccttcttgggtctgccctgcccatactgagcctgccaaagtgcctgggaagcccacccagattctgaaacaggccctctgtggcctgtctctattagctgggttccgggaggcagagaggagtgaccgggcactggcactgcgatcaggaagactggacccccagcccccagggcccccctccccccacttagtgctggtcctaggtcctctgaggcactcatctactgaatgacctctctacttccccttcttgccattattaacccatttttgtttattttccttaaatttttagccatttctccatgggccaccgcccagctcatgtaggtgagcctgggcagcttctgttggcagagcttttgcatttcctgtgtttgtcctgggttctggggcatcagccagctaccccttgtgggcaaaggcagggccacttttgaagtcttccctcagatttccattgtgtggcctggtgggtcagggggagtctttgcaccaaagatgtcctgactttgcccccttgcccatcagccatttgccatcaccccaaacaactcagcttcggggccggtgaggggaggggcctcccccagcacagatgaggagcagctggggtaggctgtctgtgccatggccccccactcccccttcccttggagggagaggtggcaggaatacttcacctttcctctccctcaggggcaggtggtggaggggcgcccagggtcgtctttgtgtatgggggaaggcgctgggtgcctgcagcgcctcccttgtctcagatggtgtgtccagcactcgattgttgtaaactgttgttttgtatgagcgaaattgtctttactaaacagatttaatagttaaaaaaaaaaaaaaaaaaa

SEQ ID NO: 5748 - DNA, 2893 bp, Homo Sapiens
  NM_032966
ccactctaaggaatgcggtccctttgacaggcgaaaaactgaagttggaaaagacaaagtgatttgttcaaaattgaaatttgaaacttgacatttggtcagtgggccctatgtaggaaaaaacctccaagagagctagggttcctctcagagaggaaagacaggtccttaggtcctcaccctcccgtctccttgcccttgcagttctgggaactggacagattggacaactataacgacacctccctggtggaaaatcatctctgccctgccacagaggggcccctcatggcctccttcaaggccgtgttcgtgcccgtggcctacagcctcatcttcctcctgggcgtgatcggcaacgtcctggtgctggtgatcctggagcggcaccggcagacacgcagttccacggagaccttcctgttccacctggccgtggccgacctcctgctggtcttcatcttgccctttgccgtggccgagggctctgtgggctgggtcctggggaccttcctctgcaaaactgtgattgccctgcacaaagtcaacttctactgcagcagcctgctcctggcctgcatcgccgtggaccgctacctggccattgtccacgccgtccatgcctaccgccaccgccgcctcctctccatccacatcacctgtgggaccatctggctggtgggcttcctccttgccttgccagagattctcttcgccaaagtcagccaaggccatcacaacaactccctgccacgttgcaccttctcccaagagaaccaagcagaaacgcatgcctggttcacctcccgattcctctaccatgtggcgggattcctgctgcccatgctggtgatgggctggtgctacgtgggggtagtgcacaggttgcgccaggcccagcggcgccctcagcggcagaaggcagtcagggtggccatcctggtgacaagcatcttcttcctctgctggtcaccctaccacatcgtcatcttcctggacaccctggcgaggctgaaggccgtggacaatacctgcaagctgaatggctctctccccgtggccatcaccatgtgtgagttcctgggcctggcccactgctgcctcaaccccatgctctacactttcgccggcgtgaagttccgcagtgacctgtcgcggctcctgacgaagctgggctgtaccggccctgcctccctgtgccagctcttccctagctggcgcaggagcagtctctctgagtcagagaatgccacctctctcaccacgttctaggtcccagtgtccccttttattgctgcttttccttggggcaggcagtgatgctggatgctccttccaacaggagctgggatcctaagggctcaccgtggctaagagtgtcctaggagtatcctcatttggggtagctagaggaaccaacccccatttctagaacatccctgccagctcttctgccggccctggggctaggctggagcccagggagcggaaagcagctcaaaggcacagtgaaggctgtccttacccatctgcacccccctgggctgagagaacctcacgcacctcccatcctaatcatccaatgctcaagaaacaacttctacttctgcccttgccaacggagagcgcctgcccctcccagaacacactccatcagcttaggggctgctgacctccacagcttcccctctctcctcctgcccacctgtcaaacaaagccagaagctgagcaccaggggatgagtggaggttaaggctgaggaaaggccagctggcagcagagtgtggccttcggacaactcagtccctaaaaacacagacattctgccaggcccccaagcctgcagtcatcttgaccaagcaggaagctcagactggttgagttcaggtagctgcccctggctctgaccgaaacagcgctgggtccaccccatgtcaccggatcctgggtggtctgcaggcagggctgactctaggtgcccttggaggccagccagtgacctgaggaagcgtgaaggccgagaagcaagaaagaaacccgacagagggaagaaaagagctttcttcccgaaccccaaggagggagatggatcaatcaaacccggcggtcccctccgccaggcgagatggggtggggtggagaactcctagggtggctgggtccaggggatgggaggttgtgggcattgatggggaaggaggctggcttgtcccctcctcactcccttcccataagctatagacccgaggaaactcagagtcggaacggagaaaggtggactggaaggggcccgtgggagtcatctcaaccatcccctccgtggcatcaccttaggcagggaagtgtaagaaacacactgaggcagggaagtccccaggccccaggaagccgtgccctgcccccgtgaggatgtcactcagatggaaccgcaggaagctgctccgtgcttgtttgctcacctggggtgtgggaggcccgtccggcagttctgggtgctccctaccacctccccagcctttgatcaggtggggagtcagggacccctgcccttgtcccactcaagccaagcagccaagctccttgggaggccccactggggaaataacagctgtggctcacgtgagagtgtcttcacggcaggacaacgaggaagccctaagacgtcccttttttctctgagtatctcctcgcaagctgggtaatcgatgggggagtctgaagcagatgcaaagaggcaagaggctggattttgaattttctttttaataaaaaggcacctataaaacaggtcaatacagtacaggcagcacagagacccccggaacaagcctaaaaattgtttcaaaataaaaaccaagaagatgtcttcaaaaaaaaaaaaaaaaaaaaaaa

SEQ ID NO: 5749 - DNA, 3447 bp, Homo Sapiens
  NM_032985
gagcatacgtcatcgttctcgctttccggtagctaaggcgatcagcgggacttcccactgagacgagcggatgtcatattgtatcagggcgaacctctgaggagcgctggctgcgcttaggcaacggtgcggcaggcgccggggttttctgaaacagaaacgtttaggggtggggaaacgtgttccgaggaactctcgttttgaagtgcgacatacacctgtcttgccctgttccaagatggtggcagagcttctctgagtctctcgcttcctccagtccgtcggagaagcgctctttgattggccagtggacagcgccgtggcatgacgcgctggggcgctggccaatcggttgagagctgagctggacttggcggtgggagccggagcctgcttgttgcagctgtgggtgaggacggctctagctaggtgagcggctccggccagttcccttttagactatggcgacatacctggagttcatccagcagaatgaagaacgggatggtgtgcgttttagttggaacgtgtggccttccagccggctggaggctacaagaatggttgtacccctggcttgtctccttactcctttgaaagaacgtccagacctacctcctgtacaatatgaacctgtgctttgcagcaggccaacttgtaaagctgttctcaacccactttgtcaggttgattatcgagcaaaactttgggcctgtaatttctgttttcaaagaaatcagtttcctccagcttatggaggcatatctgaggtgaatcaacctgccgaattgatgccccagttttctacaattgagtacgtgatacagcgaggtgctcagtcccctctgatctttctctatgtggttgacacatgcctggaggaagatgaccttcaagcactcaaagagtccctgcagatgtccctgagtcttcttcctccagatgctctggtgggtctgatcacatttggaaggatggtgcaggttcatgagctaagctgtgaaggaatctccaaaagttatgtcttccgagggaccaaggatttaactgcaaagcaaatacaggatatgttgggcctgaccaagccagccatgcccatgcagcaagcacgacctgcacaaccacaggagcacccttttgcttcaagcagatttctgcagcctgttcacaagattgatatgaacctcactgatcttcttggggagctacagagggacccatggccagtaactcaggggaagagacctttgcgatccactggtgtggctttgtccattgctgttggcttgctggagggcacttttccaaacacaggagccaggatcatgctgtttactggaggtccccctacccaagggcctggcatggtggttggagatgaattaaagattcctattcgttcttggcatgatattgagaaagataatgcacgattcatgaaaaaggcaaccaagcactatgagatgcttgctaatcgaacagctgcaaatggtcactgcattgatatttatgcttgtgcccttgatcaaactggacttttggagatgaagtgttgtgcaaatcttactggaggctacatggtaatgggagattctttcaacacttctctcttcaagcagacattccaaagaatctttactaaagattttaatggagatttccgaatggcatttggtgctactttggacgtaaagacctctcgggaactgaagattgcaggagccattggtccatgcgtatctctgaatgtgaaaggaccgtgtgtgtcagaaaatgagcttggtgttggtggcacgagtcagtggaaaatctgtggcctagatcctacatctacacttggcatctattttgaagttgtcaatcagcacaacaccccgatcccccaaggaggcagaggagccatccagtttgtcacgcattatcagcactccagcacccagagacgcatccgcgtgaccaccatcgcccgaaattgggcagatgtacagagtcagctcaggcacatagaagcagcatttgaccaggaggctgcggcagtgttgatggcacggcttggggtgttccgagcggagtcagaggaggggcccgatgtgctccggtggctggaccgacaactcatccgactgtgtcaaaagtttggacagtataacaaagaagaccccacttcttttaggttatcagattccttttctctatatcctcagtttatgttccatctgagaagatctccatttcttcaagtgtttaacaacagtcctgatgagtcgtcatattacagacatcattttgcccggcaggacctgacccagtccctcatcatgatccagcccattctctactcttactcctttcatgggccaccagagccagtactcttggatagcagcagcattctagctgacagaattttgctgatggatactttctttcaaattgtcatttatcttggtgagaccatagcccagtggcgtaaagctggctaccaggacatgcccgagtatgaaaacttcaagcaccttctgcaggcaccactggatgatgctcaagaaattctgcaagcacgcttcccgatgccacgttacatcaacacggagcatggaggcagtcaggctcgattccttttgtccaaagtgaacccatctcagacacacaataacctgtatgcttggggacaggaaactggagcacccatcctaactgatgatgttagcctgcaggtgttcatggaccatttgaagaagctggctgtctccagtgcctgttaagctgaggatacaaccaggaaatgcaacggtgtcagattgtgttcaaaatgtctagaaaggcttgataacattcctgttacttttctagcagattttaacaaataatcaaggacattttatatgtaactctttagattataatttatttgtattcctgtctttgtcctttttcttgcactataaaattataaggtcataaatgttttggtacttgtagatgtttatgtgctttttgtatcctaacttttagaatctaaataaaatcagaggtaatgtattttggcagcttgtttaggtgagaatcttaatgatcataaaggaaataaatctagatgcagaaagtactggctaaaatattgctaatacaaatgtgatttcctgaggtctctgtgtgagtgtgtatgtgttttaagtgacttccttaagaggtgtttcctgaacctaattctcataattaaagtaatgtatatgcaggatcaaaatgaaacaaatataccttatcctaaagagctcataacaaataagttacctccactctataaactcagacctactttttgaagataactgcttttaacctctccttacaagatttttgttgttgatgtatttaattttagcccatgtctcaattctcattttcaaagaatcaatatattaatatacaaaaaaaaaaaaaaaa

SEQ ID NO: 5750 - DNA, 2522 bp, Homo Sapiens
  NM_032991
acatctcccggcggcgggccgcggaagcagtgcagacgcggctcctagcggatgggtgctattgtgaggcggttgtagaagttaataaaggtatccatggagaacactgaaaactcagtggattcaaaatccattaaaaatttggaaccaaagatcatacatggaagcgaatcaatggactctggaatatccctggacaacagttataaaatggattatcctgagatgggtttatgtataataattaataataagaattttcataaaagcactggaatgacatctcggtctggtacagatgtcgatgcagcaaacctcagggaaacattcagaaacttgaaatatgaagtcaggaataaaaatgatcttacacgtgaagaaattgtggaattgatgcgtgatgtttctaaagaagatcacagcaaaaggagcagttttgtttgtgtgcttctgagccatggtgaagaaggaataatttttggaacaaatggacctgttgacctgaaaaaaataacaaactttttcagaggggatcgttgtagaagtctaactggaaaacccaaacttttcattattcaggcctgccgtggtacagaactggactgtggcattgagacagacagtggtgttgatgatgacatggcgtgtcataaaataccagtggaggccgacttcttgtatgcatactccacagcacctggttattattcttggcgaaattcaaaggatggctcctggttcatccagtcgctttgtgccatgctgaaacagtatgccgacaagcttgaatttatgcacattcttacccgggttaaccgaaaggtggcaacagaatttgagtccttttcctttgacgctacttttcatgcaaagaaacagattccatgtattgtttccatgctcacaaaagaactctatttttatcactaaagaaatggttggttggtggttttttttagtttgtatgccaagtgagaagatggtatatttggtactgtatttccctctcattttgacctactctcatgctgcagagggtactttaagacatactccttccatcaaatagaaccactatgaagctacctcaaacttccagtcaggtagttgcaattgaattaaattaggaataaataaaaatggatactggtgcagtcattatgagaggcaatgattgttaatttacagctttcatgattagcaagttacagtgatgctgtgctatgaattttcaagtaattgtgaaaaagttaaacattgaagtaatgaatttttatgatattccccccacttaagactgtgtattctagttttgtcaaactgtagaaatgatgatgtggaagaacttaggcatctgtgggcatggtcaaaggctcaaacctttattttagaattgatatacacggatgacttaactgcatttttagaccatttatctgggattatggttttgtgatgtttgtcctgaacacttttgttgtaaaaaaataataataatgtttaatattgagaaagaaactaatattttatgtgagagaaagtgtgagcaaactaacttgacttttaaggctaaaacttaacattcatagaggggtggagttttaactgtaaggtgctacaatgcccctggatctaccagcataaatatcttctgatttgtccctatgcatatcagttgagcttcatataccagcaatatatctgaagagctattatataaaaaccccaaactgttgattattagccaggtaatgtgaataaattctataggaacatatgaaaatacaacttaaataataaacagtggaatataaggaaagcaataaatgaatgggctgagctgcctgtaacttgagagtagatggtttgagcctgagcagagacatgactcagcctgttccatgaaggcagagccatggaccacgcaggaagggcctacagcccatttctccatacgcactggtatgtgtggatgatgctgccagggcgccatcgccaagtaagaaagtgaagcaaatcagaaacttgtgaagtggaaatgttctaaaggtggtgaggcaataaaaatcatagtactctttgtagcaaaattcttaagtatgttattttctgttgaagtttacaatcaaaggaaaatagtaatgttttatactgtttactgaaagaaaaagacctatgagcacataggactctagacggcatccagccggaggccagagctgagccctcagcccgggaggcaggctccaggcctcagcaggtgcggagccgtcactgcaccaagtctcactggctgtcagtatgacatttcacgggagatttcttgttgctcaaaaaatgagctcgcatttgtcaatgacagtttcttttttcttactagacctgtaacttttgtaaatacacatagcatgtaatggtatcttaaagtgtgtttctatgtgacaattttgtacaaatttgttattttccatttttatttcaaaatatacattcaaacttaaaattaaaaaaaaaaaaaaaaa

SEQ ID NO: 5751 - DNA, 1394 bp, Homo Sapiens
  NM_032992
ccgagggcggggccgggcccgggagcctgtggcttcaggaagaggagggcaaggtgtctggctgcgcgtttggctgcaatgagctcggcctcggggctccgcagggggcacccggcagtgtcaactgttagccacgcagatgccgattgctttgtgtgtgtcttcctgagccatggcgaaggcaatcacatttatgcatatgatgctaaaatcgaaattcagacattaactggcttgttcaaaggagacaagtgtcacagcctggttggaaaacccaagatatttatcattcaggcatgtcggggaaaccagcacgatgtgccagtcattcctttggatgtagtagataatcagacagagaagttggacaccaacataactgaggtggatgcagcctccgtttacacgctgcctgctggagctgacttcctcatgtgttactctgttgcagaaggatattattctcaccgggaaactgtgaacggctcatggtacattcaagatttgtgtgagatgttgggaaaatatggctcctccttagagttcacagaactcctcacactggtgaacaggaaagtttctcagcgccgagtggacttttgcaaagacccaagtgcaattggaaagaagcaggttccctgttttgcctcaatgctaactaaaaagctgcatttctttccaaaatctaattaattaatagaggctatctaattttacactctgtattgaaaatggctttctcagccaggcgtggttactcacacctgtaatcccagcactttgggagtccaaggtgggcggatcacctgaggtcgggagttcgagaccagcctgaccaacatggagaagccccgtctctactaaaaatgcaaaaaaaaatttagctaggcatggcggcgcatgcctgcaatcccagctacttggaaggctgaggcaggagaatcacttgaacccaggaggtggaggctgcggtgagccgagattgcgccattgcactccagcctgggcaacgagtgaaactccgtctcaaaaaaaagaaaatgtctttctcttccttttatataaatatcgttagggtgaagcattatggtctaatgattcaaatgttttaaagtttaatgcctagcagagaactgccttaaaaaaaaaaaaaaaaagttcatgttggccatggtgaaagggtttgatatggagaaacaaaatcctcaggaaattagataaataaaaatttataagcatttgtattattttttaataaactgcagggttacacaaaaatctagctgatttaacttgtattttgtcacttttttataaaagtttattgtttgatgtttttaaaggtttttgaaatccaggaattaaatcatcccttaataaaatattcgaaattc

SEQ ID NO: 5752 - DNA, 1021 bp, Homo Sapiens
  NM_032993
ccgctgttatacgtcacttccacggctcagcgtcagggaggagagagaatgtcttttcgaggcggaggtcgtggaggctttaatcgaggtggtggaggtggcggcttcaaccgaggtggcagcagcaaccacttccgaggtggaggcggcggtggaggcggcggcaatttcagaggcggcggcaggggaggatttggacgagggggtggccgcggaggctttaacaaaggccaagaccaaggacctccagaacgtgtagtcttattaggagagttcctgcatccctgtgaagatgacatagtttgtaaatgtaccacagatgaaaataaggtgccttatttcaatgctcctgtttacttagaaaacaaagaacaaattggaaaagtggatgaaatatttggacaactcagagatttttatttttcagttaagttgtcagaaaacatgaaggcttcatcctttaaaaaactacagaagttttatatagacccatataagctgctgccactgcagaggtttttacctcgacctccaggtgagaaaggacctccaagaggtggtggcaggggaggccgaggaggaggaagaggaggaggtggcagaggtggtggcagaggcggtggttttagaggtggaagaggaggtggaggtgggggcttcagaggaggaagaggtggtggtttcagagggagaggacattaagtgaaacagttgacagacatcaccagttgacttctgcattaacctgcatgatctgtttctactatggattggaaacttgtttcttgaacaagtcttgaagatcttggtcattttatgacaatggatctaaaatgtcagcatcatgcaaagtgcaacggaatagtgaattttgctctaaaagagcatgaacaagtctttctaatgttttgtacagtgcctggcactctgtgggtgctcaataaatggataggagttttcatttgaagcatatttgaatttttaaaataaagtgttttattcccttaaaaaaaaaaaaaaa

SEQ ID NO: 5753 - DNA, 1996 bp, Homo Sapiens
  NM_032996
agatgcgtcccggggagtgggcggtgacgcggtggcaggttctggggacaggcggtgaccccagaattgaccctggggacagggcgaggcgcggaggcgtcctgaaggcgaggcggtgacgcaagagcgaatccttggggcggggcgaggcgttggagatgcgtcctgcgggcgggacggtaacgcgggggcggggcggtgacgtgagcgggcaggctctggatctcggcgggatcaggccaggcagctgatcatagatctggagactcgagggagtcaggctcttcctttgttcatctcctgcttagaggacacaggccaggacatgctggcttcgtttctgcgaactaacaggcaagcagcaaagttgtcgaagccaaccctagaaaaccttaccccagtggtgctcagaccagagattcgcaaaccagaggttctcagaccggaaacacccagaccagtggacattggttctggaggatttggtgatgtcggtgctcttgagagtttgaggggaaatgcagatttggcttacatcctgagcatggagccctgtggccactgcctcattatcaacaatgtgaacttctgccgtgagtccgggctccgcacccgcactggctccaacatcgactgtgagaagttgcggcgtcgcttctcctcgctgcatttcatggtggaggtgaagggcgacctgactgccaagaaaatggtgctggctttgctggagctggcgcagcaggaccacggtgctctggactgctgcgtggtggtcattctctctcacggctgtcaggccagccacctgcagttcccaggggctgtctacggcacagatggatgccctgtgtcggtcgagaagattgtgaacatcttcaatgggaccagctgccccagcctgggagggaagcccaagctctttttcatccaggcctgtggtggggagcagaaagaccatgggtttgaggtggcctccacttcccctgaagacgagtcccctggcagtaaccccgagccagatgccaccccgttccaggaaggtttgaggaccttcgaccagctggacgccatatctagtttgcccacacccagtgacatctttgtgtcctactctactttcccaggttttgtttcctggagggaccccaagagtggctcctggtacgttgagaccctggacgacatctttgagcagtgggctcactctgaagacctgcagtccctcctgcttagggtcgctaatgctgtttcggtgaaagggatttataaacagatgcctggttgctttaatttcctccggaaaaaacttttctttaaaacatcataaggccagggcccctcaccctgccttatcttgcaccccaaagctttcctgccccaggcctgaaagaggctgaggcctggactttcctgcaactcaaggactttgcagccggcacagggtctgctctttctctgccagtgacagacaggctcttagcagcttccagattgacgacaagtgctgaacagtggaggaagagggacagatgaatgccgtggattgcacgtggcctcttgagcagtggctggtccagggctagtgacttgtgtcccatgatccctgtgttgtctctagagcagggattaacctctgcactactgacatgtggggccaggtcaccctttgctgtgaggctgtcctgtacattgtgggatgttcagcactgtcccttgcctcaatgccagtaacgcgtcttcctgagtggtgccaaacaaaaaggttctcaggtgttgccaaatatgtcctggggtataaaactttcctcgcctgacaaccactggtctgtagggatttttggctacacacaaaccagtatcgctcatagatcagcaaaccggggcctactagagtctgaacagctgtaatctatgaattctaagtgaaattttaaaaattgttaatttttcctatattgcattaattttaaaaaataaatctgaggcaaatatggac

SEQ ID NO: 5754 - DNA, 4466 bp, Homo Sapiens
  NM_033001
aggaggaggagggtgagagagaagctgggagagcagagaaaaggggccaccggtcgcccccccgcttccccgcacgcgctctccagccgcggccgcccgcctgccgcggtcaccccggcctctgcctctgtcccccagtgatcggatcaaggcgctgagcgaggccctgcctgcggggcggccatgcggcggtgacaggagcgcgaccgacacgcacgggcccctcgccccctctcgcctcccgtccgctcgccagctcccctcagccgaggctgctccgcggcggccgcagcccgcgcgcggcccacactcgcctcccctcggcacccccggccccggagctgcctggaggcggccgcactcggggatcatggcccaagttgcaatgtccaccctccccgttgaagatgaggagtcctcggagagcaggatggtggtgacattcctcatgtcagctctcgagtccatgtgtaaagaactggccaagtccaaagccgaagtggcctgcattgcagtgtatgaaacagacgtgtttgtcgtcggaactgaaagaggacgtgcttttgtcaataccagaaaggattttcaaaaagattttgtaaaatattgtgttgaagaagaagaaaaagctgcagagatgcataaaatgaaatctacaacccaggcaaatcggatgagtgtagatgctgtagaaattgaaacactcagaaaaacagttgaggactatttctgcttttgctatgggaaagctttaggcaaatccacagtggtacctgtaccatatgagaagatgctgcgagaccagtcggctgtggtagtgcaggggcttccggaaggtgttgcctttaaacaccccgagaactatgatcttgcaaccctgaaatggattttggagaacaaagcagggatttcattcatcattaagagaccttttttagagccaaagaagcatgtaggtggtcgtgtgatggtaacagatgctgacaggtcaatactatctccaggtggaagttgtggccccatcaaagtgaaaactgaacccacagaagattctggcatttccctggaaatggcagctgtgacagtaaaggaagaatcagaagatcctgattattatcaatataacattcaagcaggcccttctgaaactgatgatgttgatgaaaaacagcccctatcgaagcctttgcaaggaagccaccattcttcagagggcaatgaaggcacagaaatggaagtaccagcagaagatgatgattattctccaccgtctaagagaccaaaggccaatgagctaccgcagccaccagtcccggaacccgccaatgctgggaagcggaaagtgagggagttcaacttcgagaaatggaatgctcgcatcactgatctacgtaaacaagttgaagaattgtttgaaaggaaatatgctcaagccataaaagccaaaggtccggtgacgatcccgtaccctcttttccagtctcatgttgaagatctttatgtagaaggacttcctgaaggaattccttttagaaggccatctacttacggaattcctcgcctggagaggatattacttgcaaaggaaaggattcgttttgtgattaagaaacatgagcttctgaattcaacacgtgaagatttacagcttgataagccagcttcaggagtaaaggaagaatggtatgccagaatcactaaattaagaaagatggtggatcagcttttctgcaaaaaatttgcggaagccttggggagcactgaagccaaggctgtaccgtaccaaaaatttgaggcacacccgaatgatctgtacgtggaaggactgccagaaaacattcctttccgaagtccctcatggtatggaatcccaaggctggaaaaaatcattcaagtgggcaatcgaattaaatttgttattaaaagaccagaacttctgactcacagtaccactgaagttactcagccaagaacgaatacaccagtcaaagaagattggaatgtcagaattaccaagctacggaagcaagtggaagagatttttaatttgaaatttgctcaagctcttggactcaccgaggcagtaaaagtaccatatcctgtgtttgaatcaaacccggagttcttgtatgtggaaggcttgccagaggggattcccttccgaagccctacctggtttggaattccacgacttgaaaggatcgtccgcgggagtaataaaatcaagttcgttgttaaaaaacctgaactagttatttcctacttgcctcctgggatggctagtaaaataaacactaaagctttgcagtcccccaaaagaccacgaagtcctgggagtaattcaaaggttcctgaaattgaggtcaccgtggaaggccctaataacaacaatcctcaaacctcagctgttcgaaccccgacccagactaacggttctaacgttcccttcaagccacgagggagagagttttcctttgaggcctggaatgccaaaatcacggacctaaaacagaaagttgaaaatctcttcaatgagaaatgtggggaagctcttggccttaaacaagctgtgaaggtgccgttcgcgttatttgagtctttcccggaagacttttatgtggaaggcttacctgagggtgtgccattccgaagaccatcgacttttggcattccgaggctggagaagatactcagaaacaaagccaaaattaagttcatcattaaaaagcccgaaatgtttgagacggcgattaaggagagcacctcctctaagagccctcccagaaaaataaattcatcacccaatgttaatactactgcatcaggtgttgaagaccttaacatcattcaggtgacaattccagatgatgataatgaaagactctcgaaagttgaaaaagctagacagctaagagaacaagtgaatgacctctttagtcggaaatttggtgaagctattggtatgggttttcctgtgaaagttccctacaggaaaatcacaattaaccctggctgtgtggtggttgatggcatgcccccgggggtgtccttcaaagcccccagctacctggaaatcagctccatgagaaggatcttagactctgccgagtttatcaaattcacggtcattagaccatttccaggacttgtgattaataaccagctggttgatcagagtgagtcagaaggccccgtgatacaagaatcagctgaaccaagccagttggaagttccagccacagaagaaataaaagagactgatggaagctctcagatcaagcaagaaccagaccccacgtggtagacctcttccctcctaggcttaaagtatcagtggttgagaagagcttttcggacctgttactaccccaagctgtgtaatatacttgtataacagaaataccttctatacaaacctttttttctacttttagatagaaatgtctactttttcagcagttctgtgaattaaagagcagagtgactgtgggtctggaatggctggtgtacttgggaatgtactatcaggattttacagcaatgctgggaaatgacagggaaaatgacaggaatgaatctcaccagattttttatgtactcagcagagccttgagttacggtgtttattttccaatcaagtgaagatatctcctacttctcctactggaacatctcagcttctgcagtgaagaaaaattcctgtgatagttcagttctttagtttttctatttgaaaaaaaaaaatcatttaaatgatcctttgttcacggctctccttaatgactgagtgaacagttcctatctgtatatttgactaaaccttttcctaagctatctctcatggttcctatgtttttttatcataattaaaagcaaaaccatctggatcacctaacagtcagaggtcagtatctcagcgtgtgaattatagaggaaatacagagagaacctcttccacttttacttttcgtccaaataaaatgcatggtgtaccagaagttgaagatcgggttgaggattggggctagctcgatgacactaaggccccaacatcgcgggacctgctgtggcgcggattcttaggaacgctgttctagccggccccctctccaggggtcgccgtggccggcattatttcctagttcttcttgtaaccctgaggtgccagcgcggggagtgaggaggggtcagggggctaaggatgcaacctctgacgttctgcgccttcctaggagagtcttacatgtgttgagatttcacaagcaatgcgagttgtaaaataccagctctacaagaagctaggctctgtgacggcatagttttcagtagctttatcacaatattcacaatggagaattatatgacatggtagcagaaataggcccttttatgtgttgcttctattttacctcaaattgtagatatagggtaatcaataaaatccatccatgcctttcacacactaa

SEQ ID NO: 5755 - DNA, 5401 bp, Homo Sapiens
  NM_033007
cttgttgactaggcgctgttcttgctggctggtgccccagggcctggagaggtctgaagaaacctgggagccagcagcccggggctccactctgggttctgaaagcccattccctgctctgcggctcctcccaccccacctcttctcagccttgcagctcaagggttgatctcaggagtccaggacccaggagagggaagaatctgaggaacacagaacagtgagcgttgcccacaccccatctcccgtcaccacatctcccctcaccctcaccctccctgcctggccctggaccccatcccaggacctccctatcagctgacttcttccagtgtcttgcaggcccctctgggctcctccctcccctggcttttcctaccactccccctctatcggcgtctatctgtaggtgccctgggatttataaaactgggttccgaatgctgaataagagacggtaagagccaaggcaaaggacagcactgttctctgcctgcctgataccctcaccacctgggaacatcccccagacaccctcttaactccgggacagagatggctggcggagcctggggccgcctggcctgttacttggagttcctgaagaaggaggagctgaaggagttccagcttctgctcgccaataaagcgcactccaggagctcttcgggtgagacacccgctcagccagagaagacgagtggcatggaggtggcctcgtacctggtggctcagtatggggagcagcgggcctgggacctagccctccatacctgggagcagatggggctgaggtcactgtgcgcccaagcccaggaaggggcaggccactctccctcattcccctacagcccaagtgaaccccacctggggtctcccagccaacccacctccaccgcagtgctaatgccctggatccatgaattgccggcggggtgcacccagggctcagagagaagggttttgagacagctgcctgacacatctggacgccgctggagagaaatctctgcctcactcctctaccaagctcttccaagctccccagaccatgagtctccaagccaggagtcacccaacgcccccacatccacagcagtgctggggagctggggatccccacctcagcccagcctagcacccagagagcaggaggctcctgggacccaatggcctctggatgaaacgtcaggaatttactacacagaaatcagagaaagagagagagagaaatcagagaaaggcaggcccccatgggcagcggtggtaggaacgcccccacaggcgcacaccagcctacagccccaccaccacccatgggagccttctgtgagagagagcctctgttccacatggccctggaaaaatgaggattttaaccaaaaattcacacagctgctacttctacaaagacctcaccccagaagccaagatcccctggtcaagagaagctggcctgattatgtggaggagaatcgaggacatttaattgagatcagagacttatttggcccaggcctggatacccaagaacctcgcatagtcatactgcagggggctgctggaattgggaagtcaacactggccaggcaggtgaaggaagcctgggggagaggccagctgtatggggaccgcttccagcatgtcttctacttcagctgcagagagctggcccagtccaaggtggtgagtctcgctgagctcatcggaaaagatgggacagccactccggctcccattagacagatcctgtctaggccagagcggctgctcttcatcctcgatggtgtagatgagccaggatgggtcttgcaggagccgagttctgagctctgtctgcactggagccagccacagccggcggatgcactgctgggcagtttgctggggaaaactatacttcccgaggcatccttcctgatcacggctcggaccacagctctgcagaacctcattccttctttggagcaggcacgttgggtagaggtcctggggttctctgagtccagcaggaaggaatatttctacagatatttcacagatgaaaggcaagcaattagagcctttaggttggtcaaatcaaacaaagagctctgggccctgtgtcttgtgccctgggtgtcctggctggcctgcacttgcctgatgcagcagatgaagcggaaggaaaaactcacactgacttccaagaccaccacaaccctctgtctacattaccttgcccaggctctccaagctcagccattgggaccccagctcagagacctctgctctctggctgctgagggcatctggcaaaaaaagacccttttcagtccagatgacctcaggaagcatgggttagatggggccatcatctccaccttcttgaagatgggtattcttcaagagcaccccatccctctgagctacagcttcattcacctctgtttccaagagttctttgcagcaatgtcctatgtcttggaggatgagaaggggagaggtaaacattctaattgcatcatagatttggaaaagacgctagaagcatatggaatacatggcctgtttggggcatcaaccacacgtttcctattgggcctgttaagtgatgagggggagagagagatggagaacatctttcactgccggctgtctcaggggaggaacctgatgcagtgggtcccgtccctgcagctgctgctgcagccacactctctggagtccctccactgcttgtacgagactcggaacaaaacgttcctgacacaagtgatggcccatttcgaagaaatgggcatgtgtgtagaaacagacatggagctcttagtgtgcactttctgcattaaattcagccgccacgtgaagaagcttcagctgattgagggcaggcagcacagatcaacatggagccccaccatggtagtcctgttcaggtgggtcccagtcacagatgcctattggcagattctcttctccgtcctcaaggtcaccagaaacctgaaggagctggacctaagtggaaactcgctgagccactctgcagtgaagagtctttgtaagaccctgagacgccctcgctgcctcctggagaccctgcggttggctggctgtggcctcacagctgaggactgcaaggaccttgcctttgggctgagagccaaccagaccctgaccgagctggacctgagcttcaatgtgctcacggatgctggagccaaacacctttgccagagactgagacagccgagctgcaagctacagcgactgcagctggtcagctgtggcctcacgtctgactgctgccaggacctggcctctgtgcttagtgccagccccagcctgaaggagctagacctgcagcagaacaacctggatgacgttggcgtgcgactgctctgtgaggggctcaggcatcctgcctgcaaactcatacgcctggggaaaccaagtgtgatgacccctactgagggcctggatacgggagagatgagtaatagcacatcctcactcaagcggcagagactcggatcagagagggcggcttcccatgttgctcaggctaatctcaaactcctggacgtgagcaagatcttcccaattgctgagattgcagaggaaagctccccagaggtagtaccggtggaactcttgtgcgtgccttctcctgcctctcaaggggacctgcatacgaagcctttggggactgacgatgacttctggggccccacggggcctgtggctactgaggtagttgacaaagaaaagaacttgtaccgagttcacttccctgtagctggctcctaccgctggcccaacacgggtctctgctttgtgatgagagaagcggtgaccgttgagattgaattctgtgtgtgggaccagttcctgggtgagatcaacccacagcacagctggatggtggcagggcctctgctggacatcaaggctgagcctggagctgtggaagctgtgcacctccctcactttgtggctctccaagggggccatgtggacacatccctgttccaaatggcccactttaaagaggaggggatgctcctggagaagccagccagggtggagctgcatcacatagttctggaaaaccccagcttctcccccttgggagtcctcctgaaaatgatccataatgccctgcgcttcattcccgtcacctctgtggtgttgctttaccaccgcgtccatcctgaggaagtcaccttccacctctacctgatcccaagtgactgctccattcggaaggaactggagctctgctatcgaagccctggagaagaccagctgttctcggagttctacgttggccacttgggatcagggatcaggctgcaagtgaaagacaagaaagatgagactctggtgtgggaggccttggtgaaaccaggagatctcatgcctgcaactactctgatccctccagcccgcatagccgtaccttcacctctggatgccccgcagttgctgcactttgtggaccagtatcgagagcagctgatagcccgagtgacatcggtggaggttgtcttggacaaactgcatggacaggtgctgagccaggagcagtacgagagggtgctggctgagaacacgaggcccagccagatgcggaagctgttcagcttgagccagtcctgggaccggaagtgcaaagatggactctaccaagccctgaaggagacccatcctcacctcattatggaactctgggagaagggcagcaaaaagggactcctgccactcagcagctgaagtatcaacaccagcccttgacccttgagtcctggctttggctgacccttctttgggtctcagtttctttctctgcaaacaagttgccatctggtttgccttccagcactaaagtaatggaactttgatgatgcctttgctgggcattatgtgtccatgccagggatgccacagggggccccagtccaggtggcctaacagcatctcagggaatgtccatctggagctggcaagacccctgcagacctcatagagcctcatctggtggccacagcagccaagcctagagccctccggatcccatccaggcgcaaagaggaataggagggacatggaaccatttgcctctggctgtgtcacagggtgagccccaaaattggggttcagcgtgggaggccacgtggattcttggctttgtacaggaagatctacaagagcaagccaacagagtaaagtggaaggaagtttattcagaaaataaaggagtatcacagctcttttagaatttgtctagcaggctttccagtttttaccagaaaacccctataaattaaaaattttttacttaaatttaagaattaaaaaaatacaaaaaagaaaaaatgaaaataaaggaataagaagttacctactccaaaaaaaaaaa

SEQ ID NO: 5756 - DNA, 1443 bp, Homo Sapiens
  NM_033015
gggagccacgtctccgaagaccgatagctgcttcgggattggcgtccgggcggctatctaggggctgctgggaagatggcggactcggtggctagccgatgaggaggccgcggggggaacccggcccccgggccccgagaccgactgagggagcgacctgcgcagggcccggggagtcatgctttccatctgatggtcccctggtgtgtgccctggaacaggagcgaaggctccgcctccctccgaagccacctccccctttgcagccccttctccgaggtgggcaagggttggaagctgctctaagctgcccccgttttctgcggtatccacggcagcatctgatcagcagcctggcagaggcaaggccagaggaactgactccccacgtgatggtgctcctggcccagcacctggcccggcaccggttgcgggagccccagcttctggaagccattgcccacttcctggtggttcaggaaacgcaactcagcagcaaggtggtacagaagttggtcctgccctttgggcgactgaactacctgcccctggaacagcagtttatgccctgccttgagaggatcctggctcgggaagcaggggtggcacccctggctacagtcaacatcttgatgtcactgtgccaactgcggtgcctgcccttcagagccctgcactttgttttttcccctggcttcatcaactacatcagtggcacccctcatgctctgattgtgcgtcgctacctctccctgctggacacggccgtggagctggagctcccaggataccggggtccccgccttccccgaaggcagcaagtgcccatctttccccagcctctcatcaccgaccgtgcccgctgcaagtacagtcacaaggacatagtagctgaggggttgcgccagctgctgggggaggagaaataccgccaggacctgactgtgcctccaggctactgcacagacttcctgctgtgcgccagcagctctggtgctgtgcttcccgtgaggacccaggaccccttcctgccatacccaccaaggtcctgcccacagggccaggctgcctctagcgccactactcgagaccctgcccagagggtggtgctggtgttgcgggaacgctggcatttctgccgggacggccgggtgctgctgggctcgagggccctgagggagcggcacctaggcctgatgggctaccagctcctgccgctacccttcgaggaactggagtcccagagaggcctgccccagctcaagagctacctgaggcagaagctccaggccctgggcctgcgctgggggcctgaagggggctgaggggttgatgtggggttcaggatggcccccccatggggggtggatgatttgcactttggttccctgtgttttgatttctcattaaagttcctttccttccccgtaaaaaaaaaaaaaa

SEQ ID NO: 5757 - DNA, 3188 bp, Homo Sapiens
  NM_033027
gggcggggctgggcgcaggcagtctcccgccgccgccgccgctgccggacgcgcagagcgaggggcggctggaccgacggctgccgggccgagcgcacagagtcgcggcgcagggggcgtccccggccgggacgcgggtcgcgtcgttgtcctccgcgagcgtccggattgcaggctgtctgtccccagaccccagagcacgtccggcaccaccatgactgggctgttgaagaggaaatttgaccagctggatgaggacaactcctcggtctcctcctcctcctcttcctctgggtgccagtctcgctcctgctccccaagctcttctgtctcccgtgcctgggactcagaggaggaaggcccctgggatcagatgcccctgcctgaccgtgacttctgcggccccagaagtttcacccccctgtctatcctgaagcgggctcgccgggagcgcccaggccgtgtagcctttgatgggatcaccgtcttctacttcccccgctgccagggcttcaccagtgtgcccagccgtggtggctgtactctgggtatggcccttcgccacagtgcttgccgtcgcttctctttggctgagtttgcgcaggagcaagcccgtgcacggcacgagaagctccgccagcgcttgaaagaggagaagttggagatgctgcagtggaagctttcggcagctggggtaccccaggcagaggcagggctgccacctgtggtggatgccattgatgacgcctctgtggaggaggacttggcagtcgctgtggcaggtggccggttggaagaagtgagcttcctacagccctacccagcccggcgacgtcgagctctgctgagggcttcaggtgtgcgaaggatcgatcgggaggagaagcgggagctgcaggcactgcgccaatcccgggaggattgtggctgtcactgcgataggatctgcgaccctgagacctgcagctgcagcctggcaggcatcaagtgccagatggaccacacagcattcccctgtggctgctgcagggagggctgtgagaaccccatgggccgtgtggaatttaatcaggcaagagttcagacccatttcatccacacactcacccgcctgcagttggaacaggaggctgagagctttagggagctggaggcccctgcccagggcagcccacccagccctggtgaggaggccctggtccctactttcccactggccaagccccccatgaacaatgagctgggagacaacagctgcagcagcgacatgactgattcttctacagcatcttcatcagcatcgggcactagtgaggctcctgactgccccacccacccaggcctgcctggccctggcttccagcctggcgttgatgatgacagcctggcacgcatcttgagtttcagtgactctgacttcggtggggaggaggaggaagaggaggaagggagcgtggggaacctggacaacctcagctgcttccatccagctgacatctttggtactagtgaccctggtggcctggccagctggacccacagctattctggctgtagcttcacatcaggcgtcctggatgagaatgccaacctggatgccagctgcttcctaaatggtggccttgaagggtcaagggaaggcagccttcctggcacctcagtgccacccagcatggacgctggccggagtagctcagtggatctcagcttgtcttcttgtgactcctttgagttactccaggctctgccagattatagtctggggcctcactacacatcacagaaggtgtctgacagcctggacaacatcgaggcacctcacttccccctgcctggcctgtctccacctggggatgccagcagttgcttcctggagtccctcatgggcttctccgagccagccgccgaagccctagatccctttattgacagccagtttgaggacactgtcccagcatctctaatggagcctgtgccggtgtgaggaccaggatgtcttttcccagccccaagagacctgttgctgctttcttgtaattatggggctccccagagtctgcgtaacagtctcccactggctggctcacccacaggtgccatgtgcacactcctggttttcaaacaattctctggatttatttatttgttttaacttttctgtgctgaagagaggactggggggagggggcttcccctttcagctgcccggccccccacacccacagcttgctcttctatctccacaacgtgagcctggaagaggagaaaatgtggctcctctggagcttggcagaccacttttcggtctttgcgtgatgttccttagcccaaagacggtgagacagggctgaaatcaggtggcttctgccaccctgagccctagacccatgggtggctaaatccactggactgtgaagactataatttatttccataatttatttggagattgaggaggctttggttgcacttctttggctggtgggtaatgccaggggtggggtgggcacaggccctcaagagccccttttgccttgtagtcctacaccttgccctgcctgggctttggtgcagactaggtgtggatttgagctctgtgatctatgtctgctgcctggctcctagatggctctgtgggcaggtgctggccaaggacatcatctaggcagggggagagcctgggctgaacagctgtgaccaaaactcccttctgccccaccctgccccctccacttcctgccctctgttccatcttcccccttcccaaaggccacagcctttattccaggcccagggatgtaggagggggaaggaggaaacaggaagcccagagagggcaaagggcctacctcggggcgcgaaccatgccccagactattatctcagggctttctgggcactgcacttcagcgtggcccacctgcccatgccctgaggccagttggcgaggggtggctcctgagggtttttataccctttgtttgctaatgtttaattttgcatcataatttctacattgtccctgagtgtcagaactataatttattccatttctctctgtgtctgtgccaagaaacgcaggctctgggcctgccccttgcccaggaggccttgccagcctgtgtgcttgtgggaacaccttgtacctgagcttacaggtaccaataaagaggctttatttttagcaa

SEQ ID NO: 5758 - DNA, 2509 bp, Homo Sapiens
  NM_033028
gaaaccgccgacttccggccgcgcagcggtgggctgagctaaaatggctgaggagagagtcgcgacgagaactcaatttcctgtatctactgagtctcaaaaaccccggcagaaaaaagctccagagtttcctattttggagaagcagaactggttgattcatcttcattatatccggaaagattatgaagcctgcaaggctgttatcaaagaacagcttcaagagactcagggattgtgtgaatatgctatctatgtccaagcattgatatttcgcctagaaggaaatatccaagaatccctagaactcttccagacatgtgcagttcttagtcctcagagtgctgataacctcaagcaggtggccagatctttatttcttttgggaaaacataaagctgccattgaagtatataatgaagcagctaaactcaaccagaaagattgggagatcagccataacctaggagtttgctacatatacctgaagcagttcaacaaggcacaagaccagttgcacaatgccctgaatcttaataggcacgatctgacttatataatgctggggaagatccacttgctggagggagacttggacaaggccattgaagtctacaagaaagcagtggagttctcaccagaaaatacagagcttcttacaactttaggattactctacttacagctcggcatttaccagaaggcatttgaacatcttggcaatgcactgacttatgaccctaccaactacaaggccatcttggcagcaggcagcatgatgcagacccacggggactttgatgttgccctcaccaaatacagagttgtggcttgtgctgttccagaaagtcctccactctggaataacattggaatgtgtttctttggcaagaagaaatatgtggcggccatcagctgcctgaaacgagccaactacttggcaccctttgattggaagattctgtataatttgggccttgtccatttgaccatgcagcagtatgcatcagcttttcattttctcagtgcggccatcaacttccagccaaagatgggggagctctacatgctcttggcagtggctctgaccaatctggaagatatagaaaatgccaagagagcctacgcagaagcagtccacctggataagtgtaaccctttagtaaacctgaactatgctgtgctgctgtacaaccagggcgagaagaagaacgccctggcccaatatcaggagatggagaagaaagtcagcctactcaaggacaatagctctctggaatttgactctgagatggtggagatggctcagaagttgggagctgctctccaggttggggaggcactggtctggaccaaaccagttaaagatcccaaatcaaagcaccagaccacttcaaccagcaaacctgccagtttccagcagcctctgggctctaatcaagctctaggacaggcaatgtcttcagcagctgcatacaggacgctcccctcaggtgctggaggaacatcccagttcacaaagcccccatctcttcctctggagccagagcctgcggtggaatcaagtccaactgaaacatcagaacaaataagagagaaataagaatagaatgaatgaccccaaaatagggttttcttgggcgaggatgtgctggattaggaaaggtgacatgacacaggcagagcagagtggcacccaccacagaatacagtgtgtgttattacgaggagccagcagttgagcctaaggtccttctacctacctggtattggcatttgaggtcggaaaccctctactgccccataagccaggaaaagtgaaaagagaacacagttcctttaagaactggcagcaaggcttgaggccttatgtatgtagctgagtcagcaaggtacatgatgctgtctgctttcaaaaggacttttctctcctagctgactgactccttccttagttcaaggaacagctgagacagacctctgctgagtagctctgtgatgacaaagccttggtttaactgaggtgatcctcaggttgtgaggtttattagtccccaaggcaaacacaaatattagattaataatccaactttaatagtatacatttaaaagaaaaaaaacaaaagccctggaagttgaggccaagcctgctgagtattgcagctgcatttgcccaaagggaatccagaacaagtccctccctgtattttgttcttgagaggggtcagtctagaagctagatcctatcaggatgaggagcagcagcccagggcttgtctggatcagcaccaacgattttaaagaaaaaaggaagagtttcttagatgagtaattgttattgaagatagtcagtgataaccactgaccagatgctatcaatacactatgtgtcctttttagaataaagattacatatcatcattcctttggggaaaattgttattcaggtataaaaacaagagatcataataaaaacctaaaagaacctatgaaaaaaaaaaaaaaaaaa

SEQ ID NO: 5759 - DNA, 2638 bp, Homo Sapiens
  NM_033046
gggacagctcggaggagctggggcggagccgcagggcctggcggccgccgagtgaagtgtgactccgtgggcctggcgtggaggcgggggcgctaggctgcagctggctcggaatcggggctggtttcctgtctggaagggaaggggcctgcagaagggagcggggacagcagcagacaggcacacccctgccttcctctctccctctcctcccttctctggaaaagcgagctgggagaacagctgccaccaaagcgagactggacactctgtgcctagagccccctctgcagctggcctttcctcctgggaccccacttatcctcacttcgctttctttttcttccctgcctggctcccggcagggccccggagcagcagtgggcgaggaaaatttgtcacagcagccagaggggtttaacaggagtgcagagggataagggcagcttctgccctctgcccaagagctggccacctctttaaagactgagggaacagtgggaggaggaactgtgggacagtgtggtacctatctgtcccccctctggaggggttgacaagggaaagggcaccggggggcacagagatgcaggacagattgcacatcctggaggacctgaatatgctctacattcggcagatggcactcagcctggaggacacggagttgcagaggaagctagaccatgagatccggatgagggaaggggcctgtaagctgctggcagcctgctcccagcgagagcaggctctggaggccaccaagagcctgctagtgtgcaacagccgcatcctcagctacatgggcgagctgcagcggcgcaaggaggcgcaggtgctggggaagacaagccggcggccttctgacagtggcccgcccgctgagcgctccccctgccgcggccgggtctgcatctctgacctccggattccactcatgtggaaggacacagaatatttcaagaacaaaggtgacttgcaccgctgggctgtgttcctgctgctgcagctgggggaacacatccaggacacagagatgatcctagtggacaggaccctcacagacatctcctttcagagcaatgtgctcttcgctgaggcggggccagactttgaactgcggttagagctgtatggggcctgtgtggaagaagagggggccctgactggcggccccaagaggcttgccaccaaactcagcagctccctgggccgctcctcagggaggcgtgtccgggcatcgctggacagtgctgggggttcagggagcagtcccatcttgctccccaccccagttgttggtggtcctcgttaccacctcttggctcacaccacactcaccctggcagcagtgcaagatggattccgcacacatgacctcacccttgccagtcatgaggagaaccctgcctggctgcccctttatggtagcgtgtgttgccgtctggcagctcagcctctctgcatgactcagcccactgcaagtggtaccctcagggtgcagcaagctggggagatgcagaactgggcacaagtgcatggagttctgaaaggcacaaacctcttctgttaccggcaacctgaggatgcagacactggggaagagccgctgcttactattgctgtcaacaaggagactcgagtccgggcaggggagctggaccaggctctaggacggcccttcaccctaagcatcagtaaccagtatggggatgatgaggtgacacacacccttcagacagaaagtcgggaagcactgcagagctggatggaggctctgtggcagcttttctttgacatgagccaatggaagcagtgctgtgatgaaatcatgaaaattgaaactcctgctccccggaaaccaccccaagcactggcaaagcaggggtccttgtaccatgagatggctattgagccgctggatgacatcgcagcggtgacagacatcctgacccagcgggagggcgcaaggctggagacacccccaccctggctggcaatgtttacagaccagcctgccctgcctaacccctgctcgcctgcctcagtggccccagccccagactggacccaccccctgccctgggggagaccccgaaccttttccctggatgctgtccccccagaccactcccctagggctcgctcggttgcccccctcccacctcagcgatccccacggaccagaggcctctgcagcaaaggccaacctcgcacttggctccagtcaccagtgtgagagagaaaggtgctggcataggatctgcccagaagagaaaatgacccatgcgcagttgggctctggatacggcgctgtctatagcaagttggccagtctggcctcctgttcctctgctggacctggggtaggctgcaggggtgggcagaagcccctcttaaattgtggttgccatggtaccgagggactcattcctggggctcgctgggacctccctaaacccttcctggaagaaaactggaaccaactctgccctacctccctgcactaaccagctttgaggatggcactgaagaacccttggagcaaacatacctcccttgtgactcccacatcaaccattaaagttatttaacagcagccttcacctggctcctgaggaaaaaaaaaaaaaaaaaa

SEQ ID NO: 5760 - DNA, 1650 bp, Homo Sapiens
  NM_033050
gtcagaagctatatccagctgctggcagagttcctgtcaagggatcaagtcttccaacagaatggttatggtttaactcagcagaatttgttgaacaactacgacatgctggggatcatggcatggaatgcaacttgcaaaaactggctggcagcagaggctgccctggaaaagtactacctttccattttttatgggattgagttcgttgtgggagtccttggaaataccattgttgtttacggctacatcttctctctgaagaactggaacagcagtaatatttatctctttaacctctctgtctctgacttagcttttctgtgcaccctccccatgctgataaggagttatgccaatggaaactggatatatggagacgtgctctgcataagcaaccgatatgtgcttcatgccaacctctataccagcattctctttctcacttttatcagcatagatcgatacttgataattaagtatcctttccgagaacaccttctgcaaaagaaagagtttgctattttaatctccttggccatttgggttttagtaaccttagagttactacccatacttccccttataaatcctgttataactgacaatggcaccacctgtaatgattttgcaagttctggagaccccaactacaacctcatttacagcatgtgtctaacactgttggggttccttattcctctttttgtgatgtgtttcttttattacaagattgctctcttcctaaagcagaggaataggcaggttgctactgctctgccccttgaaaagcctctcaacttggtcatcatggcagtggtaatcttctctgtgctttttacaccctatcacgtcatgcggaatgtgaggatcgcttcacgcctggggagttggaagcagtatcagtgcactcaggtcgtcatcaactccttttacattgtgacacggcctttggcctttctgaacagtgtcatcaaccctgtcttctattttcttttgggagatcacttcagggacatgctgatgaatcaactgagacacaacttcaaatcccttacatcctttagcagatgggctcatgaactcctactttcattcagagaaaagtgaggggcttgtgaaacagattgttctacagatgaatctgtaagccagttacagtttgccttaactcatagacatcaatcagagagtgtcacagatttaaccttgatctaaagacaagttgtacccagagtatgtgaaaagaatgggacgacaagaatgtactggtttcttcctctaagaattgaaaggagttgaactgccttatgtttgggcatgtaactccaaaatactaggtagtataaggctttctcaatcagtgcaaaaatggaagatatataaagcaacaagttgtctgcatttgatcactggtcagattgtaaaaaaaaaaaaaattgttttggcaacattctctatgttattcttattcacatgatcctagaactttatgtgagaactgaatagcagaagatatattattaaatagtttttggaagttgtgctgttaagcaaatgtaaagtcaacagtaacaatgattaagaaaggaatataatgagttcaaagatatctatctgatatattttttatattcatcatgaatcggg

SEQ ID NO: 5761 - DNA, 2518 bp, Homo Sapiens
  NM_033051
ctcgggaggtcactcggctgctgggcgggctgctgtcacaggcgctgcgtgccctggctctgctcgccactggccggcgcgctcccggcgcacggagcacactcgcgctcccggcgcacggagcacactcgcgctccgggactgaaacctgagcagccgtagcagccgaatttgggagcatatccttgtcactgcagccagaaagcccttcgatccccatcagagaggtcacatgagccccgaggtcacctgcccgcggaggggccacctgcctcgcttccacccgaggacctgggttgagcccgtggtggcctcgtcccaggtggctgcctccctctacgatgcggggctactcctcgtggtgaaggcgtcctacggaaccggaggctcctccaaccacagtgccagcccatcgccccggggggctctagaggaccaacagcagagagccatctccaatttctacattatctacaaccttgtggtgggcctgtcccccctgctgtccgcctacgggctgggatggctcagcgaccgctaccaccgaaagatctccatctgcatgtcgctgctgggcttcctgctctcccgcctcgggctgctgctcaaggtgctgctggactggccagtggaggtgctgtacggggcggcggcgctgaacgggctattcggcggcttctccgccttctggtccggggtcatggcgctgggatcgctgggctcctccgagggccgccgctctgtgcgcctcatcctcattgacctgatgctgggcttggcggggttctgcgggagcatggcttccgggcatctcttcaagcagatggctgggcactctgggcagggcctgatactgacggcctgcagcgtgagctgtgcctcgtttgccctgctctacagccttttggtgctaaaggtccctgagtcggtggccaaacccagccaggagctccccgccgtggataccgtgtctggcacggttggcacataccgcactctggatcctgatcagttggaccaacagtatgcagtggggcaccctccatctcctggaaaagcaaaaccccataaaaccaccattgccttgctctttgtgggtgctatcatatatgacctggcggtggtgggcacagtggacgtgatccctctttttgtgctgagggagcctctcggttggaaccaagtgcaggtgggctatggtatggctgcagggtacaccatcttcatcaccagcttcctgggtgtcctggtcttctcccgctgctttcgggacaccaccatgatcatgattgggatggtctcctttgggtcaggagccctcctcttggcttttgtgaaagagacatacatgttctatattgctcgagccgtcatgctgtttgctctcatccccgtcacaaccatccgatcagctatgtccaaactcataaagggctcctcttatggaaaggtgttcgtcatactgcagctgtccttggctctgaccggcgtggtgacatccaccttgtacaacaagatctaccagctcaccatggacatgtttgtgggctcctgctttgctctctcctcctttctctccttcctggccatcattccaattagcatcgtggcctataaacaagtcccattgtcaccatatggagacatcatagagaaatgaagatgcttacctgcaggaactgaaaacatcagccatggccaggcccccagaagacaaaagaagggaccagggaactggtgacctaagcaacccactgcttaagaaacctgcgttccagccagagttggcctcagaatgacctgctctggctcagggatccctggtggatggggaaaagcactttcctggtgatggaaaaacgttctcagctttaagacacccccattaggcagacactgggttctgtgacagcagagcatgaccttaagggttacaggcaggctgcacacagcagtcccaggccctgtgaggggcttcagactccagctacagcgagcctgccccttttcttcaagggactgtcttgagggctccaaagtatagctaactagtcacctgggtgctgtgctgaaagtcccatgggagaactcaaagcgtgcattatcacagcctgaggggaatgtggaagggatgttttgtaagaactaccaacagttttgcacgaacaatgtcttttaaattaaaataaaaccttgaaaaaagtcagctttctttcctgagtcttccttacctacaaacactcaggagggggatggagctcaggcccttgtcttctgggtagttttgttactactgttgcttttaagaagcaaatgtcacaaggctttcttcaatgggatgttcaattgagtacttccagtcaacagtgcttcccaaagtgggtggtgtgaaggaagaggaggtacattaagagctattttatttgaggtagtcatttttataaccttgtttacttggatttataaaagcagactcacctaataaaatcaacattcattgtaaaaaaaaaaaaaaaaa

SEQ ID NO: 5762 - DNA, 1907 bp, Homo Sapiens
  NM_033067
acttgctctgcagctcccagaggtggtggttgtgttacgaaggctgaccctgccaatggccgacaaaatggtgcgcacccccaagtgctcgagatgcaggaaccatggcttcctggtgcccgtcaagggacacgcgggcaaatgccgctggaagcagtgcctctgcgagaagtgctacctgatctccgagcgccagaagatcatggccgcgcagaaggtgctcaagacgcaggccgccgaggaggagcaggaggcggccctgtgtgcgcaggggcccaagcaggcctccggggctgcggccgccgcccccgcccccgtccccgtcccggccgcgagcctccgcccgctgtccccggggactccctccggagacgccgacccgggacccgagggccgcgcggccgcttgcttcttcgagcagcccccgcggggccggaaccccggcccgagagccctccagccggttctgggcggccgcagccacgtggagccgagcgagcgagccgccgtggcgatgcccagccttgcgggacccccttttggggcggaggccgcaggcagtggctaccctggccccctagacctgcgcaggccgatgcggaccgtgcccggcccactgttcaccgactttgtgcgccctctgaacatcaacccggaccgtgcactgggccctgagtaccctggtggctccagcatgcacccctactgcccgttcccgctgggctacctggacgcccctcctggcgtccccctgcagcagggcttccggcatgtgtcccgcagccagtaccaaggcggaggcttggtgtcagaaccaggaggagacttccagccaagctactacctgccgccgccgccgccgccactgccgccccttccaccgcttccaccgcagccccagttcctcccgccaggctacctctctgcgctccacttcctccccccgccaccgccaccaccacctccatcatctttctcactgaccgtcctgtttgatactgacaaggagaacactgatgaccaggatgcagaggtactgtcgggtgagcccagccagccatcgtctcaggagcagtccgactaggccccaggcccgccctcctggccagcagagtggggcactggggggcaacagcaacagttttcctgtcttcattcagtgatatgtagggaggaaggaggttgatagcatagatggcaactgattcccagtttaagataggaggaaggagagcaatttctaagtttcaatcctgcgctgtacagttgaagaagagtgtggaggaagctattaccaggggagggccagggctctgaggagtgggcgctgggagaagctcccatttaggaatgaatttaactgtccttgggttacactaccatttattggaacaagccccagaggcagtatttgatttcctcaggccccactctaggacaggaggcaccatctatttcagccttctgctgcctttgcctggtcctccaggttgctgggggcaccacagacatcaagattccagttcatccaggtggctggagccagcagccaggaccagggtcgttgacagcaggttctgcagcatcctgccttgctgctctgtcccccacatcttcctggccacagccccttgcccctcctctaaggggttttactagcaagcatcctggctgctggggctacttcattccccctccataaagtttcagccattatgggcactggttttaaaaaatttattagtttgactatttgatggttttatagtgattgccaactttaaaaagtaggctgttcataagcactgatgcagtccctagggaatagaatggtgcttctgatcacctgtgacatgaacagtttcttctgtgaggacagttggctattgaaataaaatgagcaatgg

SEQ ID NO: 5763 - DNA, 1809 bp, Homo Sapiens
  NM_033070
ccgtgcacgtgcgcacggcgacggccggatggctgcgtggggctgtgtggctgcgctcggcgcggcgcgtgggctttgctggcgggcggcgcgcgcggctgcggggctccagggccgccccgcccgcaggtgctatgctgtgggccccgctcagagcccacccacctttgggttcctgttggacatcgatggagtgcttgtgcggggccacagagtgatccctgctgctctgaaagccttccgaaggctggtgaactcccaggggcagctgcgggtgcccgtggtttttgttacaaatgctgggaacatcttacaacacagcaaagcccaggagctgtcagccctgctggggtgcgaggtggatgcagaccaagttatcctctctcacagccccatgaagctcttctccgagtaccatgagaagcggatgctggtgtctggacaggggcccgtgatggaaaatgcccagggactgggcttccgaaatgtcgtcaccgtggatgagctgcggatggcctttcctctgcttgacatggtggacctggagcggcggctaaagaccacgcccctcccgaggaatgacttcccccgcattgaaggggtgctcctcctaggggagccggtccgctgggagaccagcctgcagctgatcatggatgtcctcctcagcaatgggagccctggggctggcctggcaacacccccctacccccacctccccgtcctagccagcaacatggatctcctgtggatggctgaagccaagatgcccaggtttggacatggcacctttctgctgtgcctggaaaccatttaccagaaagtgacgggcaaggagctgagatacgagggcctgatgggcaaacccagcatcctcacttaccagtatgccgaggacctgatcaggcgacaggcggagaggcggggctgggccgcccccatccggaagctctatgctgtgggtgataaccctatgtctgacgtatacggcgccaacctgttccaccagtacctgcagaaggcaacgcatgatggggcgccagaactaggggccgggggcacacggcagcaacagccctcagcaagccagagctgcatctccatcctggtgtgtacaggcgtctacaatcccaggaacccacagtccacggagcctgtccttggaggaggggagcctccattccacgggcaccgagacttatgcttcagtccagggctcatggaggcctcccacgtggtgaatgacgtgaatgaggctgtgcagctggtcttccgcaaggagggctgggctttggagtgagggcagtgcggtggaggtgagggggtgagcctggacctgtgggcgagtcccattggctgggctctggcctgatcactgggctcaggtcagggcttggttcccttgccacccttcttgctgccccatgagtgtggcattactggtcacttggaagaagacagtgactctttttccctgctgggtagcattttgtatggaacggttggaattttctgggcccagttcccacgtgcctttcgtggcagtctaacctcaggccattctcttcccctgtgtgcctcagtgtccttctcatttcagtagggacttctgaaatgggggaggcagtgtggaatactgtggatgtctgtgcagagcctttgccggcactgaaggcatgcagcctgtcggcagagtgtcttaacaccagatgctactttttactgtattgtagtttattgcccggagatgtggggctttttttttaaataaaataatcataataaatgttcatgatgctgaaaaaaaaa

SEQ ID NO: 5764 - DNA, 941 bp, Homo Sapiens
  NM_033082
agctcctggaggcggaggccgcgggtgggggcctagtggagtgaggggtaacaagatggcgaccgagacggtggagctccataagctaaagcttgccgaactaaagcaagaatgtcttgctcgtggtttggagaccaagggaataaagcaagatcttatccacagactccaggcatatcttgaagaacatgctgaagaggaggcaaatgaagaagatgtactgggagatgaaacagaggaagaagaaacaaagcccattgagctccctgtcaaagaggaagaaccccctgaaaaaactgttgatgtggcagcagagaagaaagtggtgaaaattacatctgaaataccacagactgagagaatgcagaagagggctgaacgattcaatgtacctgtgagcttggagagtaagaaagctgctcgggcagctaggtttgggatttcttcagttccaacaaaaggtctgtcatctgataacaaacctatggttaacttggataagctgaaggaaagagctcaaagatttggtttgaatgtctcttcaatctccagaaagtctgaagatgatgagaaactgaaaaagaggaaggagcgatttgggattgtcacaagttcagctggaactggaaccacagaggatacagaggcaaagaagaggaaaagagcagagcgctttgggattgcctgatgaaaagttcctgatactttctgttctccagtgttttccatttctctccttcttcttggtcacatatatgcctaaatgcacagtcatgtgcctacgtcctgcctcgcaatgagggagcatgtaccccaggtacatccatgaactgcggcagcagtttgacttattgctgtttcagctttaaggttgttgtgtttttgtttttgattatgttgcttgttaataaaaaaaaatagaaaagagaaaaaaaaaaaaa

SEQ ID NO: 5765 - DNA, 3290 bp, Homo Sapiens
  NM_033088
ggggtgtggagcagccaagatggagccggcagtcggcggtccgggcccactgatcgtgaacaacaaacagccccagcccccgccacctccgccgccggcagccgcacagccaccacccggggcaccgcgggccgccgcgggcctcctgcctgggggcaaagcccgcgagttcaaccgcaaccagcgcaaagactcagagggctattcggagtcaccagacctggagtttgagtatgctgacacagacaagtgggctgcagagctctcggagctttacagctacacggaagggccagaattcctgatgaatcgaaaatgctttgaggaggacttccggatccatgtgacagacaagaagtggactgagctggataccaaccagcaccggacccatgccatgaggctcctggatggcttggaagtcactgccagggagaagagactcaaggtggctcgagcaattctctatgttgctcaaggcacgtttggggagtgcagctcggaggcagaggtgcagtcctggatgcgctacaacatctttctcctcctggaggtgggcacgttcaatgctttggtggagcttctgaacatggaaatagacaacagtgccgcctgcagcagtgctgtgaggaagcctgccatctccctggctgacagcacagacctcagggtcctgctcaacatcatgtacctgatagtggagaccgttcatcaggagtgtgagggtgacaaggctgagtggaggaccatgcggcagaccttcagagccgagctgggctccccgctgtacaacaatgagccatttgccatcatgctgtttgggatggtgaccaaattttgcagtggtcacgcccctcactttcccatgaagaaagttctcttgctgctctggaagacagtattgtgcacgctaggcggctttgaggagctgcagagcatgaaggctgagaagcgcagcatcctgggcctccccccgcttcctgaggacagcatcaaagtgattcgcaacatgagagcagcctctccaccagcatctgcttcagacttgattgagcagcagcagaaacggggccgccgagagcacaaggctctgataaagcaggacaacctagatgccttcaacgagcgggatccctacaaggctgatgactctcgagaagaggaagaggagaatgatgatgacaacagtctggagggggagacgtttcccctggaacgggatgaagtgatgcctcccccgctacagcacccacagactgacaggctgacttgccccaaagggctcccgtgggctcccaaggtcagagagaaagacattgagatgttccttgagtccagccgcagcaaatttataggttacactctaggcagtgacacgaacacagtggtggggctgcccaggccaatccacgaaagcatcaagactctgaaacagcacaagtacacgtcgattgcagaggtccaggcacagatggaggaggaatacctccgctcccctctctcagggggagaagaagaagttgagcaagtccctgcagaaaccctctaccaaggcttgctccccagcctgcctcagtatatgattgccctcctgaagatcctgttggctgcagcacccacctcaaaagccaaaacagactcaatcaacatcctagcggacgtcttgcctgaggagatgcccaccacagtgttgcagagcatgaagctgggggtggatgtaaaccgccacaaagaggtcattgttaaggccatttctgctgtcctgctgctgctgctcaagcactttaagttgaaccatgtctaccagtttgaatacatggcccagcacctggtgtttgccaactgcattcctttgatcctaaagttcttcaatcaaaacatcatgtcctacatcactgccaagaacagcatttctgtcctggattaccctcactgcgtggtgcatgagctgccagagctgacggcggagagtttggaagcaggtgacagtaaccaattttgctggaggaacctcttttcttgtatcaatctgcttcggatcttgaacaagctgacaaagtggaagcattcaaggacaatgatgctggtggtgttcaagtcagcccccatcttgaagcgggccctaaaggtgaaacaagccatgatgcagctctatgtgctgaagctgctcaaggtacagaccaaatacttggggcggcagtggcgaaagagcaacatgaagaccatgtctgccatctaccagaaggtgcggcatcggctgaacgacgactgggcatacggcaatgatcttgatgcccggccttgggacttccaggcagaggagtgtgcccttcgtgccaacattgaacgcttcaacgcccggcgctatgaccgggcccacagcaaccctgacttcctgccagtggacaactgcctgcagagtgtcctgggccaacgggtggacctccctgaggactttcagatgaactatgacctctggttagaaagggaggtcttctccaagcccatttcctgggaagagctgctgcagtgaggctgttggttaggggactgaaatggagagaaaagatgatctgaaggtacctgtgggactgtcctagttcattgctgcagtgctcccatcccccaccaggtggcagcacagccccactgtgtcttccgcagtctgtcctgggcttgggtgagcccagcttgacctccccttggttcccagggtcctgctccgaagcagtcatctctgcctgagatccattcttcctttacttcccccaccctcctctcttggatatggttggttttggctcatttcacaatcagcccaaggctgggaaagctggaatgggatgggaacccctccgccgtgcatctgaatttcaggggtcatgctgatgcctctcgagacatacaaatccttgctttgtcagcttgcaaaggaggagagtttaggattagggccagggccagaaagtcggtatcttggttgtgctctggggtgggggtggggtgtttctgatgttattccagcctcctgctacattatatccagaagtaattgcggaggctccttcagctgcctcagcactttgattttggacagggacaaggtaggaagagaagcttcccttaaccagaggggccatttttccttttggctttcgagggcctgtaaatatctatatataattctgtgtgtattctgtgtcatgttggggtttttaatgtgattgtgtattctgtttacattaaaaagaagcaaaaataaaaaaaaaaaaaaaaaaaaaaaaaaaaaa

SEQ ID NO: 5766 - DNA, 2773 bp, Homo Sapiens
  NM_033089
ggaggatgctgggaaggaggtaaaatggccaccggcggcggcgcggaggaagagaggaaacgggggcggccgcagcttctgccccccgcgcggcccgcggcccggggcgaggaggccgacggcggccgcgagaagatgggctgggcccaggtggtgaagaatctagccgagaagaagggcgaattccgcgagccgcggccgccgcggcgggaggaggaaagcggcggcggtggagggagcgccgggctcggcggccccgcgggcctggcggcgccggacctcggcgacttcccaccggctggccgcggggatccgaagggccgtcggagagatccggccggcgaggcggtggacccccgcaaaaagaagggcgctgcggaggcgggcaggaggaagaaggccgaggcggcggcggccgccatggcgaccccggccaggcccggcgaggccgaggacgcggccgagcggcccctccaggatgagccggcggcggcggcaggcccgggcaagggtcgcttcctcgtccgcatctgtttccagggagacgagggcgcctgcccgacccgggacttcgtggtaggagcgcttatcctgcgctccatcggcatggacccgagcgacatctacgcggtcatccagatcccgggcagccgcgaattcgacgtgagcttccgctcagcggagaagctggccctgttcctacgcgtctacgaggagaagcgggagcaggaggactgctgggagaactttgtggtgctggggcggagcaagtccagcttgaagacgctcttcatcctcttccggaacgagacggtggacgtggaggacattgtgacttggctcaagcgccactgcgacgtgctggccgtgccggtgaaagtgaccgacaggtttgggatctggaccggggagtacaaatgcgagatcgagctgcgccagggggagggcggggtcaggcacttgccaggggccttcttcctgggggccgagaggggctacagctggtacaaggggcagcccaagacatgctttaaatgtggttcccggacccacatgagcggcagctgcacgcaggacaggtgcttcaggtgcggggaggaggggcacctgagcccttactgccggaagggcatcgtgtgcaacctctgtggcaagcgaggacacgcctttgcccagtgtcccaaagcagtgcacaattccgtggcagctcagctaaccggcgtggccgggcactaaacacccgcctgcctgccagggtgaacacacagccagcttatccctcttaagtgccaaaacttttttttaaaccattttttatcgtttttgaaggagatctttttaaaacctacaagagacatctctctatgccttcttaaaccgagtttactccatttcagcctgttctgaattggtgactctgtcaccaataacgactgcggagaactgtagcgtgcagatgtgttgcccctcccttttaaaattttattttcgtttttctattgggtatttgttttgtttcttgtactttttctctctctccttgcccccctcccgccctccccgccccataccttttcttcccctggattttcaccctttgggctgccttgctcatctttatgccccagcactaggtacggggcccaacacgtggtaggcactccatcagtgtttgctgaattgaaaacattgttgactgtggcttctatcagagtgtctaccttttgcagctcttcccctccctcatttaatttgctgcttttaatctacgtggtctgagaatttgtgaaaccagtgttgttagaagtgtatataatctgaatcaataagctctgaatggtggccaagggcctctcttatggcacaaagatgcatggacttcatgacagctcttttggtggctcagaagccattttttatagaatcatggaatctagaatattcctgctggaaagaacctgagagttggtttggaccaattccctggttttccagcagatgaaacaggcccaaagaggttaaatgactgggtgaaaatcacatagctgtctggtgccagagccagcctatagtagagtcccctgaccccaagcccggtgctcattccactacctctcacacttcacaacaatttcctcaacacttgagggcccagaaagtctgatctctccagaatgatcagcccagaggaatgctgagaaatcacctggaggagggagcagaaagagaaggtttttaaggaggggcttctgaatacttgggagatacggaacggaccaaggaccacactccagggtgcattcgttgctccctggggcaccacttctggattacagtgtgccaggtcctttggaggccctaccccttccccattcattgccaccagtgagaaatgggggtgcccctgtgtaaagaaacctaccaaaggtttacatttgcaccttagcctcaatagctacgaaccctagagaagcagctagctggagctcatgtgcaactcctgattctcaggagaaagatggattttaacccaaaattatgagtgagctgttaactctaaaatgtacttgggagataggccaagcgagaggtcatgggccaactaagtgttatccagtagaaaagacagtacactgcttttcttttagtgtttgcttttcctttgctatatgttttgctatttccttgtggcttagaatgtaaaattgattgttaaaagttttgttctgaataaatatttatcttttgtattgctaaaaaaaaaaaaaaaaaa

SEQ ID NO: 5767 - DNA, 3380 bp, Homo Sapiens
  NM_033091
cggtcttgcgcgctcaggccgggcaacgtccgtgcgttctttttgggtcctgaaccccggaagagaaactgcgttgtacccttttacgtgaggcggtgacggcggttcggaagtcgtctggcctccccgcggccgctcgcagcttgctggcctctcccgcgcctcacgtcggactccgtctccgcggcagggaagcagcatggaagctgaggacatccaggaggagttgacctgccccatctgcctggactatttccaggacccggtgtccatcgagtgcggccacaacttctgccgcggctgcctgcaccgcaactgggcgccgggcggcggcccgttcccctgccccgaatgtcggcacccatcggcgcccgccgcgctgcgacccaactgggccctggccaggctgactgagaagacgcagcgccggcgcctgggccccgtgcccccgggcctgtgcggccgccactgggagccgctgcggctcttctgcgaggacgaccagcggccagtgtgcctggtgtgcagggagtcccaggagcaccagactcacgccatggcacccatcgacgaggccttcgagagctaccgggagaaacttcttaagtctcagcgtaatctcgtggccaagatgaagaaagtcatgcatttacaggatgtagaagtgaagaacgccacacagtggaaggataagataaagagtcagcgaatgagaatcagcacggagttttcaaagctgcacaacttcctggttgaagaagaggacctgtttcttcagagattgaacaaagaagaagaagagacgaagaagaagctgaatgagaacacgttaaaactcaatcaaactatcgcttcattgaagaagctcatcttagaggtgggggagaagagccaggctcccaccctggagctgcttcagaatccaaaagaagtgttgaccaggagtgagatccaggatgtgaactattctcttgaagctgtaaaggtgaagacagtgtgccagataccattgatgaaggaaatgctaaagcgattccaagtggctgtaaacctagctgaagacacagctcatcccaaactcgtcttctcccaggaagggagatacgtgaaaaatacagcatcagccagttcttggccagtgttttcttcagcatggaactactttgctggatggaggaatcctcagaagactgcttttgtagagagatttcagcacttaccctgtgttctgggaaaaaacgttttcacctcagggaaacattactgggaagttgagagtagagatagtctggaggttgctgttggggtgtgtcgggaggacgtcatgggaattactgatcgttcaaaaatgtccccagatgtgggcatctgggcgatttattggagtgctgctggctattggcccttgataggcttccctggaactcccacccagcaagagccagctctccaccgagtgggggtttacctggatcgtgggactgggaatgtctccttctacagcgctgtggacggagtgcacctgcacaccttttcttgttcttctgtctcacgcctccggccatttttttggttgagtccattagcatctttagtcattccaccagtgactgataggaaatgaggcttttcttcccctgaccaaaactccttccctgtagtccagctgagggacacacatccctgggccctcttctgcccttcatgtctctatcctggatggtccatcttctgggtctccctaacggtaccgtttggtatctgccctttgtgtgcttcacaagaggcagtcccatgggaggtgggtctggccaatggagatgggacaggaaattttccaagacgcttttgggaaatctttttgtagcttttaaagagatgtgcggggaagacatatggatgttagcagccatattggaactgagaacacaggaatggtggaaaggtagaagaaacagagtttttgttgccgttgtgaaattgttgaaatttccttcatgccaagcttcttgttatatgagataattacgcccttattgtataagacaattttagttgtatttggttacttgcagcctgaagtaccgtaactgcactaaagggacgtagtgtgaacatcccgcagtataggcttaagtcacttttgtgaaatttgacaaaggcatagaatctttttctatccagtcaggcattgcctattctttccagtaactactgattcccccacttttctgtcttagaaaattgtgggaatcccccctcactctgcctatgttgcactctctctcttcccaaccataactctgccctcagctattaactgtgctgtgtatttatcaagttggtatgttgtatgtacagtgttattcatgtcatcatgagaatgttgaacgcttgttaaatatcttttgctagcctcttcatatgctgttgcatatgactctcatcacaactcagtgagatggaaagtcaaatcctatttgtacaaatgagaaaactgaactctttagagtaactagctcagtattggccagctggtaaatggcagtgttgggattaaaatccagttcttatctactctccctttattcagaagcatttattggatgttgatctttgtttcaggttttgattttgttacttttttatactgtgtatattttcctcagtctacccttctgctctagattgtctggactcaggagattgtggcagttactggatagttatttttaagataatgattgcttttctctgtttatataagtcatgtgtacttattgtagaaagtttgtaagatgcaaaaagtataaaaattaaagttatgcactactaacatttcaatatattttctcccagattttcagtaaagactttcaggcagtgatttaacgaggattttattttaacttatattttagtttaaggggaacacgtgcaggtttgttctatagatcaattacatgtcacaggggtttggtgtacatattatttcattacccaggtaataagcatagtacccaatagatacttttttgataccccaccctcctccaccctctaccctcaagtagtccctggtgtctgttgttcccttttttgtgtccatgggtactcaatgtttagctctcccttatacgtgagaacatgtgatgtttggttttctgttcatgtgttggtttgcttagggtaatggcctccagctccatccatgttgctgcaaagacatgatctcattctttttttatggctgcatagtattccatggtgtatatgtactatgttttctttatccagtctactgttgatgggcatttaggttgattccatgtctttgctattgtgaatagtgctgcaatgaatatatacatgcatatgtc

SEQ ID NO: 5768 - DNA, 3659 bp, Homo Sapiens
  NM_033092
agtttatctttcactttcctgccctgagtgtgagcaagaatttcctgcggttcctctaggaaaattcctttgtgcagatcaggcccgtggattggtgagtgaatcctaaccacgtcttccctggcctgtcttcactcttctccccagaatcaccacttctgcactggtgtctgaaggtgtattgagtgattttgtggagggcagaagtaggaagtctttgggacaaaactgtatttaccttgggatctgtgaacaagaggaacctcagcagccaggacaggcaggagcagtggaatagctactatggcttctggaatcctggttaatgtaaaggaggaggtgacctgccccatctgcctggaactcctgacacaacccctgagcctggactgcggccacagcttctgccaagcatgcctcactgcaaaccacaagaagtccatgctagacaaaggagagagtagctgccctgtgtgccggatcagttaccagcctgagaacatacggcctaatcggcatgtagccaacatagtggagaagctcagggaggtcaagttgagcccagaggggcagaaagttgatcattgtgcacgccatggagagaaacttctactcttctgtcaggaggacgggaaggtcatttgctggctttgtgagcggtctcaggagcaccgtggtcaccacacgttcctcacagaggaggttgcccgggagtaccaagtgaagctccaggcagctctggagatgctgaggcagaagcagcaggaagctgaagagttagaagctgacatcagagaagagaaagcttcctggaagactcaaatacagtatgacaaaaccaacgtcttggcagattttgagcaactgagagacatcctggactgggaggagagcaatgagctgcaaaacctggagaaggaggaggaagacattctgaaaagccttacgaactctgaaactgagatggtgcagcagacccagtccctgagagagctcatctcagatctggagcatcggctgcaggggtcagtgatggagctgcttcagggtgtggatggcgtcataaaaaggacggagaacgtgaccttgaagaagccagaaacttttccaaaaaatcaaaggagagtgtttcgagctcctgatctgaaaggaatgctagaagtgtttagagagctgacagatgtccgacgctactggggtaaggagaagtcacattatcataagccaccctgcggcttatcattattattatctttatcttttagaattttatgttctctattaggctcatgttttaagatttatgattctccttccaagacacacataacttacccctccttataacttctaaacaaggttcctcccagttttctctcaagtctttatcaagatttctctcatatcacaaataaagttacattatatcccttagctgacctgttaatttttctacagttgatgtgacagtggctccaaacaacatttcatgtgctgtcatttctgaagataagagacaagtgagctctccgaaaccacagataatatatggggcacgagggacaagataccagacatttgtgaatttcaattattgtactggcatcctgggctctcaaagtatcacatcagggaaacattactgggaggtagacgtgtccaagaaaactgcttggatcctgggggtatgtgctggcttccaacctgatgcaatgtgtaatattgaaaaaaatgaaaattatcaacctaaatacggctactgggttatagggttagaggaaggagttaaatgtagtgctttccaggatagttccttccatactccttctgttcctttcattgtgcccctctctgtgattatttgtcctgatcgtgttggagttttcctagactatgaggcttgcactgtctcattcttcaatatcacaaaccatggatttctcatctataagttttctcactgttctttttctcagcctgtatttccatatttaaatcctagaaaatgtggagtccccatgactctgtgctcaccaagctcttgaaccttcttacacactcagccccttctgtacagcacctcttgtccaggtgcatctcatacacctgaactcatttgcatcattttaaccatcttttccttgctgtctcccttctttctatttgaacgtccttcactcatcagtaaaatgtaataattgccttgtgccatattgtccccaatattttattgacatttgatagcaatttttttcatcattttccgtactcctaaggaaaactgacctatacctcataaaatgagaccgctatttaggtattacttctgccagatatttatcacccaattgcctctgacactgactaagaagatgaagaaaagcttttcaacagcctttctatatcatcgtgtgataattgttcaccaatgaatgagtccttagccctgtgtcagtttaccctcgatgcccttatttgtgagttaaagagaaaatatcataaatggtatactcttaagtatagaggttttgtatctagaggatctcagttcaactcctgtctctccatataccagcagtgtaactgtgaataacatacttaaatggctgtgcttatttccttttcttttcttttttctttttttttttttttgagatgaagttttgctcttgttccccaggctggagtgcaatggcacgatctcggttcactgcaacctccacctctcagattcaagcaattctcctgcctcagcctcccaagtagctgggattacaggtgcccaccaccacccctggctaaatttgtattttcagtagagacggggtttccccatgttggttaggctcgtctagaacctctgacctcaggtgatccacccgcctcggcctcccaaagtgctgggattacaggcgtgagccacggcgcccagcctgtgcttattttcttaaaataatttttgtattaaaaacttcacattaaataagtgctaatgttttattgcatagtagggtgactagagttaacaataacctattgcatatattttgaaatagctagaagagaggattttgaaagttctcaacacaaagaaatgacacatatttgaggtgatggatatgctaattaccctggttcggttattacgcaatgtatacatgtatcaaaacatcacactgtaccacataaatatgtatatttattatttgtcaattaaaagcaaaataaaacaaaaaaccttcatctaatactttggatcattgtgaaaaaataaattcctgaagtataaagcatctatctaagtgtcttgatctaataagtacttgttctacaaattattgaaaaacataaactctgttaatgtctcatggaacaggttgtgccttcagggaaactaggattggatttactaaattctcattttttagatctcagatactactgtcaaaatgacttcaattctgccttctatatataatacacacatatatttaggattttattgtaattctagtgttgctacatattagtctttatcaaacaaactgaattatgtgggaatcagtttattaattgtaaaaaataattataataaaattagctgatgtagttttttaaaagttaaacgagttttttgaatagcttcactcatttctagc

SEQ ID NO: 5769 - DNA, 3398 bp, Homo Sapiens
  NM_033102
aacctggagatttaaaagccgccggctggcgcgcgtggggggcaaggaagggggggcggaaccagcctgcacgcgctggctccgggtgacagccgcgcgcctcggccaggatctgagtgatgagacgtgtccccactgaggtgccccacagcagcaggtgttgagcatgggctgagaagctggaccggcaccaaagggctggcagaaatgggcgcctggctgattcctaggcagttggcggcagcaaggaggagaggccgcagcttctggagcagagccgagacgaagcagttctggagtgcctgaacggccccctgagccctacccgcctggcccactatggtccagaggctgtgggtgagccgcctgctgcggcaccggaaagcccagctcttgctggtcaacctgctaacctttggcctggaggtgtgtttggccgcaggcatcacctatgtgccgcctctgctgctggaagtgggggtagaggagaagttcatgaccatggtgctgggcattggtccagtgctgggcctggtctgtgtcccgctcctaggctcagccagtgaccactggcgtggacgctatggccgccgccggcccttcatctgggcactgtccttgggcatcctgctgagcctctttctcatcccaagggccggctggctagcagggctgctgtgcccggatcccaggcccctggagctggcactgctcatcctgggcgtggggctgctggacttctgtggccaggtgtgcttcactccactggaggccctgctctctgacctcttccgggacccggaccactgtcgccaggcctactctgtctatgccttcatgatcagtcttgggggctgcctgggctacctcctgcctgccattgactgggacaccagtgccctggccccctacctgggcacccaggaggagtgcctctttggcctgctcaccctcatcttcctcacctgcgtagcagccacactgctggtggctgaggaggcagcgctgggccccaccgagccagcagaagggctgtcggccccctccttgtcgccccactgctgtccatgccgggcccgcttggctttccggaacctgggcgccctgcttccccggctgcaccagctgtgctgccgcatgccccgcaccctgcgccggctcttcgtggctgagctgtgcagctggatggcactcatgaccttcacgctgttttacacggatttcgtgggcgaggggctgtaccagggcgtgcccagagctgagccgggcaccgaggcccggagacactatgatgaaggcgttcggatgggcagcctggggctgttcctgcagtgcgccatctccctggtcttctctctggtcatggaccggctggtgcagcgattcggcactcgagcagtctatttggccagtgtggcagctttccctgtggctgccggtgccacatgcctgtcccacagtgtggccgtggtgacagcttcagccgccctcaccgggttcaccttctcagccctgcagatcctgccctacacactggcctccctctaccaccgggagaagcaggtgttcctgcccaaataccgaggggacactggaggtgctagcagtgaggacagcctgatgaccagcttcctgccaggccctaagcctggagctcccttccctaatggacacgtgggtgctggaggcagtggcctgctcccacctccacccgcgctctgcggggcctctgcctgtgatgtctccgtacgtgtggtggtgggtgagcccaccgaggccagggtggttccgggccggggcatctgcctggacctcgccatcctggatagtgccttcctgctgtcccaggtggccccatccctgtttatgggctccattgtccagctcagccagtctgtcactgcctatatggtgtctgccgcaggcctgggtctggtcgccatttactttgctacacaggtagtatttgacaagagcgacttggccaaatactcagcgtagaaaacttccagcacattggggtggagggcctgcctcactgggtcccagctccccgctcctgttagccccatggggctgccgggctggccgccagtttctgttgctgccaaagtaatgtggctctctgctgccaccctgtgctgctgaggtgcgtagctgcacagctgggggctggggcgtccctctcctctctccccagtctctagggctgcctgactggaggccttccaagggggtttcagtctggacttatacagggaggccagaagggctccatgcactggaatgcggggactctgcaggtggattacccaggctcagggttaacagctagcctcctagttgagacacacctagagaagggtttttgggagctgaataaactcagtcacctggtttcccatctctaagccccttaacctgcagcttcgtttaatgtagctcttgcatgggagtttctaggatgaaacactcctccatgggatttgaacatatgaaagttatttgtaggggaagagtcctgaggggcaacacacaagaaccaggtcccctcagcccacagcactgtctttttgctgatccacccccctcttaccttttatcaggatgtggcctgttggtccttctgttgccatcacagagacacaggcatttaaatatttaacttatttatttaacaaagtagaagggaatccattgctagcttttctgtgttggtgtctaatatttgggtagggtgggggatccccaacaatcaggtcccctgagatagctggtcattgggctgatcattgccagaatcttcttctcctggggtctggccccccaaaatgcctaacccaggaccttggaaattctactcatcccaaatgataattccaaatgctgttacccaaggttagggtgttgaaggaaggtagagggtggggcttcaggtctcaacggcttccctaaccacccctcttctcttggcccagcctggttccccccacttccactcccctctactctctctaggactgggctgatgaaggcactgcccaaaatttcccctacccccaactttcccctacccccaactttccccaccagctccacaaccctgtttggagctactgcaggaccagaagcacaaagtgcggtttcccaagcctttgtccatctcagcccccagagtatatctgtgcttggggaatctcacacagaaactcaggagcaccccctgcctgagctaagggaggtcttatctctcagggggggtttaagtgccgtttgcaataatgtcgtcttatttatttagcggggtgaatattttatactgtaagtgagcaatcagagtataatgtttatggtgacaaaattaaaggctttcttatatgttaaaaaaaaaaaaaaaa

SEQ ID NO: 5770 - DNA, 3546 bp, Homo Sapiens
  NM_033103
ctctcgggccagcctcagccgccgcgcctcagtccgccgtccgccctccgcgcccgcgccgctagcatgaccgacgcgctgttgcccgcggccccccagccgctggagaaggagaacgacggctactttcggaagggctgtaatccccttgcacaaaccggccggagtaaattgcagaatcaaagagctgctttgaatcagcagatcctgaaagccgtgcggatgaggaccggagcggaaaaccttctgaaagtggccacaaactcaaaggtgcgggagcaagtgcggctggagctgagcttcgtcaactcagacctgcagatgctcaaggaagagctggaggggctgaacatctcggtgggcgtctatcagaacacagaggaggcatttacgattcccctgattcctcttggcctgaaggaaacgaaagacgtcgactttgcagtcgtcctcaaggattttatcctggaacattacagtgaagatggctatttatatgaagatgaaattgcagatcttatggatctgagacaagcttgtcggacgcctagccgggatgaggccggggtggaactgctgatgacatacttcatccagctgggctttgtcgagagtcgattcttcccgcccacacggcagatgggactcctgttcacctggtatgactctctcaccggggttccggtcagccagcagaacctgctgctggagaaggccagtgtcctgttcaacactggggccctctacacccagattgggacccggtgtgatcggcagacgcaggctgggctggagagtgccatagatgcctttcagagagccgcaggggttttaaattacctgaaagacacatttacccatactccaagttacgacatgagccctgccatgctcagcgtgctcgtcaaaatgatgcttgcacaagcccaagaaagcgtgtttgagaaaatcagccttcctgggatccggaatgaattcttcatgctggtgaaggtggctcaggaggctgctaaggtgggagaggtctaccaacagctacacgcagccatgagccaggcgccggtgaaagagaacatcccctactcctgggccagcttagcctgcgtgaaggcccaccactacgcggccctggcccactacttcactgccatcctcctcatcgaccaccaggtgaagccaggcacggatctggaccaccaggagaagtgcctgtcccagctctacgaccacatgccagaggggctgacacccttggccacactgaagaatgatcagcagcgccgacagctggggaagtcccacttgcgcagagccatggctcatcacgaggagtcggtgcgggaggccagcctctgcaagaagctgcggagcattgaggtgctacagaaggtgctgtgtgccgcacaggaacgctcccggctcacgtacgcccagcaccaggaggaggatgacctgctgaacctgatcgacgcccccagtgttgttgctaaaactgagcaagaggttgacattatattgccccagttctccaagctgacagtcacggacttcttccagaagctgggccccttatctgtgttttcggctaacaagcggtggacgcctcctcgaagcatccgcttcactgcagaagaaggggacttggggttcaccttgagagggaacgcccccgttcaggttcacttcctggatccttactgctctgcctcggtggcaggagcccgggaaggagattatattgtctccattcagcttgtggattgtaagtggctgacgctgagtgaggttatgaagctgctgaagagctttggcgaggacgagatcgagatgaaagtcgtgagcctcctggactccacatcatccatgcataataagagtgccacatactccgtgggaatgcagaaaacgtactccatgatctgcttagccattgatgatgacgacaaaactgataaaaccaagaaaatctccaagaagctttccttcctgagttggggcaccaacaagaacagacagaagtcagccagcaccttgtgcctcccatcggtcggggctgcacggcctcaggtcaagaagaagctgccctcccctttcagccttctcaactcagacagttcttggtactaatgtgaggaaacaaacatgttcaggccctgaacatttccggtgctgactcggccttaaacgtttgtgccataatggaaaatatctatctatctgttctcaaatcctgtttttctcatagtgtaaactcacatttgatgtgtttttatgaaggaaagtaaccaagaaacctctaggaattagtgaaaaaagaacttttttgaggtgtgttactatactgctgtaagttatttattatataaagtattgtaaatagaatagtgttgaagatatgaaatatggctatttttaatggtgacaattatgacttttagtcactattaaattggggttacctatatcagtacaatttgtagttgtttccaggtttggctaataatcattccttaacctagaattcagatgatcctggaattaaggcaggtcagaggactgtaatgatagaattaaattagtgtcactaaaaactgtcccaaagtgctgcttcctaataggaattcattaacctaaaacaagatgttactattatatcgatagactatgaatgctatttctagaaaaagtctagtgccaaatttgtcttattaaataaaaacaatgtaggagcagcttttcttctagtttgatgtcatttaagaattactaacacagtggcagtgttagatgaagatgctgtctacaaggtagataatatactgtttgatactcaaaacatttttcattttgtttaaagtagaagttacataattctatattttaagtcttgggtaaaaaagtagttttacattttataaagtaaagatgtaaatgattcaggtttaaagctctatttgacttcctttttttgtttgagatagcgtcttgctgtgttgcccaggctggagtgcagtggtgtgatctcagctcagtgcaacctccgccccctgggatcaagcgattctcctacctcagcctcccaaatagctgggactacaaggtgccctccagcatgcctggctgatttttgtatttttagttgaggtgaggtttcaccatgttggccaggcgggtttcgaaatcctgacctcaaatgatccacccacctcagcctcccaaagtgctgggattacaggcatgagccaccacaaccgtcccactattttactttttaaaatgacattcctactgattgatttttatcttgctataagttcgatgacaccgtgaatctaataaggttcactgttgacacagtacaagttacatagctaaaatacatagcattgaagactaattttaaggattgacaagagtttattttctattgtgcaatatcttaaaggaagcaaccacctttgggaaagtgtatctgctgctcctagggccatgcttgtatacatatttaaataaacatattcatttacccgaaaaaaaaaaaaaaaa

SEQ ID NO: 5771 - DNA, 4579 bp, Homo Sapiens
  NM_033109
ctgcggagtgagccaatcagggcacagcctgcgttgaccgcgtgccgggtgtcatggcggcctgcaggtactgctgctcgtgcctccggctccggcccctgagcgatggtcctttccttctgccacggcgggatcgggcactcacccagttgcaagtgcgagcactatggagtagcgcagggtctcgagctgtggccgtggacttaggcaacaggaaattagaaatatcttctggaaagctggccagatttgcagatggctctgctgtagtacagtcaggtgacactgcagtaatggtcacagcggtcagtaaaacaaaaccttccccttcccagtttatgcctttggtggttgactacagacaaaaagctgctgcagcaggtagaattcccacaaactatctgagaagagagattggtacttctgataaagaaattctaacaagtcgaataatagatcgttcaattagaccgctctttccagctggctacttctatgatacacaggttctgtgtaatctgttagcagtagatggtgtaaatgagcctgatgtcctagcaattaatggcgcttccgtagccctctcattatcagatattccttggaatggacctgttggggcagtacgaataggaataattgatggagaatatgttgttaacccaacaagaaaagaaatgtcttctagtactttaaatttagtggttgctggagcacctaaaagtcagattgtcatgttggaagcctctgcagagaacattttacagcaggacttttgccatgctatcaaagtgggagtgaaatatacccaacaaataattcagggcattcagcagttggtaaaagaaactggtgttaccaagaggacacctcagaagttatttaccccttcgccagagattgtgaaatatactcataaacttgctatggagagactctatgcagtttttacagattacgagcatgacaaagtttccagagatgaagctgttaacaaaataagattagatacggaggaacaactaaaagaaaaatttccagaagccgatccatatgaaataatagaatccttcaatgttgttgcaaaggaagtttttagaagtattgttttgaatgaatacaaaaggtgcgatggtcgggatttgacttcacttaggaatgtaagttgtgaggtagatatgtttaaaacccttcatggatcagcattatttcaaagaggacaaacacaggtgctttgtaccgttacatttgattcattagaatctggtattaagtcagatcaagttataacagctataaatgggataaaagataaaaatttcatgctgcactacgagtttcctccttatgcaactaatgaaattggcaaagtcactggtttaaatagaagagaacttgggcatggtgctcttgctgagaaagctttgtatcctgttattccccgagattttcctttcaccataagagttacatctgaagtcctagagtcaaatgggtcatcttctatggcatctgcatgtggcggaagtttagcattaatggattcaggggttccaatttcatctgctgttgcaggcgtagcaataggattggtcaccaaaaccgatcctgagaagggtgaaatagaagattatcgtttgctgacagatattttgggaattgaagattacaatggtgacatggacttcaaaatagctggcactaataaaggaataactgcattacaggctgatattaaattacctggaataccaataaaaattgtgatggaggctattcaacaagcttcagtggcaaaaaaggagatattacagatcatgaacaaaactatttcaaaacctcgagcatctagaaaagaaaatggacctgttgtagaaactgttcaggttccattatcaaaacgagcaaaatttgttggacctggtggctataacttaaaaaaacttcaggctgaaacaggtgtaactattagtcaggtggatgaagaaacgttttctgtatttgcaccaacacccagtgctatgcatgaggcaagagacttcattactgaaatctgcaaggatgatcaggagcagcaattagaatttggagcagtatataccgccacaataactgaaatcagagatactggtgtaatggtaaaattatatccaaatatgactgcggtactgcttcataacacacaacttgatcaacgaaagattaaacatcctactgccctaggattagaagttggccaagaaattcaggtgaaatactttggacgtgacccagccgatggaagaatgaggctttctcgaaaagtgcttcagtcgccagctacaaccgtggtcagaactttgaatgacagaagtagtattgtaatgggagaacctatttcacagtcatcatctaattctcagtgatttttttttttaaagagaattctagaattctattttgtctagggtgatgtgctgtagagcaacattttagtagtatcttccattgtgtagatttctatataatataaatacattttaattatttgtactaaaatgctcatttacatgtgccatttttttaattcgagtaacccatatttgtttaattgtatttacattataaatcaagaaatatttattattaaaagtaagtcatttatacatcttagaaaaaattacatagttttgtttttacaattctgaaatatatgaaaaacttagatagaatatgtcatatgttattataacagatctcttcctacatcttatttttcttctttgtatacagtagtgacagtttaccttcagtcatcctacaggtcacctctgtgcccaacaactttacttgcctacaacggttcacaaactggaacaggccatattcaaagccagtgcctatttcttcagaactgttaacagatatagtgagttgagggagctaatctgatacacttttgataatataatgcctttcaaattagttaccaaatcataaacagagtggaataaatataaatgagattctaactaggatgaatgtggtagtaatgatgtatatttttcaaatttacctaaacagaaagattattggctaaggcaggcggatcatgagatcaggagatcgagaccatcctggctaacacggtgaaaccccgtctctactaaaagtgcaaaaattagccgggcgtggtggcgcatgcctgtaatcctagctactcaggaggctgaggcagaagaatcacttcaacccaggaggtggaggttgtagtgagccgagattgcgccattgcactccagctcaggcaacaagagcaaaactccgtctcaaaaaaaaaaaaaaaattgtttacttatcaaattgaactaggtcaatttgaatatgtgtattgctctaatgtatggaagttcttagtataagagctgaaggatcatgactttcggttaatagatgtttgaaatagatgtttagaggttactgatacacatgtcaagttgttcattcccatcatttaaaatatcaccttataattccacagaaaagtaaatggtatgtggacgtcataatttagaatgtgtaatcttttttaaaatcttataaaaatacactggactcagtggtacgtgcctgtagtcccagctacttggaaggctgaagtgggaaggtcactagagcccagaagttcgacactgtagtgtgcaacaatcatacctgtgaatagctactgtactccagcctgggcaacatagcaggactcttatctctaaaaaaaattttaaatcttataaaaatgtaggtatatctggccaggcatggtggctcacacctgtaatcccaacactttgggaggtcaaggcgggtagatcacctgaggtcaggagttcgagaccagcctggccaacatggtgaaaccccatctctactaaaaatacaaaaattagctgggtgtggtggcgggcgcctgtaatcccagctactcaggaggctgaggcaggagaatctcttgaacctgggaggcagaggtggcagtgagctgagatcgcaccactgcactccagcctgggcaaaaagagtaaaactccatctcaaaaaaaaaaatggtgggcacagaagctcatgcctgtaattccagcactttgggaggccgaggcgggtggattacatgaggtcaggaattcaagaccagcctggccaacacggtaaaaccccatctctactaaaaatacaaaaattagctgggcatggtggcaggcacctgtaatcctagctactcgggaggctgaggcaggagaatcacttgagcctgggaaatggaggttgcagtgagccgagattgcgccattgcactccagcctgggcgacagagcaagactccgtctccagaaaaaaaaaaaaaaaaggtaaattcatgactcagggttaactagttcataaaatattacaaatttatctggctaaaccaaagatttttaagtcaataaacattgattatatatctattgtgtgtaaaatagcatgttaggcaatgttgatatacttctgaaatattaaagattaattgaaaatgaaagattaaatttatttgctttctacactt

SEQ ID NO: 5772 - DNA, 2482 bp, Homo Sapiens
  NM_033111
gaccgccatcttgcgtacggagatgtcttatggtgaaattgaagaattctgcttggtcagaatcgtgatggcattgtgttcagcactgatgactattttcaccatcaagatgggtacagcaaaacaagctatcgatcagggaagatctccagttataatagataacactaatatacaagcttgggaaatgaagccatatgtggaagtggccataggaaaaggatacagagtagagtttcatgaacctgaaacttggtggaaatttgatcctgaagaattagaaaagaggaataaacatggtgtgtctcgaaagaagattgctcagatgttggatcgttatgaatatcaaatgtccatttctattgtaatgaattcagtggaaccatcacacaaaagcacacaaagacctcctcctccacaggggagacagagagaaagagttttgaagaaaactgggcataggctcagcaaaaccaaacagaagaggaacagaaaaagaaacaaaaagcagaacagtcagaatagaatcatggaggaaaactcattagaattcttaagtgatcttacaccgggagatcaggacccatctcagagtgaagaggaagacattgaaaagaccagaagagaatcagaatatcccttcattgatggtctacaaaatgaagtcggagattttgtgactggatataaagaaaaaagatggaaaaataaagatcctaaagacagtttccaaaacgttatgtctatagttgaattagacaacacaccaaagaattacctctctaaggaaggtgataacttgtttgtaagtttgttactgaggccaaatgaaatctccgttacttgtccaatactgactcaaaacctttcctgtgtaacaactgatgactgctctggcatgaaggtagaaaagcatattagaaataggcataccatagcattagacacccaggacctttctgcggaaacttcatgcttatttatgaagaagagagaaatagtagataaaaatctctcacatgaacccattctgtgccatcaacatggaatcagaatgtcagataaagttttaagagaggaacaagtgtatacaactaaaatcaatcactgggcttttttcacaaccaatttatctgatgaagatttacagctgggctctgacagacagccctattttggtagctggcctgcaggacctcataagtttatatgtgaacagagaccaaagaaagatagagcatgtaagttggctggtcctgacagcagggggcaatggattcaaatgatcttcacttcggtggcagcatcagaaccaggaaacaatccagaaatattgacagacaaactactgataggaaatgaagatttttcacctccacctgaaactatggattcattcatagaaacaaacctcttcagaagctgcttacctcaaccggatataccaaagaatgccttagaatcaacaaaaaataagaaaaggaggaagaaaaggattttcaatttggtaccaaattttgacttattaggacagagtcgtatcggtgtaaaagaaagggagaaatgtgacctgttaacaaaaaaccatggactaaaaattactttgggagaagaaaaagatagaatttcagaaaggaacagtgaagaggagaataaacaaaaacttatgacctttgatcatcatccattgtggttttaccttgatattatcaaagctacccctttaaatattgatggacagcgttattctcattgcctgtcatttaacagactaaggtgctctgcatctttatacaaaaattatattccttcttttgtgctacataatttatctagtatttggaagccatcttttacaaacaagaaactgtttttgactttcgaatctcagacaagagtaggtaataaactaaatgatgcagggtttatttctccagaaattttacatagtcatcctgatacttcgtgctctttgggagtcacttctgattttcactttttaaatgaaaggtttgatagaaagctgaaaagatgggaagaacctaaggaattaccagctgaggacagccaagacttaacaagcactgactaccgttcccttgagctaccattatcacaagggtttgcctttcaattagtaaagctttttggatctccaggcgttccaatggaatccttgttgcctgatgactatgtggttccccttgactggaagacactaaagatgatctacttgcaatggaagatgtcagtggagaaaagacagaagaagattggttgaaaaatgaaaattccttgaactttgagttctgctgtcttcatggtactgctgaagatcatgatcacggagaaaagtcagagtgctcagtgccaacccaagggattctttccagagacgtacccgttggataccaaaattagtttggataatctgttcaaccattcttgataagttatctgaataataaaaaaactcaacaga

SEQ ID NO: 5773 - DNA, 1177 bp, Homo Sapiens
  NM_033112
gccagctgatgccgggagctaactaccgcgccggggccggggccggggccggggcccgacgtccccgcggggcccgggaccgcgaggaggacggcgggggcctggagcccgcggccgtggcccgcgacctattgaggggcacatctaacatgtcatttgaggagctgttggaattgcagagccaagtggggactaagacgtacaaacaattggtagctggaaatagtcctaagaaacaagcttctagaccacctatccaaaatgcatgtgttgcagataagcacaggcctctggaaatgtcagccaagatccgagtaccatttttacgtcaggttgttcccattagtaaaaaggtagcccgggaccctcgctttgatgatctgtcaggggaatataatcctgaggtgtttgacaaaacataccaattcttgaatgacatccgagcgaaagagaaagagcttgtgaaaaaacagttgaagaagcacctttcaggagaggagcatgagaaactgcagcaactgcttcagcgaatggagcagcaagaaatggcacagcaggaacgaaagcaacagcaggagctgcacctggccctgaagcaagaacgtcgggctcaggcccagcagggccatcggccatacttcctgaaaaaatctgagcagcgccagttggcactagctgagaagttcaaggagctgaaacgcagcaagaaattggagaacttcttgagtcgaaagaggcgacgaaatgcaggcaaggacaggagacatctccctttgagcaaagagtaataaggaactatcctctgctctgccactgccccagggagacatggatctgtgaggacagatttggccacggctggtttccgttcaagggcaaggatcacagctgcccttgaatctcattgcctcagagaagactagagggctcttggactatccctagggctacacaagaatagttcagccttctgccatgccacacagcctcagcttgaatctggttcattgcgtcctcgtgttcttctctcatccttgccttaaaccagggattctgataccgaagaagaggggccaatgaaaaccatggagtctgttcgtgactcccagggctgggacattatgtaggagccacttcataaacattctctttactcatcaaaaaaaaaaaaaaaaaa

SEQ ID NO: 5774 - DNA, 3352 bp, Homo Sapiens
  NM_033115
agcgttgggtcgcggtggctgtgagggcggaagaaaaggccaggctgaggggagggtagagggtgaaaagctcggatctgtgtttggggaaggccaggcttgcgctcctcgccgggttccgcgaaggttaaccttggctgacttggctcgcgagcaaagggcagcgtctgagctcccggcgttccaggagtggcctcttttgtaggagcacctgaaatgcagcgtctggtgcactaagccgtagcggcagcagcagccacagcgacagcgctggggccctgtgtagaagctccatcccccttgtctttgtgcttgcctgcgtccccagactcagagattatcttagaagacctaggactccaaaaatgtttcccctgaaggacgctgaaatgggagcctttaccttctttgcctcggctctgccacatgatgtttgtggaagcaatggacttcctctcacaccaaattccatcaaaattttagggcgctttcaaatccttaaaaccatcacccatcccagactctgccagtatgtggatatttctaggggaaagcatgaacgactagtggtcgtggctgaacattgtgaacgtagtctggaagacttgcttcgagaaaggaaacctgtgaggtatccctcgtacttggcccctgaggtaattgcacagggaattttcaaaaccactgatcacatgccaagtaaaaaaccattgccttctggccccaaatcagatgtatggtctcttggaatcattttatttgagctttgtgtgggaagaaaattatttcagagcttggatatttctgaaagactaaaatttttgcttactttggattgtgtagatgacactttaatagttctggctgaagagcatggttgtttggacattataaaggagcttcctgaaactgtgatagatcttttgaataagtgccttaccttccatccttctaagaggccaaccccagatgaattaatgaaggacaaagtattcagtgaggtatcacctttatataccccctttaccaaacctgccagtctgttttcatcttctctgagatgtgctgatttaactctgcctgaggatatcagtcagttgtgtaaagatataaataatgattacctggcagaaagatctattgaagaagtgtattacctttggtgtttggctggaggtgacttggagaaagagcttgtcaacaaggaaatcattcgatccaaaccacctatctgcacactccccaattttctctttgaggatggtgaaagctttggacaaggtcgagatagaagctcgcttttagatgataccactgtgacattgtcgttatgccagctaagaaatagattgaaagatgttggtggagaagcattttacccattacttgaagatgaccagtctaatttacctcattcaaacagcaataatgagttgtctgcagctgccacgctccctttaatcatcagagagaaggatacagagtaccaactaaatagaattattctcttcgacaggctgctaaaggcttatccatataaaaaaaaccaaatctggaaagaagcaagagttgacattcctcctcttatgagaggtttaacctgggctgctcttctgggagttgagggagctattcatgccaagtacgatgcaattgataaagacactccaattcctacagatagacaaattgaagtggatattcctcgctgtcatcagtacgatgaactgttatcatcaccagaaggtcatgcaaaatttaggcgtgtattaaaagcctgggtagtgtctcatcctgatcttgtgtattggcaaggtcttgactcactttgtgctccattcctatatctaaacttcaataatgaagccttggcttatgcatgtatgtctgcttttattcccaaatacctgtataacttcttcttaaaagacaactcacatgtaatacaagagtatctgactgtcttctctcagatgattgcatttcatgatccagagctgagtaatcatctcaatgagattggtttcattccagatctctatgccatcccttggtttcttaccatgtttactcatgtatttccactacacaaaattttccacctctgggataccttactacttgggaattcctctttcccattctgtattggagtagcaattcttcagcagctgcgggaccggcttttggctaatggctttaatgagtgtattcttctcttctccgatttaccagaaattgacattgaacgctgtgtgagagaatctatcaacctgttttgttggactcctaaaagtgctacttacagacagcatgctcaacctccaaagccatcttctgacagcagtggaggcagaagttcggcaccttatttctctgctgagtgtccagatcctccaaagacagatctgtcaagagaatccatcccattaaatgacctgaagtcagaagtatcaccacggatttcagcagaggacctgattgacttgtgtgagctcacagtgacaggccacttcaaaacacccagcaagaaaacaaagtccagtaaaccaaagctcctggtggttgacatccggaatagtgaagactttattcgtggtcacatttcaggaagcatcaacattccattcagtgctgccttcactgcagaaggggagcttacccagggcccttacactgctatgctccagaacttcaaagggaaggtcattgtcatcgtggggcatgtggcaaaacacacagctgagtttgcagctcaccttgtgaagatgaaatatccaagaatctgtattctagatggtggcattaataaaataaagccaacaggcctcctcaccatcccatctcctcaaatatgaagaaccaagagtgtgactgccaaaacttagtgtggcatcagcaccaacagcacagttcttcatatccacgccactctcagacaaaactagatgtccagattgttgcatttccgtaaagtttgtcacgagacattttttaaaatctcataacccacatgttcagttatccatgcaagaaacttgactctacatgtattgctgaaagaattttcttaacagtgaaatctgatcatatatttttaccacactgccacataaagcccaagaaattcagctgacaagacagatttagcattatcaagaaatcccatttgccctgaaaaagctgtcctccattgtactgaacagacagtcctgtcgattgtgttatttagaaacatacactgaatgtgggctgaaatcatcatctttccataatgaaaactgagaaactattcacaatgcattccttataaataaatgctacatttagtaactcatttcacccaaacaag

SEQ ID NO: 5775 - DNA, 1832 bp, Homo Sapiens
  NM_033124
gatatcctcgttgctaggagactagacgcgtcttacagtgggagagctcagcctcactgatagccggggatctctcctgttcgagggctgagatctccggtcccacaaccgcccacaaccaggggcacttctggaagtcccctttctagggacatttttcttctaagctctgtaacgcgggccgaggcagaccgaggcttctttcccggatccaatcccctgcccccatgcctaagaaagaaaaaatggccaagacgcccctgtccgatgagaagcagctgcttctgtttcagcagaagttgctggcagaggaggagatggccaaaaagaaggagaggctcctcagccagttcttgaaggacaagctggccaaggaggaacacaacagtgctctgaaccttaataagattaacacacagtggagaactgtccttcgggaagtcaagaccagagaacttcataaggacattgagatcctcagccaaacatttgaacgagtggtggactgtaaggacaatgtcatcaagtctttagctaaagacctgtccgaagccgaggagcagtacgcccatgccctgcgcagccacttgcacaatgttgaccagctcttggccctgcagaggcaccggctcagtctcctggaggaaagttacaacatggagctggaagccctaaccaaggagtttgagacagaaaggaagacaattattgaccaacatgagaaagagattcactatctgcaagatatcttcatggccatggagcagaactatatagattctgagtatgaaagcaagctggagttccagagcatgtggaatgatctcaaaaacatgaatttagaagagaagcactttctaagactgcacctggagaacagagtagaagatctgtggagaaagttccaggatgtactcaagaattacactgatgccacagaggatcgaaaggctgcctttgagaccctgcaggtgaaggatgagaagagctccaaagagattgaagtacagatgaaaaaaatacagaaactacaggatgccataactatttcaaaaggcaagatcatgatacacagccgtgagagtgaagatgagaaccggtatatccgtaatgacaaggaattggtccttgtacaactgcgaaaacttaaggcccaaagaactcaggcccgggcagcatcccagaagaacttagtcagactcaccctggaaagtaatgccaccctcaaggccctgagaaagattgttgataagggtgaaaagatccttaaacttgctgaaatatgtaggaaatttgaaaccgaagaagaaaaagtgctgcctttttattcatcagtattgactcctaaggagcaggaggggattcagaagaataatctagaagagcttactgaggagctcaccaaggtgatggtggactacataggaatggagaatttctggaaaaggtacaacaaagtgaaactggagcaactgagcctccaacatagacgagcccagctgctagatatcaatgggaagctgcgggagatgctgaagcagtacttggatggcatctcagtgagtgacgaagtgctgagccagctcaacccactctttatagtcaactatcaaagcaacttactccagcccttgtccatacgtatagcccatccaggtgataaacaacatccaaccacttaaaatataattgaagcagcccagatgatcttccacaacctgtgatctaaggaaaaaaatctttcaactcctagagatttttttttttttttgagaaatgtagggatgttgctattaaaaatttccatggagtttaaaaaaaaaaaaaaaaaa

SEQ ID NO: 5776 - DNA, 1983 bp, Homo Sapiens
  NM_033125
ggggcggggcgcgctacccgcagcccccggagctcggctaactcggcgcccagtgcacggccgcaccatggggtcccgccacttcgaggggatttatgaccacgtggggcacttcggcagattccagagagtcctctatttcatatgtgccttccagaacatctcttgtggtattcactacttggcttctgtgttcatgggagtcacccctcatcatgtctgcaggcccccaggcaatgtgagtcaggttgttttccataatcactctaattggagtttggaggacaccggggccctgttgtcttcaggccagaaagattatgttacggtgcagttgcagaatggtgagatctgggagctctcaaggtgtagcaggaataagagggagaacacatcgagtttgggctatgaatacactggcagtaagaaagagtttccttgtgtggatggctacatatatgaccagaacacatggaaaagcactgcggtgacccagtggaacctggtctgtgaccgaaaatggcttgcaatgctgatccagcccctatttatgtttggagtcctactgggatcggtgacttttggctacttttctgacaggctaggacgccgggtggtcttgtgggccacaagcagtagcatgtttttgtttggaatagcagcggcgtttgcagttgattattacaccttcatggctgctcgcttttttcttgccatggttgcaagtggctatcttgtggtggggtttgtctatgtgatggaattcattggcatgaagtctcggacatgggcgtctgtccatttgcattccttttttgcagttggaaccctgctggtggctttgacaggatacttggtcaggacctggtggctttaccagatgatcctctccacagtgactgtcccctttatcctgtgctgttgggtgctcccagagacacctttttggcttctctcagagggacgatatgaagaagcacaaaaaatagttgacatcatggccaagtggaacagggcaagctcctgtaaactgtcagaacttttatcactggacctacaaggtcctgttagtaatagccccactgaagttcagaagcacaacctatcatatctgttttataactggagcattacgaaaaggacacttaccgtttggctaatctggttcactggaagtttgggattctactcgttttccttgaattctgttaacttaggaggcaatgaatacttaaacctcttcctcctgggtgtagtggaaattcccgcctacaccttcgtgtgcatcgccatggacaaggtcgggaggagaacagtcctggcctactctcttttctgcagtgcactggcctgtggtgtcgttatggtgatcccccagaaacattatattttgggtgtggtgacagctatggttggaaaatttgccatcggggcagcatttggcctcatttatctttatacagctgagctgtatccaaccattgtaagatcgctggctgtgggaagcggcagcatggtgtgtcgcctggccagcatcctggcgccgttctctgtggacctcagcagcatttggatcttcataccacagttgtttgttgggactatggccctcctgagtggagtgttaacactaaagcttccagaaacccttgggaaacggctagcaactacttgggaggaggctgcaaaactggagtcagagaatgaaagcaagtcaagcaaattacttctcacaactaataatagtgggctggaaaaaacggaagcgattacccccagggattctggtcttggtgaataaatgtgccatgcctgctgtctagcacctgaaatattatttaccctaatgcctttgtattagaggaatcttattctcatctcccatatgttgtttgtatgtctttttaataaattttgtaagaaaattttaaagcaaatatgttataaaagaaataaaaactaagatgaaaaaaaaaaaaaaaa

SEQ ID NO: 5777 - DNA, 3979 bp, Homo Sapiens
  NM_033135
tctcaggggccgcggccggggctggagaacgctgctgctccgctcgcctgccccgctagattcggcgctgcccgccccctgcagcctgtgctgcagctgccggccaccggagggggcgaacaaacaaacgtcaacctgttgtttgtcccgtcaccatttatcagctcagcaccacaaggaagtgcggcacccacacgcgctcggaaagttcagcatgcaggaagtttggggagagctcggcgattagcacagcgacccgggccagcgcagggcgagcgcaggcggcgagagcgcagggcggcgcggcgtcggtcccgggagcagaacccggctttttcttggagcgacgctgtctctagtcgctgatcccaaatgcaccggctcatctttgtctacactctaatctgcgcaaacttttgcagctgtcgggacacttctgcaaccccgcagagcgcatccatcaaagctttgcgcaacgccaacctcaggcgagatgacttgtaccgaagagatgagaccatccaggtgaaaggaaacggctacgtgcagagtcctagattcccgaacagctaccccaggaacctgctcctgacatggcggcttcactctcaggagaatacacggatacagctagtgtttgacaatcagtttggattagaggaagcagaaaatgatatctgtaggtatgattttgtggaagttgaagatatatccgaaaccagtaccattattagaggacgatggtgtggacacaaggaagttcctccaaggataaaatcaagaacgaaccaaattaaaatcacattcaagtccgatgactactttgtggctaaacctggattcaagatttattattctttgctggaagatttccaacccgcagcagcttcagagaccaactgggaatctgtcacaagctctatttcaggggtatcctataactctccatcagtaacggatcccactctgattgcggatgctctggacaaaaaaattgcagaatttgatacagtggaagatctgctcaagtacttcaatccagagtcatggcaagaagatcttgagaatatgtatctggacacccctcggtatcgaggcaggtcataccatgaccggaagtcaaaagttgacctggataggctcaatgatgatgccaagcgttacagttgcactcccaggaattactcggtcaatataagagaagagctgaagttggccaatgtggtcttctttccacgttgcctcctcgtgcagcgctgtggaggaaattgtggctgtggaactgtcaactggaggtcctgcacatgcaattcagggaaaaccgtgaaaaagtatcatgaggtattacagtttgagcctggccacatcaagaggaggggtagagctaagaccatggctctagttgacatccagttggatcaccatgaacgatgtgattgtatctgcagctcaagaccacctcgataagagaatgtgcacatccttacattaagcctgaaagaacctttagtttaaggagggtgagataagagacccttttcctaccagcaaccaaacttactactagcctgcaatgcaatgaacacaagtggttgctgagtctcagccttgctttgttaatgccatggcaagtagaaaggtatatcatcaacttctatacctaagaatataggattgcatttaataatagtgtttgaggttatatatgcacaaacacacacagaaatatattcatgtctatgtgtatatagatcaaatgttttttttggtatatataaccaggtacaccagagcttacatatgtttgagttagactcttaaaatcctttgccaaaataagggatggtcaaatatatgaaacatgtctttagaaaatttaggagataaatttatttttaaattttgaaacacaaaacaattttgaatcttgctctcttaaagaaagcatcttgtatattaaaaatcaaaagatgaggctttcttacatatacatcttagttgattattaaaaaaggaaaaatatggtttccagagaaaaggccaatacctaagcattttttccatgagaagcactgcatacttacctatgtggactataataacctgtctccaaaaccatgccataataatataagtgctttagaaattaaatcattgtgttttttatgcattttgctgaggcatgcttattcatttaacacctatctcaaaaacttacttagaaggttttttattatagtcctacaaaagacaatgtataagctgtaacagaattttgaattgtttttctttgcaaaacccctccacaaaagcaaatcctttcaagaatggcatgggcattctgtatgaacctttccagatggtgttcagtgaaagatgtgggtagttgagaacttaaaaagtgaacattgaaacatcgacgtaactggaaattaggtgggatatttgataggatccatatctaataatggattcgaactctccaaactacaccaattaatttaatgtatcttgcttttgtgttcccgtctttttgaaatatagacatggatttataatggcattttatatttggcaggccatcatagattatttacaacctaaaagcttttgtgtatcaaaaaaatcacattttattaatgtaaatttctaatcgtatacttgctcactgttctgatttcctgtttctgaaccaagtaaaatcagtcctagaggctatggttcttaatctatggagcttgctttaagaagccagttgtcaattgtggtaacacaagtttggccctgctgtcctactgtttaatagaaaactgttttacattggttaatggtatttagagtaattttttctctctgcctcctttgtgtctgttttaaaggagactaactccaggagtaggaaatgattcatcatcctccaaagcaagaggcttaagagagaaacaccgaaattcagatagctcagggactgctaacagagaactacatttttcttattgccttgaaagttaaaaggaaagcagatttcttcagtgactttgtggtcctactaactacaaccagtttgggtgacagggctggtaaagtcccagtgttagatgagtgacctaaatatacttagatttctaagtatggtgctctcaggtccaagttcaactattcttaagcagtgcaattcttcccagttatttgagatgaaagatctctgcttattgaagatgtaccttctaaaactttcctaaaagtgtctgatgtttttactcaagaggggagtggtaaaattaaatactctattgttcaattctctaaaatcccagaacacaatcagaaatagctcaggcagacactaataattaagaacgctcttcctcttcataactgctttgcaagtttcctgtgaaaacatcagtttcctgtaccaaagtcaaaatgaacgttacatcactctaacctgaacagctcacaatgtagctgtaaatataaaaaatgagagtgttctacccagttttcaataaaccttccaggctgcaataaccagcaaggttttcagttaaagccctatctgcactttttatttattagctgaaatgtaagcaggcatattcactcacttttctttgcctttcctgagagttttattaaaacttctcccttggttacctgttatcttttgcacttctaacatgtagccaataaatctatttgatagccatcaaaggaataaaaagctggccgtacaaattacatttcaaaacaaaccctaataaatccacatttccgcatggctcattcacctggaataatgccttttattgaatatgttcttatagggcaaaacactttcataagtagagttttttatgttttttgtcatatcggtaacatgcagctttttcctctcatagcattttctatagcgaatgtaatatgcctcttatcttcatgaaaaataaatattgcttttgaacaaaactaaaaa

SEQ ID NO: 5778 - DNA, 3207 bp, Homo Sapiens
  NM_033196
ttcattgcttagtatcctctgctctagtagttcccggtgactgtcgcagcctctgttgccctctgacttgcagatgctgtgagatccagagctaagactccacgacatcccggaagccgaaaaatggaactgttgacattcagggatgtgaccatagaattctctctggaggagtgggagtttctgaaccctgctcagcagagtttgtataggaaagtgatgctagagaactacagaaacctggtctctctgggtcttactgtttctaagccagaactgattagccgtctggagcaaagacaggagccctggaatgtgaagagacatgagaccatagccaaacccccagctatgtcttctcattacactgaagaccttttgccagaacagtgcatgcaagattcattccaaaaagtgatactgagaagatatggaagctgtggacttgaggatttacacttaaggaaggatggggaaaatgtgggtgagtgtaaggatcaaaaagaaatttataatggacttaaccaatgtttgtcaactctacctagcaaaattttcccatataataaatgtgtgaaagtctttagtaaatcatcaaatctaaatagagaaaacataagacatactacagagaaacttttcaaatgtatgcaatgtggcaaagtctttaaatctcactcaggcctttcttatcataagataattcacactgaagagaaactctgcatatgtgaggaatgtggcaaaacctttaagtggttctcataccttactaaacataagagaattcacactggagagaaaccatacaaatgtgaagaatgtggcaaagcttttaactggtgctcgagtcttactaaacataagagaatccatactggtgagaaaccctacaaatgtgaagaatgtggaaaagcctttcactggtgttcaccctttgttagacataagaaaattcatacaggagaaaaaccctatacatgtgaagactgtggcagagcgtttaaccggcactcacatctcaccaaacataagacaattcacactggaaagaaaccctacaaatgtaaagaatgtgggaaagcctttaaccactgctcactacttactatacatgagagaacccatacgggagagaaaccctataaatgtgaagaatgtggcaaagcttttaactcatcatcaattcttactgaacataaggtaattcatagcggagagaaaccctacaaatgtgaaaaatgtgacaaagtctttaagaggttctcataccttactaaacacaagagaattcacactggagagaaaccctacaaatgtgaagaatgtggcaaagcttttaactggtcctcaatccttactgaacataagagaattcatactggagagaaaccctacaactgtgaagaatgtggaaaagcctttaatcggtgctcacaccttactagacataagaaaattcatactgccgtcaaacgctataaatgtgaagaatgtggcaaagcttttaaacggtgctcacatcttaatgaacataagagagttcaaagaggagagaaatcctgcaagtataaaaaatgtggggaagcttttaatcactgctcaaaccttactacgtaagaatttttactaaagagaaatcctacaaatgtaaagaatgtggcaaattccataaatcttgctcaaggcattgaaatcacaagataattcatactggagagaaacactacaaatgtgaagaatgtggggaaagtcttcaaccattgctgacagcttattgcacagaagaaaattcatgctgagaaaaattctgattttaaagaatgtggcaaagcatttaataactactatgaacttactcatcagaggttttgtgctagataaaagcaatgtaagtgtaatgatacacattacatttatctgtggaaagatgtcaccaaataaaagccttagagtacacaaggtgtaatgatagtgatacattacatttgtacatggaaagacttcaaaaatataagccttagagtacacaagagtttttatactgaagaaaaacattacaaatataaagattgttgcaatacttttacttatgttacagattttgttgtacataggagaatttatactgaaaggtaaccctctaacagttgctcaaattttattccattttagataatttacattggaaagaaaccctacaactgtaatgaatatgaaaaaaattgtttaaaaagtacaccttagaaaacactagtttaaggccgggcgcggtggctcacacttataatcccagcactttgggaggccgaggcaggcggatcacgaggtcaggagatcgagaccacgatgaaaccctgtctctactaaaaatacaaaaaattagctgggcatgttgtcgggtgcctgtagtcccagctactgggagaggctgaggcaggagaatggcgtgaacccgagaggcggagcttgcagtgagccgagatcgcgccactgaactccaacctgggcgacagagactctgtctcaaaaaaaaagaaagaacgctagtttatatgaaagcatttaacagatgcagtaaatataaaaaattaataaaaaattaagtctaaatgaacatcagaagattcacagtagaaaccactaagacgctaacactttcaatgttattctaaatcagggcattgattataaagagtaattcaaggttaacataatttagttagcctaaacagaaataggagattaatattttgagacttaaacaattatattcaaagtacactttttgcattgaaagaattttagatttttacaaaggcaaattttgatgtaattgaactctcaaattacttgatgctgtgtctttattcctagtgtctgtatgaaagcatgtggtcaatttctgctgctcggggtttgagaagttctatattaggatgtcatttacatacttttcaacagaagattgaggacactgaaatatgaggtgtgtgaagaaagtacacagagaaacttttgtggttgacttataaaacttgtaagtgctgcatgagatagatgttcagagtaatagtcttgtgcattattcaaattttagtaaattgttttaccaattgcacattagatagtatagtggattttgtaatgcttttcttagactgtgtgaacttagtttcaataaaacaattatttttaatgtgttaa

SEQ ID NO: 5779 - DNA, 2617 bp, Homo Sapiens
  NM_033200
gggccctgctctagcgggccgcgtagcggacatggcgggctcccggctcccgcggcagctcttcctccagggcgtggcggccgtcttcatgtttgctttcgcttccctctacacgcaaatcccaggcctgtatggccccgagggcatcctacctgcaaggaggacgctgcggcctcagggcaaggggcgctggcagcagctgtgggagaccccgacgctgctgtgggaagcgccgagactggggctggacacggcccagggcctggagctgctgagcctgctgggtgcactagtggccctgggagccctgctgctgagcccactgcgccaccctgtcatctacttgctgctttgggccgcctacctgtcagcctgccaggtgggccaggtgttcctttatttccagtgggactccctgctgctagagactggcttcctggccgtgctggtggccccgctgaggccagcctcccaccgcaaggaggccccccagggcaggcaggcaggggccctgccccacgaagacctccccttctggctggtgcgatggctgctgttccgcctcatgttcgcctcaggcgtggtcaagctgaccagccgctgccctgcgtggtgggggctcactgccctcacctaccactacgagacccagtgcctgcccacgcccgccgcctggttcgcacaccacctgccggtctggctgcacaagctcagcgtggtggccaccttcctaattgagatcgctgtgccgcccctgttcttcgcccccattcgacgcctgcgcttggctgctttctactcgcaggtgctgctgcaggtcctgattatcatcaccggcaactacaacttcttcaacctgatgacgctggtgcttaccactgcgctgctggacgaccagcacctggctgctgagcctggccacggcagccgcaagaagacggccacctcctggcccaaggccctgctggccaccctgtcgctgctgctggaactagccgtctacgggcttctggcctatggcactgtgcactactttggcctggaggttgactggcagcagcgcaccatccactccagaaccactttcaccttccaccagttttctcagtggctgaagacactgacgctgcccactgtgtggctgggtgtggcctccctggtctgggagctgctgagtgccctgtggaggtggacccaggtgcggggctggctacggaagctcagtgctgtagtccaactgtcccttgtgggcactgcgaccgtggccttgttcctgattagcctggtgccgtactcctacgtggagcccgggacccacgggcgcctctggaccggggcccaccgcctgtttggtgccgtggagcacctacagctggccaactcctacggcctcttccgccgcatgactgggcttggtggacggcctgaggtggtgctggagggcagttacgacggccaccactggacggagatcgagttcatgtacaagcctgggaacctgagccggccgcccccggttgtggtgccccaccagccacgcctggactggcagatgtggtttgcagccctgggcccacacacgcacagcccgtggttcacaagcctggtcttgcgcctgctgcagggcaaggagccagtgatccgccttgtccagagccaagtggccaggtatcccttccacaagcagccgcccacctacgtccgagcccagcgctacaagtactggttctcccagcctggggagcagggccagtggtggcggcgccagtgggtggaggagttcttcccatccgtgtccctgggggaccccacgctggagacgctgctcaggcagtttggactacaggagaaaagcccacctcgcacccgcagcgccaacagcaccctggcccaggccctccactggactcgctctcagctgtctcccctggaggcccccgccctgctctgggggctcctcatggccgtgggggctgtcagatttgtgcaagccctgctagcaccctgttctctccggtcctccccgctggcaccagtcagcggggagaagcgcaggccagcctcccagaaagactccggagctgcctccgaacaggccaccgcagcccccaacccctgctccagtagttcgaggaccacccggcgaaagaagtagctgtgttctcccagctgcacgtcctgagagggccaggtcgccgggagtgctctggcctccggcaggacaggacccagccactgtgccttagctgaccctgcagggccaggcacaggttggggggctgcccctggggtttgcagggtgctgcattgagggctccaggccccacccccacgccagccatgcccctccccaggactcccactattgcctctgtgattggcccaggaggaaaacacgaccaagctcaagacccttcccctgccctgggctgtgggggtctgagtctagagcccccaaccctaggccccgtgccagaggggaagaggctgactcccaggggaagaggggaagcactgtcatcttccacgtcatcttcacaccagcccatcctgccctttagatctgggcaccaataaaggcgtcttttgtgcttggctgaaaaaaaaaaaaaaaaaa

SEQ ID NO: 5780 - DNA, 1458 bp, Homo Sapiens
  NM_033204
ttagttcctcggggagcccctggtgccccggatacggctgattttgtcgtgtgggacctgttctggctgctccagccccaggaaggacccaggacacccggaagccggaaatggactcagtggcctttgaggatgtggctgtgaacttcacccaggaggagtgggctttgctgagtccttcccagaagaatctctacagagatgtgacgctggaaaccttcaggaacctggcctcggtcggaatccaatggaaagaccaggacattgagaatctgtaccaaaacctggggattaagctaagaagtctggtggagagactctgtggacgtaaagaagggaatgaacacagagaaactttcagccagattcctgattgtcacctgaacaagaaaagtcaaactggagtgaaaccatgcaaatgcagcgtgtgtgggaaagtcttcctccgtcattcattcctggacaggcacatgagagctcatgctggacacaaacgatctgagtgtggtggggaatggagagagacgccccgtaaacagaaacaacatgggaaagcctccatttcccccagtagtggtgcacggcgcacagtaacaccaactcgaaagagaccttatgaatgcaaggtgtgcgggaaagcctttaattctcccaatttatttcaaatccatcaaagaactcacactggaaagaggtcctataaatgtagggaaatagtgagagccttcacagtttccagtttctttcgaaaacatggaaaaatgcatactggagaaaaacgctatgaatgtaaatactgtggaaaacctatcgattatcccagtttatttcaaattcatgttagaactcacactggagaaaaaccttacaaatgtaaacaatgtggtaaagccttcatttccgcaggttaccttcggacacatgaaatcagatctcacgcgctggagaaatcccaccaatgtcaggaatgtgggaaaaaactcagttgttccagttcccttcacagacatgaaagaactcatagtggaggaaaactctacgaatgtcaaaaatgtgccaaagtctttagatgtcccacgtcccttcaagcacatgaaagagctcacactggagaaagaccttatgaatgtaataaatgtggtaaaaccttcaattatcccagttgttttcgaagacataaaaaaactcatagtggagaaaagccatatgaatgtacaaggtgtggtaaagcctttgggtggtgcagttccctccgaagacatgaaatgactcacactggagaaaaaccctttgattgtaaacagtgtggtaaagtctttactttttcaaattaccttagacttcatgaaagaactcatttggccgggcgtagccagtgctttggcaggaggcagggggatcacctgagcccaggagtttgagaccagcctgggcaacataagaaggcccccggaattc

SEQ ID NO: 5781 - DNA, 3288 bp, Homo Sapiens
  NM_033210
accattcttccggtttcagaagttaaggctggtgtcctggccccagtccacctctgggagcgcctgcgccgctccgcggagagtccgtggatctcacagtgaaaaatgtttgctgacccttgacattgacaaactgctgacagctcagatgatccatgattggaaggatgtggtcatcaccaagatgtctttctttctccggttcccagttttccagacctgaagtgttttccaatcaaagcgaagagacgatctgtggatgttgaatatgcaaggagctgaagagagagacattagaagagagacttgtccaggctgggtaaacaagaacaagcctgctctggagcaggatgtctgtaaaattgactcatcagggatagtagtaaagaggttccaagaggatgaataccaagattctacatttgaagaaaaatatgcatgtgagggcatgaaggaaaactctcctagggagattgctgaatcatgccttttccaggaaggaggttttgggagaataactttcatccacaaagaagcaccccctgaaattattagtcaaggatataattttgagaaaagcttgcttttgacctcaagccttgttacacgtctcagggtttctacagaagagagtctgcatcagtgggaaacaagtaatatacaaaccaatgatatttcagaccaaagtaaatgtccaactctctgcacacagaaaaaatcttggaaatgtaatgaatgtggaaaaacctttactcagagctcatcccttacccaacatcagagaactcatactggagagagaccctacacatgtgaggaatgtgggaaagcctttagtcgtagttcattccttgttcaacatcaaagaattcacactggagtgaaaccatatggatgtgagcagtgtgggaaaacatttcgatgtcgatcatttcttactcagcatcaaagaattcacactggagagaaaccttataaatgcaatgaatgtgggaattccttccgcaatcactcacatctcactgaacaccagagaattcacactggagagaaaccttataaatgcaataggtgtgggaaggcattcaatcagaatacacaccttattcatcatcagagaattcacactggtgagaagccttacatatgcagtgaatgtggctcttcttttcgaaaacactcaaatcttacgcaacatcagagaattcacactggggaaaaaccccataaatgtgacgaatgtgggaaaactttccaaacaaaggcaaacctctctcagcatcagagaattcatagtggagagaaaccctataaatgtaaagaatgtggcaaagccttttgtcagagcccatctcttattaaacaccagcgaattcatactggagaaaaaccatataagtgtaaagaatgtggcaaagcgtttactcagagcaccccactcactaaacatcagagaatacatacaggggagagaccctacaaatgcagtgaatgtggtaaagccttcattcagagcatttgccttattcggcaccagagaagtcacactggagaaaaaccctataaatgcaatgaatgtggaaagggctttaatcagaacacctgcctcactcagcatatgagaattcatactggagagaagccctataaatgtaaagaatgtgggaaagcctttgctcatagctcatctcttactgaacatcatagaactcacactggtgagaagctctataaatgtagtgagtgtgagaaaaccttccgcaagtatgcacaccttagtgaacattacagaattcacactggtgagaagccttatgagtgtattgagtgtggaaagttcttcagacatagttcagtccttttcagacatcagaaacttcacagtggtgactaatgctgccatttaggttatgacagtttctctagcgaggatgactacgaatctgactgggagtagaggggcaggtagagttcctggagggaaggatgaaggagccttggctactgtactctgagaggaatgtttccagaaatggaggtgggagcttagggaatgcagagcctacttgaggtgggcatctgggaatacagggtagaaagaaattcctgcttttcagataaagcctacacattgccactgtctccccatgtgactcttacagcttgaggaggcatttgttagcacttctgttcactttactacatcctgccccacattctgacttgtcacccattttcgttggctggcaggttgagatgtttttcttaaacactgcctgtcagtgtgaagtggcacagctctgatgtagtgctaagtctagcctccagatttgaggcagccctgaccatgctaccatgggggaggctcccaacctgtggaagtggtcctgtgaaaaggagacagaaacaagtaagagccaaaaaaaaaaaaaaaaaaaatccatatccattcattaaaaaaatgagatataaagcaacaactgggctgacctctatagatctgccagtaaagaaggctttctttcattatcagggtgaaggtctttcctgattcttccaagctttgaggtgactcagagctaagaatgaaataggagaccaagttagaattcatgatactggtttatggggaggcagtcatacctgttcagagaaccaggaagactcaatatctatctcagaggaaatatggttacccaggaaagaaatggtctgctagagtgataagactcagaacaggaagcctgcatgtgactgagcaagtcacctacataaccctgcctgtactaaggtgtacacctgtctattgtaagtttgcctaggctgttggtgtacagagaccagaggagagagacacactaggactaacaatgtcctaacaaaatggtacttagtttgttggtctttaggagaaagcattagtaatgaaagaagaaagaattttcacttggttggacattggggctgcttaagaaagttgacatttgtcgtggaatgactttggaaagacttctaaaagaatctttttcaaatccctgaaaatcaggatagcacattttgctactgactgtgacagtgttttattcttttgagagaaatgacatagttttccctttatttcccaaattcctttcatgttcttaactgctacccagaaattgagcttcagaagattgaggatagcctttgattggtatttaaaataatttctaagctgtgaagcttatagcatttttaaagtatggctattaaaaacactaagttgattctggaaaaaaaaaaaaaaaa

SEQ ID NO: 5782 - DNA, 3028 bp, Homo Sapiens
  NM_033211
ctggcgccgagcgcggtgggagaggagagggtacccggctggctcggctggcggcctctgcctggatctcggcgccgcagtcctgcgcctctcccgcccctgtctcccgctccgcagccccgggcacggcggaggcagcggagccctgggccatcgtacctggagtagaacagaaaaattattatgtctgtgttcccttgggactcattggaaattgtacagtgacatcttctgggatttagtctggattgtgcagactggtgcttaaaatggaagtcgatattaatggagagtctagaagtaccctgaccaccttgcccttccctggggctgaggccaactccccgggaaaggcggaggcagagaagccccgctgctccagcacaccctgctccccgatgcggaggaccgtgtcaggctaccagatcctacacatggactctaactatttggttggcttcacgactggcgaggaactcctgaagttagctcagaagtgcacaggaggtgaagagagcaaagcagaagccatgccatccttacgctccaaacagctagatgcaggacttgcccgttcctctcgtttgtataaaaccagaagtaggtactaccagccatacgagattccagctgtcaatggcaggaggcgaaggcggatgccaagctcaggagacaagtgcactaaatctttaccttatgaaccttacaaggccctccatgggcctctgcctctttgtcttcttaaaggtaagagggctcactccaaatctctggactacctcaatctagataaaatgatcaaggagccagctgatacagaagtgctacagtaccagcttcaacacctaaccctccgaggggaccgtgtgtttgctaggaataatacatgaatgacttggagagagcttaaaccaatttaggtcagcctacgcttggctagaaaaaacccactgctgtactctgtacatgactcttcacactatagatggttatatcagctaagtgttcctggaacataaaaattgtttgggtcaaatttgaatacaggaatgaaatcacaggtacttgggggggggatatcattctagagcacgcaactgcaaagaaaacagaatgttgactgttagtttgtatagctttttagctaggaaaaaaaggctttggtacagtaatttcatctttatgattctgacactcaaattgggaatgttacctgcttggttgttgctgacttgatatgattcattagaaatttatatcttcagtactcaagtacttcttgaatctctgtattttactataaaatgtatgtaatgatttgttttatgaaatttagaacttgaacattgctgaattggaccactttttatttttaaatattgagtttaaatattttataactggttttgcactgaaaaaattaacatttcagattgacaagagagtaatctttcttcacttgcctcaataatgttattgagcaatgaattttttatttccgcatggaaagttattgatctctatggctgtaaaatatttctttatagcgttattaaagtgtgtcttaataaaattaaatttgggatacaaagtatttattttacaatgggtgggcgggggaaacttttccagaaagtttccaatatgacgttttcataagttgaaaaaactctccttagtgcttattttctaacttaaaattcacctggaactttaaatgggaaaggattcttttaattgtggattataggcataatactgtttgcatctgaattttctgtaagtgaataatagtttaatagaggaactcatgatttgtactattgaatgattaaactaagtatgaagtgataccattcagcatggcatcaggtcattgcagttttagttctgtgtaacacaagcactcactgaaattccagtttctaggattagtgtaggagcctaacgtgcttctactgttttaatgggttaatcctggattacttaacaatttatgtcaattgcactggtttaatttgttgctaaagaaataatgccctgggtttagtaacaaatacagctcaactattcttgaatatattttgaaaaaaaaatgtatgtaacttaccttttgtaaacgttccatttcttttttccctcatttttgactcttaaaggtgcaatttattactgaattgggatttctggcagcacagaactgctttttattttggggtctgtgagtttcttaggtattagcaatcttgcttataaaataagaacaccttttaattaatgagtgggtcattcctggtgcaattgtgatttttctttagccagaatgaatggcaaactctatttagagcaaagtaagtattagaaaaccctaggaactcttaatcaacgtttattacactttcattaaggcaaactacgtgaaagagccttggggaagttggcccatatcttactaagttgatcagatttctcgttgggctggaaatgtttcgctgttgtatattttaaagtaaattgcacctttgtaacatattgtattgacgaatgatcactaagattagctatatctatacagtcattagtttgacaagaaatagaatcctgtcagatgccaaagagtgggatttttatgtttaatgattaaacaccattatttattgacaatttaccctgtggaactgtattatttctaactatgaaataaaggggtgatgtaaacacacattgttgtgtggtgctttaaactaggtccactatcaacaggctacttactgttcaagaattccactgaagcacttattttaaggccctatttttcttaaacaaaacagtgacaacaacaatcaaaccatttacttttgatgctcattggcattttatgataaaagatgtattcatggcaatgatatgtattcaccctattaggaaacacaactggttacctatgagacctgttctgtccgtgtgcctacgttccttaataatagctaaataaaaatttgtagcttttaaaaaaaaaaaaaaaaaa

SEQ ID NO: 5783 - DNA, 2450 bp, Homo Sapiens
  NM_033212
gcacggtgcccgctctaccccgccgcagcggctgggacgtacggagcccgcaagtcccggcccgaggtccgaggaggcgtcctccgcccggtggcccagagggaagcggggcacggcgtcatcatgcacagttgtatcgcgcccgccgcgcgtccccggagccgcccctgagcccgaccgcgagttcgagctcagggcccgcccggccgcaccatgagccacgggcccagcccccggctggccgagtccccgcagctgtccaagggcagcctcctgaccatcctgggcagcccgtcgccggagcgcatggggcctgccgactccttgccgcccacgccgcccagcggcacgccctcgcccgggccgccgcccgcactgcccctgccccccgcgcccgcgctgctggccgacggcgactgggagagccgcgaggagctgcggctgcgggagctggaggaggcgcgggcgcgggcggcgcagatggagaagaccatgcgccggtggtcggactgcactgccaattggcgcgagaaatggagcaaggtgcgcgctgagcgcaaccgcgcgcgcgaggaggtgcgccagctgcgccagcgcctggacgcgctcaccaaggagctggcgggcgcacggcgcgagcgccaagaggcgcagggcgagtgcgaggcacggggccgcgagctggcgcggctgaggggcgcccggggggtcgccgaccagacgcgcgacggccccgagccggaagcggagcgcgagccagtgcgtgacgtcgggtccgagaggccgccaggcagccaggaactggagctggtggagagcctgctgaagagcatgccagaggagtctgaggactgctgggaggcgcgcagcctgggggctgggggcccgcggggcagctcaggccgccaggagcgcagccggctaccctgggaggacacagctgccacggaggaggaggcctccaagttgaccgccctgcggctacggctggatgagtcccagaaggtgctgctcaaggagcgagaggataaactggcgttgagcaggaacattgagaagctagagggggagctcagccagtggaagatcaagtatgaggagctgagcaagaccaagcaggagatgctcaagcagctcagcatcctgaaggaggcgcaccaggacgagctgggccgcatgtctgaggacctggaagatgagctcggtgcacgctccagcatggaccggaaaatggccgagctgaggggcgagatggagcggctgcaggccgaaaacgctgcggagtggggccgccgggagcggctggagacagagaaactgggccttgagcgggagaacaagaagctgcgggcacaggtcggagacctggaggaggcgctggcccggcggcggcggcaaacagccagcgcactggactgcgacctgagggccagccaggccgcgctcttcgagaagaacaaggagctggcagacctgaagcatgtgcatggcaagctgaagaagcagttccaggagaaggtggcagagctggcacatgccaaccggcgggtggagcagcacgaggctgaggtgaagaagctgcggctgcgggtggaggagctcaagaaggagctggcccaggctgaggacgagctggacgaggcccacaaccaggcacgtaagctgcagcggtcgctggacgagcagacggagcagagcgagaacctgcaagtgcaactggagcacctgcagtccaggctccgcaggcagcagcagaacgctcccctcttcgggaagatccgcagtgctcgctttggcaccgaggaggccgaggatggaaccagtgacctggacgaggacgaggacctgcaaatccaggtggcctagagcttcctgtggctgggcaggatgggccgccccatacctgcccagggtccaggctaaccagccactcaaactgatgcagtgcctaggctcactctgggaccagtccctgccacagccgactttcttctctcccagggatggcgtcaacagtcccacctaccaacgccctgtggaaaggaagcctatgttttatatatatatatacacacacgcgcgcgcgcgcgcgcacacccagaagtctttggacccatttggttttataaatacaggacagctccaaggcccagtccagatgacctcacccacccaggacttcatgcagggctgggcatgttgggggcagttgttggagccccaccctgggctgcctctctaggcttcgctgttcatcatacaatgcagtgaacccagttatttgtaataaatgaagttcaagttcttggggcatctgaaagtatggcagatgtgggcgggggttgtgggggacggcatcggcctgcacctgacgctgaaccagagctcaggaatgtcaagtaacttaataaatgagtgaatgtgaagaaaaaaaaaaaaaaaaaaaaaaa

SEQ ID NO: 5784 - DNA, 3448 bp, Homo Sapiens
  NM_033215
gccgtcggtgccgccgccgccgccgatatggcgcgtacggcccctgtggagcccccgctgcggcattccgcgcccccctcgccggccgcgggtgagccccgcacctcggtcgaggcggcggtggccccgcggagggtgctgttcgccgacgaggccttggggctgccgctggcgcagttgcgccgctaccggccgtggggcgggcccggggcgggcaagatggcggcggcggccgggcaagatggcggcggcggcggcggggccgacgaggacgacgatggcgaggatggggatgaaggggaggaggaagaggaggcttgccccgagccctcaccgctgtgccccgtccccgctggcggggggttttacctggtccccacattttcgctgccgcccgcgccgggccgtctggagcgcttggggcgcgtcatggtggagctggaggcgctgctgccgcctcccggagcggtccccgggggtgccggggtgtgggtgcctgggggccgcccgccggtgctgcgcgggttggtacgcgtgctgaaccgctccttcgagaaggcggtgcacgtgcgggcctcacacgacggctgggcttccttttgcgaccacccagcgcgctacgtcccgcgcagcccgccgtgggcaggagcgggaggaacaggagcaggagatcccatcctggatccggggctcggcctgggtcccggccaggcatccgcctcctcgcccgacgacggcggccgcaccgaccgctttgccttccagctgccctttgctgagggcgcgggcgatggggcgcgcctcgacttcgtggtgcgctatgagacccctgagggcactttctgggccaacaaccacggccgcaactacacagtcctgctccggatcgcacccgctcccacacccactgatgccgaagggctgccccagcagcagcagctgccgcagctggagccacagcccgagtgccagggtcccgtggaggctgaggccaggcagctgaagagctgcatgaagccggtgaggcgcaggcctgccgaggaggaactgaagacgaagaacatggatgataacacctttgccatggcagagcatcctgatgtccaggagtcagtgggtccactggtagcccccacccctctccgtccatggccccagatgacacttcaggtttctgacgttccgatgactggcaaccccgcagaagaaggtgatgtccccagaagcagtccacctgtggcttttacagaggtcctccaggcaccggccatcaggattcccccctcctcccctctctgtggcctgggtggctcccccagagaccaggcctcagggcccgatgcgagcgagggggccaccgggcctttcctggagcccagtcagcagcaggcagaggccacatggggagtatcgagtgagaatggaggggggctggaggctgtgagtgggtcagaggagctgctcggtgaggacaccatcgaccaggagctggagcagctctacctgtctcacctgagccgcctacgggctgctgtggctgcgggtggggcagggggtggtggggagggctccacagatggagggatgtcccccagccatcccctgggcatactgacggaccgcgacctgatcttgaagtggcctggccctgagcgggccctgaacagcgccctggctgaggagatcacgctgcactatgcccggctggggcgtggcgtggagctcatcaaggacaccgaagaccctgatgatgaaggggagggtgaagaggggctctctgtcacaccctccagcccagaaggggacagccccaaggaatcgcctccagaaatcctctccggggcccgttctgtggtagccacgatgggagatgtgtggctcccatgggcagagggctcaggatgtgacggccctgtggttctgggtacagagggtcagttcattggggatcctgagaaagggatgggcaaggacaccagctctttgcacatgaatagggtgatagctggggtgactgagtccctgggggaggccgggacagaagcccagatagaggtcaccagtgagtgggcaggcagcttggatcccatatctggcaaggagccagcctctcccgtccttctgcaggggcaaaatcccaccctcctcagtcccttgggggccgaagtctgtctctctagtgtagccaggcctcatgtgagctcccaggatgaaaaggatgcaggcccaagccttgaacccccaaagaagtctcccaccctagcagtccctgcagaatgtgtgtgtgcactgcctcctcagctccgggggcccttgacccagactctgggggtcctggccgggctagtggtggtccctgtggctctgaacagcggtgtgtccctcctggtgcttgcgctgtgcctctctctggcttggttctcataggctctgcttgtgggatcagcagaggcttaagatgggatacatggcctgtgcagtgaggggacctgggtcctttgcttctgagaatgctcaactgaaagagaggccttctcatccccaagctctccagtcaacacagggctccctgtggtgacaccagtggagatgagggaacgggtagatggtgtgagtgaggggaacttttagagtggaactgggcatgtcctccgcctaccccccgagcctgtatttatttttgtataattctctggatgagggagagtggtcgtgagctggtcttggggcacaattacccagagatatatttattaacagccaacctgtgcaacctgctggagctttatttttaatttaatttatatagagtacctattattatatgccacaatagagctctatgagaaacagtgtcttgcggtgtagtgttctcctgtttgggcatgagtgtgcagggtggtcactttctgtgggaggatcacagtggggagttgggggtgggacgtggtcgcctgctgctgcttcaacatgtctttccttgaagatgtgtgtctcctcgtctcgtggtcctaatccatatggttctttgtcttttccacattctgcctgtgggaccctacaggtgtgtatttggatggtggtggtgggagccagggaggaagagtggcagccacatgagggtttggtgtcagtcacatggttgcagtggtagctgtggtctcctgtggatgtggggacatcagttgtgaatcagccacaaggttttgaggttactgaaaaaacagcctttgacaccagcagggagaccccttagtccctgagataaggaaggcctcagaaaggaaagaggagttaatgtactgcagtacttggtagcacagttgctgtccacagacatcacatttctactaaaaacaggaagcccagaagctttgaaagaaagatatatatttattgcatgcaaataaaaaactgctcaacaaaataaaaaaaaaaaaaaaaaaaa

SEQ ID NO: 5785 - DNA, 3396 bp, Homo Sapiens
  NM_033222
cagtgctagcgggcgccgagcgggagccgcgcgggagcagcgcagctacggcggcggcagcggcggcgcggttgcgattccgagccgttgagacgcctctgcggcagctggtggcgcaggtggcttgcgtggacgcgggtagaggcgaccggccagcaaccgcagcgtcggcgcccgcggccccggcagcaggcgcgtcgggacgccccgaggcatcctcccccgcccgcgggcccggtagctgggcccgcgtccgccgcccgcatccccgcgccgccgcatctcctcgccgcctcccgggcttcggacccccggtctcgcccccgaaacatgactcgcgatttcaaacctggagacctcatcttcgccaagatgaaaggttatccccattggccagctcgagtagacgaagttcctgatggagctgtaaagccacccacaaacaaactacccattttcttttttggaactcatgagactgcttttttaggaccaaaggatatatttccttactcagaaaataaggaaaagtatggcaaaccaaataaaagaaaaggttttaatgaaggtttatgggagatagataacaatccaaaagtgaaattttcaagtcaacaggcagcaactaaacaatcaaatgcatcatctgatgttgaagttgaagaaaaggaaactagtgtttcaaaggaagataccgaccatgaagaaaaagccagcaatgaggatgtgactaaagcagttgacataactactccaaaagctgccagaagggggagaaagagaaaggcagaaaaacaagtagaaactgaggaggcaggagtagtgacaacagcaacagcatctgttaatctaaaagtgagtcctaaaagaggacgacctgcagctacagaagtcaagattccaaaaccaagaggcagacccaaaatggtaaaacagccctgtccttcagagagtgacatcattactgaagaggacaaaagtaagaaaaaggggcaagaggaaaaacaacctaaaaagcagcctaagaaggatgaagagggccagaaggaagaagataagccaagaaaagagccggataaaaaagaggggaagaaagaagttgaatcaaaaaggaaaaatttagctaaaacaggggttacttcaacctccgattctgaagaagaaggagatgatcaagaaggtgaaaagaagagaaaaggtgggaggaactttcagactgctcacagaaggaatatgctgaaaggccaacatgagaaagaagcagcagatcgaaaacgcaagcaagaggaacaaatggaaactgagcagcagaataaagatgaaggaaagaagccagaagttaagaaagtggagaagaagcgagaaacatcaatggattctcgacttcaaaggatacatgctgagattaaaaattcactcaaaattgataatcttgatgtgaacagatgcattgaggccttggatgaacttgcttcacttcaggtcacaatgcaacaagctcagaaacacacagagatgattactacactgaaaaaaatacggcgattcaaagttagtcaggtaatcatggaaaagtctacaatgttgtataacaagtttaagaacatgttcttggttggtgaaggagattccgtgatcacccaagtgctgaataaatctcttgctgaacaaagacagcatgaggaagcgaataaaaccaaagatcaagggaagaaagggccaaacaaaaagctagagaaggaacaaacagggtcaaagactctaaatggaggatctgatgctcaagatggtaatcagccacaacataacggggagagcaatgaagacagcaaagacaaccatgaagccagcacgaagaaaaagccatccagtgaagagagagagactgaaatatctctgaaggattctacactagataactaggttgacatacctggaatatagagaacacttgagaagtttgtaatggttttcatttgaaatagactgctgaaagttttaaatttttataagcataggtttgatgttgaaaacttgttttgagggagaaaatccctttgttttaaagtaaagtaaacattatcgctaagtgtacttgtgcagtattaacagctacattatacagtaaatgtgggataaaatccatttagaaaatgttaaactgcttttccagacatggttgtagcatattttcaattagtgtgtgtatgttaatgtgtaattgatagtagaacaaagttacatttttaaaactgctacttgtataaaccttgcctcttttcccaaatactgtgggttttgtgcatagtttttacaaaccttggatttaccagactgtcttttcactgtttgtgggttttgtagaagttacacatttttatggtagataaaatgttacttctatacaagtactcactccctttttatcaaaagttaattttaatctcacagtctacattgtgctacattatccagcttctttggaacaatgtgtgctctgtatggttttttttggtatgacaactaattaagcaactgacatggaactgagaattctacaaactataaaacattaatttttgaaggtaatttagttttgtggctgggcattcagtgaagtcttaggacttctttgcagacaactgactgggtatatataggaatgaatctggctttagggttaaatcatttaaggtccttttataggcaggcactagtaactaaaactgaaaactaagtaagtttatttttgaggaatgttgttaaaaatgtctttaggaagtcactaaaacttaattggaagaaaaaatcatgatgcttatacaataaatatgaataaatgttatataaggaaactcacctatttgaaatcatggctatattgtttttattttctagattccaaaaatacaaacactagttgttccagcattgtactttgataagtctgtacattgacgtgtatggactaaatccagggtaaaatcaatgttacaaaatttaagggtatgttaactaaaggatagcatttctaagatattttgaatattagggtcatttggcacttctcagcaagtaggatacttctcatgttttgaaattatatgaatatggaaaaaaatggcttaagaccagcgtctctgtatgacattgtgtggttgaccctctgagataactgttttcatctacagaattgcatttttgcttttaaagaggtcttataatggaactaggaatcaccgttttgagagaacctgcatatataccagtcattatctgtttggtccttatacagttttaacttacttagatttattctagttaagccataagttcaacgtgtaaacttgttttcattaaagaatttttctatcaaaaaaaaaaaaaaaaaaaaaa

SEQ ID NO: 5786 - DNA, 9074 bp, Homo Sapiens
  NM_033224
ggcggcctagaagatggcggacggcgacagcggcagcgagcgcggcggcggcggtgggccgtgcgggttccagcccgcgtcccgcggcggcggcgagcaagagacgcaggagctggcctcgaagcggctggacatccagaacaagcgcttctacttagatgtgaagcagaacgccaagggccgcttcctcaagatcgccgaggtgggcgcgggcggttccaagagccgcctcacgctgtccatggcggtggccgccgagttccgcgactcgctgggcgacttcatagaacactacgcgcagctgggccctagcagccccgagcagctggcggctggcgccgaggagggcggcgggccgcggcgcgcgctcaagagcgaattcttggtgcgtgagaaccgcaagtactacctggacctcaaggagaaccagcgcggccgcttcctgcgcatccgccaaacggtcaaccgcggcggtggcggcttcggcgcgggccccgggccgggcggcttgcagagcggccagaccatcgcgctgcctgcgcagggcctcatcgagttccgcgacgcgctggcgaagctcatagacgactacggaggcgaggacgacgagctggcaggcggcccgggaggcggcgccgggggcccagggggcggcctgtatggagagctcccggagggcacctccatcaccgtggactccaagcgcttcttcttcgatgtgggctgcaacaaatacggggtgtttctgcgagtgagcgaggtgaagccgtcctaccgcaatgccatcaccgtacccttcaaagcctggggcaagttcggaggcgccttttgccggtatgcggatgagatgaaagaaatccaggaacgacagagggataagctttatgagcgacgtggtgggggcagcggcggcggcgaagagtcagagggtgaggaggtggatgaggattgaaacgggcagcttcccctacaggcctccacccaaccaccatccccttggctagagaattccctttcctgctcatccccagtgagctagtggagagggagcaagggaggccgcagagggaaaaaacaaaacgtaacacagttaagagaaataatcgtaagagaacagtgacggacaacttgagaaaagcagtcaagttccaaggaactgacagcaacctgcaaagaggaaaacagcatctcctcacctgcgtaaaattgtctcagcttctgttgtttctcaactgaggttcgtaaacccatcaggataatccctggagggaatagatccttgcacatccagggcaagaaacatgtccaagttacccagaccattgataacagttgcatttaggttgcacctgggtaatctggcataaaagatctctctaggcctcactgttgcggtgtctatcccttcacctccattgaaatcagcattttggatctaggtcttcatggaatccttgagaagagaggcctttacaattacccagttctgagggttcaggttcacgaaaagaaatgcaacttgggataatcatgaacaggttaaagataagatttcaagaagccatctaagaatacagaaccaaattggatccatttttttaaaaaaatggttttgcatggaacctggaccaaggcaaatgtcttttcttcgcagaattgttttccaggatgccagtggattcagatagcaatgcttggagtagaatccgttactaaaatagtttcaaagttgacaaaaaattttcaaagataaaagcagttttacattgggggttgctgaggtaggcacaagaaaaagtcaggcataaagcacaaggcagactgtttgagtggattggttgctgctcactaaagttgttcccctgatctctaaatatggaggtcattaccaagaaatgctttggtatgaatgagagccagatctccactgtgtgagccagtgaattatggctaattcggctgttacagccactggttggctggattttaaaccataaaacttgaagattacctacaaaagtaacagtgtggctataagcctgagctttaatggatatacatcctcacagaaaagttggaaataaccaaaactgaagtcttaatttaccttcagtttaatctgtggatttgttcaaatactaaagatcctcaggtccagaattccagcatcatttattcttttaaaatttttaagaacttgatccattgtatcagtacctcacaatcagagttggcaaatgatggatgagtgattcaagcagtgcacccggtggaagctgaaatccatctgtgaatggaactgaagtgaacgtgaatatgctgactatatcctggaagcatttttataccatcttgaaatttcaacaaactggcttttgccagttaatccagctgtctttcaagaataaaagttggggttttcaaggatcgcctcttctatattttaaatggattttcagtagaaatgatttttactaatcaagttaatcccaccccatcaaaaggtattcctagaaatgtcatagacctaggtaactttgaattgaatgggagctaacgttctttccaaagttttcaggtattctttgtgtgacaccttctcaaccaggaggcaagtaaccccgcctccacaatcttagtattttttttaaactgcatgcctgccccttatttgagctgcctttttaatttattgcatatcctttttattatcttattttggtattattcaatctatacaatctttttgtatttattgggaaatgagtaatatacaaaaaggttttcatgtatttgtggctgagagggcgggaaataattgtgtacataaaattaggcttttttaaaaaaatagattatgatgcagaatattgttgatcttagattaaaaagtggaagagccacaaacattggtgcccttttcagactatttctctactctcatcatccacagtagaatttttaaacagatttttttaaagcttttcttttaaatttttctccgttgcaaagaatgtttcctaaattgtatgggagcaatagtatttttgatgttttaatgacatccgtatacttgtactgtattttgtactacaaggcagctgtttttcaataatgtcctgctgtatttacctacgtgttttgagtgtctatttctttgctgcggagaacaaattcctaaatagttttagtaaaggagctgagaagctagcattaggtttgcagaaactatttaagtttcaactctgaggcagcaatgaaaatttaagttgcagctattagttgattgctgtaactttttcattttcaaaccatgtacaattcttgtatagaccaacttgttttcttgcttcagtggtggttctgttgctcagctgcagtgagccagttcaattttgcaaaggtgcagtacctctcctttttaaggggttggtttattcttttttctttttgtttggctgaattgcagtaactagccttgcctttctattctgtagaaatgacagggtcttcacaatccttcaccagtggctactaagctataattagctgaatagaaagaatgtggaagtggtctgaggcatatagagtatatgccaagaacactaccatatatggcatcagctttggttaccagagaaattttcttagtcattagaccatgtaacagtaatatatcatatgtaaatctttagatatcaatttgaaaatcctccaaaaaaaggagcaaagaatgcataagctatgtgttggcaaaagtaatttatattaaaattttgacctgcctatgtaagattaagtggtaatgtcatagtggtgggtttttaagtcttaaccaatctctaaggtttgtttctcctgcaagggatggttcatggcctctcttcccactgcaggaagattgcagaaggctgtggattaattgtagcatttcactgatcttcactccagtcactagggacaatagaaacctgcaaaacacagattcattcgtaaatattattaatagcttattaaaggaaatggtctttgttaattccagtcagataatggcattgtacagacatgggaaacaaccaatttttttgtttttcagttgttgctatgaatgattttgagcctttttttttaagcttggcaaacatcccagctaatcaaaatagtcatattcctgagaagtaggaaactaaaacttcttttcatataattgttagaaggtttgtttcccaaactaccatagttacaaaggtgaaaagccaaattttaggaacagaatcaaaagaataaaaatctgtgaagagatcctactactcttccttctatgttttggttttggtttctattgtccctatcatttcagcaagtggaacagcagcaagtttttcagtgcatatgctgcacaagaacaaaatataaatctgtatggcaccaaaaatcaaagtgaaaaccaaaccaaaaacccaaacaccctatgtaactatcggaggcatatacgtggtataaatgactgtagctgtgatacacacatggctacttgtcacatcactttccataattatttactgcaaaatgattgagaggcttttggtgcaggcagccgttaacctcctgcttcctttgttacctctggattactttgcagtaaattgcaggtcttttaagagatttaagcttcagttttctcaaaacaaaacaattatcctgtcttatctgaagatgcagggttgtgggcaaaagaggctggttataataatgccctcatattgagtggtctgtaaacggctgcacacttcaggcactgtagttgctgaagatgctttgttaaatgtgaccttgactggctttacaggggtgtagaatgtaatctacacaaggtgactttgcatctatcttgctcttgaggtggatgaaattgagaagctggagtgtgtaagccatgcacataagtattcttcactgtaaattttgttttcatttttaacccaattatggtactttatccaatgcacaactgatctctcagtagatattcatttgaaaatagtgtggccttgatcagtgagaaagggaaggagaaaagtgacttttttgcttatgtagaaatgactcatttgctgagagtttgtctttctgcagcactcttggtatatagtgatcggtctcctttttgattggggaaagttaatgtttttgaccctggagttaattcagttgagttatcttatatttttaggaagtatcagaattgctctgatgaataacaaagttgactgttttgatgtccaatctcaggttttagaatatagtggtgtaaagtcccactatttttaattcttaaaacaactttaatttcgtacaccctaaaagtcacatgcataaggcctgttcagagagcagagcctccatctttttgctccttttctactttgtacttcacttgaaaaaatatcaagtgactttacattgtatatttccattgtaaccctgacatttctcaaagataaagcactttttgatcatgaaatacatgaaatctttgtgtgatgtggatcatagtttctcaggctcccttagataattgcttatgaatattgttctaactctgtgtaagaagagtagaaatctttgctaatgttagaaggtttgtattattgatccagaatgcattttgctagtttccaatggatgggagagtaaataatgctgcattcacaatttaataagttactttcccttgagccttaaggtaactttttctttcctgtcaactacagcactgaagttatagtaagtgaatgagattatcagttttcagggttggttttagagtactgtaaatcaattagctgtcttcctaaagagttacaactcccattcagtatactggataatgggtgtgtgggtggggctggggagggcgggagatagtttgtagaaaagaaaaaagaaaaaaaaaaaaacacatttaccttaagaaaatacagacaaaaaagaataaagtatgtgtcatatgctccatttgagattccaaatgcggccgggcgtggtggctcacgcctgtaatcccagcactctgggaggctgaggtgggcgggtcagttcaggtcagcctggacaacatggtgaaaccccgtctctactaaaaatactaaaattagccgggcatggtggtgcatgcctgtagtcccagctacttgggaggctgaggcaggagaatggcatgaacccaggaagcggaggttgcagtgagccaagatcgcgccattgcactccagcctgggtaacagaacaagactccgtctcaaaaaataaataaataaattccaaatgtaaggtggaaatggcagattataacttcatttcccccatttttaacttagaaaaaacaaagtccttaattttcaagtattagccccccagaagtttcagcagatagctggactcttgaataatgatttcttttgatatgtctgactttgctatttaaagtctcctttcccagccctcagtcttaaaactcagttttattactgacggatttaacagactcttacttgaaaattgtccaattatcagtactgaaaattagatttggaaaatgaaaaaataataaaatcgcatcaagaaaacttattaccttagagattcccaattgatatctgtacccctgatccaagtaaggcctttatgaatgtattttatatttcctaaagaaatagggaatatgccatcagtgtaatcacctctattcacagtcatttaatttgaaaatctaactcatgtctcttgaattagacattccaattgggataggtagagtcatgttaaaacaatagaatagcaactgccatattggtagtttcactgctcaatatgatttctaataagagcagagctttattggaagctaaaactcatttttctccatagatgattctaacagtttaataaaaaagtataattatactttaagtgtcaacagattttgagtctagaagcaaatttcattttccttgtgttatatctaatatccattgacatgggtaagaaaactaattatgtctttttagtatgatgaaatgtgggcccagagtattggaaagaaagcaatagccctattcagtgtccactaggatggatattgcagaaggcatgagtttgtccttttttcccccttaccttaaataacacttcaatagctaactttttccaaaatatccatttaggccatctcttatttcttaaagccaaatatttcgtccccagtcttaactctgagttgcaagatcaggctggttggaagaatctttatatttagaaataggatggtgagtggtttgtttattctcttgtaaaattcctttttcagagacataactgcagggagagtcccaagagaactgaagaactggattatatcattaaacacatttgtgttgtaggaatttgggagtttcattttgaactgataagatattagacataaacccttgttccagcccacatgtgtcatccctgtgtacaaaagctctctggattctttttttttttttgagacggagtttcgctcttatcgtccaggctggagtgagtgtagtggcttgatctcagctcactgcaacctttgcctcccgggctcaagcgattctcctgcctcagcctcccaagtagctgggattacaagcatgtgccaccatgcccagctaattttttgtatttttagtagagacggggtttcaccatgttggccaggctggtctcgaactcctgacctcaagtgatctgcccgcctcagcttcccaaaatgctggaattacaggcatgagccatcacgcctagcctactctctgaatttctaaaagtcagtaggttgaccaaaaagtctagaaactggctttaagtcagtatgggacgtacttataaagagtccatggttttgcacgtttcggtagacaagtaaatctgagttatttttcaatgacttaccaatatttgaatagtaactaagatcgtcagtgtatctggacttctttttttgaagttctaaaacaattatagtagggatttattattttgggcctccatccagatgtttttccaagatcatttttaaaattcatttgtcttctgtttccagataacatactttccgttctataggaatcttcactgccaatcatagtatctaccagtggctttcttagactattcactccaaagctgggactgatgtcctgccagtagagaatctacagaaataatttgaatgaattaaaaccaaatcttgatagcaggagacagcttcctgatctagatgtacaattagagtttaggttggaaattactttaaaatgtgttttttggggatgtcttcaatctctgtgtaaatacccacatgcttatgcattgtaaaccaagtgtgtattcctgtgtatgaatttgtagaactgatttctgcttcaagagaagctgcacctttaattttataaggtcccctccacctgtaaccctataaatgtctgtaaataaaacactaaaatttgtagtgataggatcaatttgggaatatctgctgagagaccaaaaagttcatttttttaagtaccttggttaaagagtaaagattattcctcttattttttaaagaagaatgcactttaacaaacatagagctgcatgggcaattcaaacaaatctgtgaagtgcagtacccattcagaaatcacacttcctgaaaaccgttcaaaagcagagtccagacgggctgttgatctcactgcctgtaggttgaagctcagattctgatcaattttgagaggagcagggctgcttcaaaagagcaatgtgaatacagtcagaagcttcagactggtctgtaaaaatggcgggtcccgtatttaccactaactagcaaaactgacagaaaaactcacagagaaaaaatgtaagaatccttcctgctggtgtgcactccttacaatagacttttgcaaatggagttttacagtctatatttaaaaaaaattgtatgtttgtaacaaataaagtatgcagaaaagtgaatgacaaaaaaa

SEQ ID NO: 5787 - DNA, 1296 bp, Homo Sapiens
  NM_033251
ctgggtcctggcctttgggcatcatccagcgccatcggcctggcgcttcagccaacgcgggagtggatgggccccttcttcttcgcagacagcgttcggccgctgcccgggctctaggcgcggccggacggcccagtctggagggttcggggcggaggcccgggggggtgcgcgcgcccggggtccggcctctcactcgctcccctctcgtccgcagccgcagggccgtaggcagccatggcgcccagccggaatggcatggtcttgaagccccacttccacaaggactggcagcggcgcgtggccacgtggttcaaccagccggcccgtaagatccgcagacgtaaggcccggcaagccaaggcgcgccgcatcgccccgcgccccgcgtcgggtcccatccggcccatcgtgcgctgccccacggttcggtaccacacgaaggtgcgcgccggccgcggcttcagcctggaggagctcagggtggccggcattcacaagaaggtggcccggaccatcggcatttctgtggatccgaggaggcggaacaagtccacggagtccctgcaggccaacgtgcagcggctgaaggagtaccgctccaaactcatcctcttccccaggaagccctcggcccccaagaagggagacagttctgctgaagaactgaaactggccacccagctgaccggaccggtcatgcccgtccggaacgtctataagaaggagaaagctcgagtcatcactgaggaagagaagaatttcaaagccttcgctagtctccgtatggcccgtgccaacgcccggctcttcggcatacgggcaaaaagagccaaggaagccgcagaacaggatgttgaaaagaaaaaataaagccctcctggggacttggaatcagtcggcagtcatgctgggtctccacgtggtgtgtttcgtgggaacaactgggcctgggatggggcttcactgctgtgacttcctcctgccaggggatttggggctttcttgaaagacagtccaagccctggataatgctttactttctgtgttgaagcactgttggttgtttggttagtgactgatgtaaaacggttttcttgtggggaggttacagaggctgacttcagagtggacttgtgttttttctttttaaagaggcaaggttgggctggtgctcacagctgtaatcccagcactttgaggttggctgggagttcaagaccagcctggccaacatgtcagaactactaaaaataaagaaatcagccatgaaaaaaaaaaaaaaaaaaaaaaaaa

SEQ ID NO: 5788 - DNA, 2338 bp, Homo Sapiens
  NM_033260
ctcaacgtcgaaccgaaggcgacacccacccaactcctccctctccgccccatagtccacccaacacttgcagcccctccagagaaaaagcccagcggaagaggactccggaaaagtgactatctcggaagaccagggtagagctcccgggagaaaaaggcgaagatccccggccccggatcgccatccccttccctggcaccagcttctctaggctgcgcgaaggaagagggtacgacgccggggagggactgggtgcgcgggcatgaagttggaggtgttcgtccctcgcgcggcccacggggacaagcagggcagtgacctggagggcgcgggcggcagcgacgcgccgtccccgctgtcggcggcgggagacgactccctgggctcagatggggactgcgcggccaacagcccggccgcgggcggcggcgccagagatacgcagggcgacggcgaacagagtgcgggaggcgggccgggcgcggaggaggcgatcccggcagcagctgctgcagcggtggtggcggagggcgcggaggccggggcggcggggccaggcgcgggcggcgcggggagcggcgagggtgcacgcagcaagccatatacgcggcggcccaagcccccctactcgtacatcgcgctcatcgccatggccatccgcgactcggcgggcgggcgcttgacgctggcggagatcaacgagtacctcatgggcaagttcccctttttccgcggcagctacacgggctggcgcaactccgtgcgccacaacctttcgctcaacgactgcttcgtcaaggtgctgcgcgacccctcgcggccctggggcaaggacaactactggatgctcaaccccaacagcgagtacaccttcgccgacggggtcttccgccgccgccgcaagcgcctcagccaccgcgcgccggtccccgcgcccgggctgcggcccgaggaggccccgggcctccccgccgccccgccgcccgcgcccgccgccccggcctcgccccgcatgcgctcgcccgcccgccaggaggagcgcgccagccccgcgggcaagttctccagctccttcgccatcgacagcatcctgcgcaagcccttccgcagccgccgcctcagggacacggcccccgggacgacgcttcagtggggcgccgcgccctgcccgccgctgcccgcgttccccgcgctcctccccgcggcgccctgcagggccctgctgccgctctgcgcgtacggcgcgggcgagccggcgcggctgggcgcgcgcgaggccgaggtgccaccgaccgcgccgcccctcctgcttgcacctctcccggcggcggcccccgccaagccactccgaggcccggcggccggcggcgcgcacctgtactgccccctgcggctgcccgcagccctgcaggcggcctcagtccgccgccctggcccgcacctgccgtacccggtggagacgctcctagcctgagtagcgccgcggggcccgggaacgccgagtgcgcgccgtcggggaggcgggaacgcgggcccgcgcgcggactttgcactttgaatccagaggaagatgaatttttaaaatctccatcaaacgtgccttaaagctaaagcattttgacaggagtatttaaacttagtccaggatattttcctttgtgttttataactttacagaggaccaaagcaattcttgttttagtttctttgcgaagcctgctcctccttcccttcataaggactttttttgtctttctttaacgcccaggcttcgtcttatttctactgtttttgtcgcaacttccattgatttatgtcccttccctcccccctaagtacatcagggaacctttccacactataaatgatatgactactgtttggggtttctgggcccccatccgtgtacgtatgtggcatttccaggtatgactgagtgtgagagacatgtcagaggctcttcagtgatttcttgctattgaccgatgcttcactgtgccaaaagagaaaaaaaatgttgggttttgtaattaaattatttatatatttttgaaacccgaattgaaaatgttgcaggcaacgggctacagctttattagtggttctctaactgtggtctccttgggccaagcaatttctttaaaggaaaagttgattatgtatgtggggtgccaggaccactgccttgaaagcaagtgtgatttttatttttaatattattttatttgtgtctgtgtacatattcatgtataaattttatgaaacccaagcatagtgcttattttttaataaaacaactgacttaacacattgtgaaaaaaaaaaaaaaaaaaaa

SEQ ID NO: 5789 - DNA, 2001 bp, Homo Sapiens
  NM_033271
cgcaccggcgccgcggcggagccgctcccgaggccccggcgcggcgcgagggcgcggggcgcggcgtccacaggcgccgaggctgcccccgccgccccgcccgcgaagatggcggcggaactctacgctcccgccagcgccgcggccgcggacctagccaacagcaacgccggcgccgccgtgggcaggaaggccgggccgcgcagcccgcccagcgcccccgcgccagcgccgccgccgcccgcgcccgcgccgcccacactcggcaacaaccaccaggagagccccggctggcggtgctgccgccccacgctgcgcgagaggaacgcgctcatgttcaacaacgagctcatggccgacgtgcacttcgtcgtggggcccccgggggcgaccaggacggtgcccgcccacaagtacgtcttggctgtcggcagctccgtcttctatgccatgttctacggagacctggcggaagtcaaatctgaaattcacattccagacgtggagcccgcagcctttctgatcctcttaaagtacatgtacagtgatgagatcgatctggaagccgacacggtgctggccactctgtacgctgctaagaagtacatcgtcccagcattggcaaaagcctgtgtcaactttctggagacaagtttggaagccaagaacgcctgcgtcctgctgtcccagagccggctgtttgaggagcccgagctgacgcagcgctgctgggaggtcattgacgcacaggccgagatggccctacggtccgaaggcttctgtgagatagaccggcagacgctggagatcattgtcactcgggaggccctcaacaccaaagaggcggtggtcttcgaggccgtcctgaactgggccgaggcggagtgcaagaggcaggggctgccaatcaccccacgaaacaagaggcatgttctggggcgagccctctatctggtccgaattccaaccatgaccctagaggagtttgccaacggcgctgcccagtcagacatcctgactctggaggagacccacagcatcttcctgtggtacacggccaccaacaagccccgcctggactttcccctgaccaagaggaagggcctcgccccgcagaggtgccaccgattccagtcttctgcctaccgcagcaaccagtggcggtaccgcgggcgctgcgacagcatccagtttgcagtggacagaagggtatttattgcagggctgggcctgtatggctccagctctgggaaggctgagtacagcgtgaagattgagctcaagcggctcggggtggttctggctcagaacttgaccaagttcatgtcagacggatccagtaacaccttcccggtctggtttgaacacccggtccaggttgaacaagacaccttctacacggccagtgccgtcctggacggcagcgaactcagctactttgggcaggaggggatgacggaagtgcagtgtggaaaggtggccttccagttccagtgctcctcggacagcaccaacgggactggggtccagggtgggcagatccctgagctcattttctatgcctgaggtgcccggggaggctgcagcaggtcagcgagtgagtggaggggaagtcaagatgctaactgcttcttgacaccatgaaaggctgctcttaactttgtctctctttgacatgtagtcagctgaagcttgactgtgtagagacattttccacacagccagaacccagggattggagtcttaggcatctctggtacagtggggtgcacgtctcaggtggaggaagatttacggctcaagacaggccccagatcccctcccagtggcacccatgccacctgctttgaggggttggatcttcctgctaccctcttggattctaagtggttccaagcttaacttgagaccttcccttcaaatctaaaattggcaaaaagtcacttaaaatagtggacttctgtaataaaggttgcctaaaataacaaaaaaaaaaaaaaa

SEQ ID NO: 5790 - DNA, 4219 bp, Homo Sapiens
  NM_033288
gcagttgcccacagacccggaagtggatcgtgcggagcaagcatcacaccatggcgtatgagtgttcctctgtgtagactcaacctgcgcctcgccgtcccccattcgcacacccgatgcccgggggtcgctacggacttaaaatctccgcaccgcaccctccacctcagaaacgttcctggatccgaacactgccccctgacgacctagagagatcccggctcccagcccactgagtggcttcagcctcgctggaagaagtctggaagaagaggaagaggaaagaaaaggagtcagggatggcccttactcaggtacggttgacatttagggatgtggccatagaattctctcaggaggagtggaaatgcctggaccctgctcagaggatcttatacagggacgtgatgttggagaactactggaaccttgtttctctgggactgtgtcattttgatatgaatattatctccatgttggaggaagggaaagagccctggactgtgaagagctgtgtgaaaatagcaagaaaaccaagaacgccggaatgtgtcaaaggcgtggtcacagatatccctcctaaatgtacaatcaaggatttgctaccaaaagagaagagcagtacagaagcagtattccacacagtggtgttggaaagacacgaaagccctgacattgaagacttttccttcaaggaaccccagaaaaatgtgcatgattttgagtgtcaatggagagatgacacaggaaattacaagggagtgcttatggcccagaaagaaggtaaaagagatcaacgcgacagaagagacatagaaaacaagcttatgaacaatcagcttggagtaagctttcattctcatctgcctgaactgcagctatttcaaggtgaggggaaaatgtatgaatgtaatcaagttgagaagtctaccaacaatggttcctcagtgtcaccacttcaacaaattccttctagtgtccaaacccacaggtctaaaaaatatcatgaacttaaccatttttcattactcacacaaagacgaaaagcaaacagttgtggaaaaccttataaatgtaatgaatgtggcaaggcgttcactcagaattcgaaccttacaagtcataggagaattcatagtggagagaagccttacaaatgcagtgagtgcggcaaaacctttactgttcgttcaaatctaactattcatcaggtcatccatactggagaaaaaccttacaaatgtcatgagtgtggcaaggtcttcaggcacaattcataccttgcaactcatcggcgaattcatactggagagaaaccttacaagtgtaatgagtgtggaaaagcctttagaggacattcaaacctaactacccatcagttaattcatactggagaaaaaccgttcaaatgtaatgaatgtggcaagctcttcactcaaaattcacaccttataagtcattggagaattcacactggagagaaaccttacaagtgcaatgagtgcggcaaagcctttagtgttcgttcaagcctagcaatccatcagacaatccacactggagaaaaaccttacaaatgtaatgaatgtggcaaagtctttaggtacaattcatacctcggaaggcatcggagagttcatactggtgagaaaccttacaagtgtaatgaatgtggcaaagccttcagtatgcattcaaacctagctacccatcaggtcatccatactggaacaaaacctttcaaatgcaatgaatgcagcaaggttttcactcaaaattcacaacttgcaaatcatcgaagaattcatactggagagaaaccttacaagtgtaatgagtgtgggaaagccttcagtgttcgttcaagtctgactacccatcaggcaatccattctggagagaaaccttacaaatgtattgaatgtggcaagagcttcactcaaaaatcacaccttagaagtcatcggggaattcattctggagagaaaccttacaagtgtaatgaatgtggtaaagtcttcgctcaaacatcacaacttgcaaggcattggagagttcatactggagaaaaaccttacaagtgtaatgactgtggcagagcctttagtgatcgttcaagcctaacttttcatcaggcaatacatactggagagaaaccttacaaatgtcatgaatgcggcaaggtttttaggcacaattcataccttgcaactcatcggcgaattcatactggagagaaaccttacaagtgtaatgagtgtgggaaagcctttagtatgcattcaaacctaactacccataaggtcatccatactggagagaagccttacaaatgtaatcaatgtggcaaggtcttcactcagaactcacaccttgcaaatcatcaaaggactcacaccggagagaaaccttaccgatgcaatgagtgtgggaaagccttcagtgttcgttcaagcctaaccacccatcaggcaatccatactgggaaaaaaccttacaaatgtaatgaatgtggcaaggtctttactcaaaatgctcacctggcaaatcaccgaagaattcatactggggagaaaccttacaggtgtacagagtgtgggaaagcctttagggtaagatcaagtctaactacccatatggcaatccacactggagaaaagcgttacaaatgtaatgagtgtggcaaggtcttcaggcagagttcaaatcttgcaagtcatcacagaatgcataccggagagaaaccttacaaatgagtgtggtgaggtcattaggtacaattcactcctttcacatcagttaatttcattcttgacagaatccttacaaatgtagtgacagtggccaatccctcatgagttgaagcattaatagatatgagaggccataagcaagagacatcatgtaaacatatgtggcagagggtctatccaggcctcgcaggttactaggcatcaagatttatatctttgatgaaacgaaacaaatgtaatatgcatcctgaggccattacccagtgaccgatggtaagtgaggattcctaggaggaataacagtctctggtttccctgtttgcctttgatattatacactgtagaatactcacaagtccaaatatgctaaaaattatatatttttaactcacatacgaaaaggttgcaggatatttgtaggcagtcagttaccttcaccttatgaaatgtttcactgagttatttgaggttttttggaaagcctactattgcgtttcaatgtgaactttgaaatcttattgtgcatccttacacaccttccatggtgctttcttggaaagatcattgggatggaaggatcattgattgggtgaagatcattgattaggtgaaggattatttctatccaatttgtgaagaaggaggactttgcttttaaaattaagtatcatctgaattagcatttgggagtggcgaaaaacaatgtaaaactatgatgtcactcaccattctgataatgttcagggtgcctttctcctaccaggagagtactgtggcttagaggaaagaaatggtctatcaactgaacatgaaatggagcaggccaagaccttaggacattgggatttttgtgggaggagagtaataggtaattagacactgattgtgtggtagaaatactgcaggggaaaaggtcgccctcttatgcatcaaagagcaatacctgttgtttagcaaagagtgatgaaaaattgatcttgttttgaaattgaagagagaggccaggcgcggtggctcacacctgtaatcccagcactttgggaggctgaggcaggtggatcacctgaggtcgggagttcgagaccagcctgaccaacatggagaaaccccaattgtactaaaaatacaaaattagccgggcgtggtggcaggtgcctgtaatcccagctacttgggaggctgaggcaggagagtgcttgaacccaggaggcggaggttgtggtgagccaagatcatgccactgcactccagcctgggcaacaagaacaaaactccatctaaagaagaaaaagaaaaactgaagagagagtagttgtcagagtgaagagtttaatcaacagaagtagagtaacatattctttagtagaactcacattatctgcttgaagcacattttgctaatgttttattcagaatgtatcatagatataatgttttaactaataaaatagaatggtttttctcta

SEQ ID NO: 5791 - DNA, 6255 bp, Homo Sapiens
  NM_033290
cccagccattcagctgatccgaggcaaagagccggcacttgccccagcccagcctgcttgaaggacctacaggtttgtctcttccagatcagaactgaggaacaaaaacccccatcctgggaaaaatggggaagctgatagctgatcagcttccttgggttttgctgatgacacaagagagctttgcctgaagatggaaacactggagtcagaactgacctgccctatttgtctggagctctttgaggaccctcttctactgccctgcgcacacagcctctgcttcaactgcgcccaccgcatcctagtatcacactgtgccaccaacgagtctgtggagtccatcaccgccttccagtgccccacctgccggcatgtcatcaccctcagccagcgaggtctagacgggctcaagcgcaacgtcaccctacagaacatcatcgacaggttccagaaagcatcagtgagcgggcccaactctcccagcgagacccgtcgggagcgggcctttgacgccaacaccatgacctccgccgagaaggtcctctgccagttttgtgaccaggatcctgcccaggacgctgtgaagacctgtgtcacttgtgaagtatcctactgtgacgagtgcctgaaagccactcacccgaataagaagccctttacaggccatcgtctgattgagccaattccggactctcacatccgggggctgatgtgcttggagcatgaggatgagaaggtgaatatgtactgtgtgaccgatgaccagttaatctgtgccttgtgtaaactggttgggcggcaccgcgatcatcaggtggcagctttgagtgagcgctatgacaaattgaagcaaaacttagagagtaacctcaccaaccttattaagaggaacacagaactggagacccttttggctaaactcatccaaacctgtcaacatgttgaagtcaatgcatcacgtcaagaagccaaattgacagaggagtgtgatcttctcattgagatcattcagcaaagacgacagattattggaaccaagatcaaagaagggaaggtgatgaggcttcgcaaactggctcagcagattgcaaactgcaaacagtgcattgagcggtcagcatcactcatctcccaagcggaacactctctgaaggagaatgatcatgcgcgtttcctacagactgctaagaatatcaccgagagagtctccatggcaactgcatcctcccaggttctaattcctgaaatcaacctcaatgacacatttgacacctttgccttagatttttcccgagagaagaaactgctagaatgtctggattaccttacagctcccaaccctcccacaattagagaagagctctgcacagcttcatatgacaccatcactgtgcattggacctccgatgatgagttcagcgtggtctcctacgagctccagtacaccatattcaccggacaagccaacgtcgttagtctgtgtaattcggctgatagctggatgatagtacccaacatcaagcagaaccactacacggtgcacggtctgcagagcggcaccaagtacatcttcatggtcaaggccatcaaccaggcgggcagccgcagcagtgagcctgggaagttgaagacaaacagccaaccatttaaactggatcccaaatctgctcatcgaaaactgaaggtgtcccatgataacttgacagtagaacgtgatgagtcatcatccaagaagagtcacacacctgaacgcttcaccagccaggggagctatggagtagctggaaatgtgtttattgatagtggccggcattattgggaagtggtcataagtggaagcacatggtatgccattggtcttgcttacaaatcagccccgaagcatgaatggattgggaagaactctgcttcctgggcgctctgccgctgcaacaataactgggtggtgagacacaatagcaaggaaatccccattgagcctgccccccacctccggcgcgtgggcatcctgctggactatgataacggctctatcgccttttatgatgctttgaactccatccacctctacaccttcgacgtcgcatttgcgcagcctgtttgccccaccttcaccgtgtggaacaagtgtctgacgattatcactgggctccctatcccagaccatttggactgcacagagcagctgccgtgagcgtctggccacatggagctgctttctggggaacagtaaggttcaggccactatttaggggactgagaaagcacaggcttcatgagtgtaatgaaatctcaccagaagtgtcccgaaatcggctcagatagggctcaaaacaagagattcctctccttttactgtgtcttgtattaagtacgggctttaataatttctttaatttttttgtatttagaggaaaatctatagattatttataagagaaacataatcaggattacaacttttaggaattacttggttttgcacattaagaggcccataagtttatcagctatttacaaccttcatttcatcacaatctgtgggcttacaaaaaaacaaaaacttttgtagttttgtatgttactcatcttcttacctgatatcccatgatgatcccatggtaggtcttctcacctcgatggtgcataacaggatgtgtttgaacctagtaggggaggaaacaggctttcttactctggtttaatttgaagtgttttaattgtgatgtcaaaaagttgtatcagatcaactaaaatggagagcaagacagagaatgaaaagagttgattttggacctcggaccttgccgtggctaaatctttaccttctcatagctgatgggataatgttggaaagaaaggttctgaatcctttggccacattttgccctgcttctctcagggttaagggttctggaagaacattaagaatgagattgcaattgaaaatagtcattttgaatcctattgattattcaaaaattcaggctgatttgtcttttatcagaggtaggattctgttttatagtatagaatctactttatccttccttttaatagttcctttagacctgtgaaatttcttcactacatttaatagttctcctatttcccgctcccccatatcaattttccttttgtctccggggctgagtaaataaacatgttctgtcacaaatagcagcaccactttggattgattttgctctccaggacatcagcacatggccctgatcagcactaccacatccaaacataagtcactgaaaaacacttaatatttatgagttggtaatgacaagggacattgtataaagtactatttgctagattcatgcctcaaaagttattataaacagacctttattaaacacatcttgaaagatgtagaagtccctctatagtctagtatagtttacaatagagttgtaagaccaaaaaaaaaaaaaaaaaattcaaactcgttattcaggaacctgcttataaaatgtcagctgggattctttgcatgccaatctgatgcgttggaatggtccatgaattaaggctttcttgagcagttcttggcccagaactctggcattggttctagtttgatgaagggcatgacctctataaatggtttcaattgctaaaatatttacctgggatactgggtcagccattttgactgagcagactagtggatttagacattgtttttagttattttgtttttaaccaaatcaaccaactgcctccctgaaataagtcaatgaactcattgtttcagcatcacgtggccaaaggtcatgtgattgcaaatctggatttcaagggaggccaagccagcttcctgggtccttccatcctcttccctagcagacactctcctttttcttaacagatagattctatatatttactatattatttatacccagatgaatattttgatagatacctaagacaatttcacatctaaaagatggacgcctcaatggaaaaaaaacaatctttctctggaaaccttataggtttttctttttattacaatataaaagcaatgtgtgtttgccttctctgagtaaactgaaagggttgtctcagtaatttttacatacattttgggtaactggataatggatattttaatgcactttgtacactaacaggttctaaataaaagggtctaaaactcagcttctgagtttttaaaatcacggtctccaggtaccaataaatgctacagtttgccttatgatgttaacataaaacacttagtagaaggacaatatttccatgaaaataatgtttttcaatattaagaagttactactcaaattttcacagtaagccatttagggtatgtttggctatttttataaggacatgagagattatgtcataattttgttgtggaagtctcactcttggctaacttaaaagcattgtggatagtagcagttactagttccaggttgtcatatttacaggaaaatatgtatatggtgaaaggccaccgtgtttaattactataatgatgtagaaaagattcccgtgtgaattttttttttgaaagtctaaaaaatgtatgctgtaaaaatttgctgcagtgtaattttgcattctctttaaactgattgaggtcacagtattttattatttggggtcctcaccacaggaaacactgcgatacaggggcaaaagagatggcagtgccaattaaattaatacaacaaaatcaatgcagcaccaaccaagactgccaggtctggtgtcatgggtatgcccagagcccaggagttcagaagggccctaagcctgatttaatgctctgctgttgatgtcttgaaattcttaacaatttttgaacaaggggcctgcgttttcacttcgcactgggccttgcaaattacatagcgagtgctcataaaagaactcagaaacgtggtacctctcttcctggtggatacaaataaagaaatctggatccaaagttgaaagttgctggcgatatcattcaagtaggactctaaatagtggattaagatgagggtgggcctgggtgaagattctttccagctttaaaagaaagtgacttcaaaaactgactgcaaatattgacgatggtttctgctggaggaaaagaaacagcttgaatacagacaggcttttttattacggtactgatatattgaccttaaacttgctgaggaactgaactaacgtcctccagtgaccgtggaattccatctcagctccaggaacatgcagatacctgcaaagagacacgcatatatgctggcatacatgtgcatttggtgttgggaagttgaccatctggtctatcttaataaaatggtaaaaagcacaccaagacaatgatgggggcaggaggatgtttttgaaaacagcgcttctcaaccagtgctcgattttgccccccaggagacatttggcaatgcaatggcaacttttggttgtcgcagccggggaagggaagctaccagcatctagtgcgtagaggtcatggacgccgttaaacatcctacagtgcaagcgcagcccccgaccacgaagagttgtcttgctcaaatatcaacagtgctgcagtgtagaaacttgatcgttggttttcttttaatgcaaaactctcataaaaacctttcacttttcctgtcattgattatatgcttgatacacccaaaaagaaaaggggaggggcaccaattcacctacactccagtggctccatcacctttaaaaatatttataaaatagttccaaaaatctgatatctgaaaagcaatccaagcctgtgtaaatgggaatcactgataagtatcatcatctgtatcagcttggcttggacatgaaaaattgattctctttatgtcactccttgcacctggacaaattcaatccccggtacttaagtcacactgccaagccctcggccctgactattgtcttgattgctgttcctttctggttcaaaataaaatcatttttgtggcaccaagaccctctgtctctgcctgtctctgttgccttttcatcattttgtgtttttgcagttatgatgttgacaaatatttattcaacatctaccatttattcatactactttatgacatataattcattttcttttactgtctctcatccactatttgcctttccctattcaaaatacaattcttttgcaacactcaaaatattctccagggaatttttaaaacacaataaaagaaagcctatatagaagtg

SEQ ID NO: 5792 - DNA, 941 bp, Homo Sapiens
  NM_033294
gggaggagagaaaagccatggccgacaaggtcctgaaggagaagagaaagctgtttatccgttccatgggtgaagctcctcaggcagtgcaggacaacccagctatgcccacatcctcaggctcagaagggaatgtcaagctttgctccctagaagaagctcaaaggatatggaaacaaaagtcggcagagatttatccaataatggacaagtcaagccgcacacgtcttgctctcattatctgcaatgaagaatttgacagtattcctagaagaactggagctgaggttgacatcacaggcatgacaatgctgctacaaaatctggggtacagcgtagatgtgaaaaaaaatctcactgcttcggacatgactacagagctggaggcatttgcacaccgcccagagcacaagacctctgacagcacgttcctggtgttcatgtctcatggtattcgggaaggcatttgtgggaagaaacactctgagcaagtcccagatatactacaactcaatgcaatctttaacatgttgaataccaagaactgcccaagtttgaaggacaaaccgaaggtgatcatcatccaggcctgccgtggtgataatgtttcttggagacatcccacaatgggctctgtttttattggaagactcattgaacatatgcaagaatatgcctgttcctgtgatgtggaggaaattttccgcaaggttcgattttcatttgagcagccagatggtagagcgcagatgcccaccactgaaagagtgactttgacaagatgtttctacctcttcccaggacattaaaataaggaaactgtatgaatgtctgtgggcaggaagtgaagagatccttctgtaaaggtttttggaattatgtctgctgaataataaacttttttgaaataataaatctggtagaaaaatgaaaaaaaaaaa

SEQ ID NO: 5793 - DNA, 11262 bp, Homo Sapiens
  NM_033305
ttcctccctctcagggctgcgcgcccaggtctgcgccgcgctccgcctccagccgcgcgcagacttgcgcacgcgtcgtgagagcgaccgcctccgtctctcgctgggctcgctagggctgcgcgttgggccagcgggggcgccgcagctgaagccgccccggagccggtgaaccgaattacctcgagggaggggcgtggggaaggcggcgggaggaggagcgcacgggccggctgccgtgcccaccacggctgaggaacatggttttcgagtcggtggtcgtggacgtgttgaaccggttcttgggggactatgtggtggacttggacacgtcccagctctctctgggcatctggaaaggagctgtggccctcaagaatcttcaaattaaagaaaatgccctgagtcaactggatgtaccatttaaagttaaagttggtcacataggtaatcttaaacttataattccatggaaaaacctttatactcaacctgttgaagccgtattggaagaaatttatttacttatagtgccttcttctagaataaaatatgatcctttaaaagaagagaaacaactcatggaagcaaagcaacaggaactgaaaagaatagaagaagcaaaacaaaaagtagttgatcaagaacaacatctgccggaaaaacaggacacttttgcagaaaaattagttacacagatcataaaaaatcttcaggtgaaaatttccagtatccatattcgttatgaagatgatatcacaaatcgggacaaaccgctgtcatttggtatttcccttcaaaatctgagcatgcagacaactgatcaatactgggttccatgtttacatgatgaaactgagaaactggttcgtaagttaatccgattggataacctgtttgcctattggaatgtgaagtctcagatgttttatcttagtgattatgataactccttggacgacttgaagaatggcattgtcaatgaaaatattgttccagaaggttatgattttgtatttcgtcccatatctgctaatgccaaacttgtgatgaatcgccgatctgattttgacttttctgcccccaaaataaacttggaaattgagttacataacatagcaattgaatttaataaaccacagtatttcagtattatggagcttcttgaatcagttgatatgatggcacaaaatctgccatataggaagttcaaacctgatgtgcctcttcaccaccatgccagagaatggtgggcttatgctatacatggcgttcttgaagtaaatgtttgccccaggttatggatgtggtcatggaagcatattagaaaacataggcaaaaagtgaagcaatataaagaactgtataaaaaaaagttaacaagtaagaagccacctggtgaacttctcgtgtctttggaggagttggaaaaaaccttggatgtctttaatataactatagctagacagacggcagaagttgaggtaaagaaagctggatacaaaatttacaaagaaggagtaaaagatccagaggataataaagggtggtttagctggctatggtcttggtcagaacaaaatactaatgaacagcaaccagatgttcaacctgaaactcttgaagaaatgttgacacctgaagaaaaagctttactctatgaagcaattggctatagtgaaacagcagttgatccaactttactaaaaacatttgaagccttgaagttttttgtccacttgaaaagtatgtctattgttctaagagaaaatcatcaaaaacctgagctggtagatattgtaatagaagaatttagcaccttaattgtgcaaagaccaggagcacaagcaataaaatttgaaactaaaatagattcatttcatattactggcttaccagataattcagaaaaaccccgcctcctgtcttcattggatgatgcaatgtcacttttccaaattacatttgagataaatccattagatgaaactgtttctcagaggtgtatcatagaagctgaacctttagaaatcatatatgatgcaaggacagtgaatagtatagtggaattcttcagacctccaaaagaggtacatctagcacagctcactgcagcaactttgacaaaactggaagaatttcgcagtaagacagcaacaggtctactgtatattattgaaacacagaaagttcttgatctcaaaattaatttgaaggcttcatatattattgtcccacaagatggaatttttagtcctacatcaaatctgcttcttttggaccttggtcatctaaaggtgacgagtaaaagtcgttctgaattaccagatgtgaaacaaggtgaggccaatcttaaagagataatggatagagcttatgattcatttgatattcaacttacaagtgtacagctgctttacagtagagttggtgataattggagagaagcacgaaaactcagtgtatctacccagcatattttggtacccatgcacttcaatttggaactgtctaaggccatggttttcatggatgtaaggatgcccaaattcaagatttatggaaagttacctcttatttctttacgaatctcagataaaaaactacaagggattatggaattgattgaaagcattccaaaacctgaaccagtaactgaagtatctgcccctgtcaaatcattccagattcaaacatctacttctttgggaacatcacagatttcacagaaaataattcctctcttggaacttccatctgtttctgaagatgattcagaggaggaattttttgatgcaccatgtagtcccttggaagaacctcttcagtttccaactggagttaaaagtattcgaaccagaaagttacaaaagcaggattgttcagtaaatatgactacatttaaaataagatttgaagtaccaaaggttttgatcgagttttatcaccttgttggagattgtgaactatctgtggtagaaattcttgttttaggattgggtgcagaaattgagattagaacatacgatttgaaagcaaatgcctttttgaaagagttctgcttaaaatgcccagaatacttggatgaaaacaagaaaccagtttatttggttacaaccctggataacacaatggaagacctgttaacgctggaatatgtaaaggctgaaaagaatgtacccgacttgaaaagtacctataacaatgttttacaattgattaaggtaaatttttcctctttggatattcatttacacactgaagcacttctgaatacaataaattatcttcataatatccttccgcaatcagaggaaaaatcagccccagtgtccactacagagactgaagacaaaggagatgtcattaaaaaattagctttaaaactatccacaaatgaagatatcattactttgcagattttagcagaattatcgtgtttacagatctttattcaagatcagaaatgtaacatttctgaaattaagattgaagggcttgattctgagatgattatgaggccttcagaaactgaaataaacgcaaagctaaggaatataattgttttagattctgatataacagctatatacaaaaaggctgtttatatcactggaaaagaagttttcagcttcaaaatggtttcttacatggatgcaactgctggttctgcatacacagatatgaatgtggttgacattcaggttaatttaatagttggttgcattgaagtagtttttgtcacgaaatttctatattctatattggcttttatagataattttcaggcagctaaacaagccttggctgaggcaactgttcaggcagctggaatggctgctactggtgtaaaagaactcgcacaaaggagttccagaatggcactggatattaacatcaaagccccagttgtggtcatcccgcagtctccagtttctgaaaatgtttttgttgctgattttggactaattacaatgacaaatacctttcatatgataacagagagccagagctctcccccacctgttattgatttgataacaataaagctgagtgaaatgcgactatacagatctcgatttattaatgatgcataccaggaagtactggatctactcctgccattaaatcttgaggttgtggttgaacgaaatttatgctgggagtggtaccaggaagttccttgttttaatgtaaatgctcagctgaaaccaatggagttcattcttagtcaagaagatataacaactatttttaaaacattgcatggcaatatatggtatgaaaaagatggtagtgcctcacctgctgtaacaaaagaccaatacagtgccactagtggagttactactaatgcttcacaccattcaggaggagcaactgtggtgacagctgctgtggtagaagtacattcacgtgccttactagttaagacaacactaaacataagcttcaaaactgatgatctcaccatggtgctgtatagtccaggtcctaaacaggcttcctttacagatgttcgtgatccttctctgaaacttgctgaatttaaattggagaatattataagtactttaaaaatgtatacagatggctcaacattttcttccttctcattaaaaaactgtattttagatgataaaagacctcatgtcaagaaagcaactcctcgaatgataggactgacagttggttttgacaaaaaagacatgatggatataaagtacaggaaagtcagagatggttgtgtgactgatgcggtctttcaagaaatgtatatttgtgcaagcgtagaatttctgcagactgttgcaaatgtctttcttgaggcctacaccacaggcactgctgtagaaaccagtgtgcaaacatggactgctaaggaagaagtacctacacaggaatcagtgaagtgggaaattaatgttattattaaaaatcctgaaattgtgtttgtagctgacatgacaaaaaatgatgctcctgctttagtcattacaacacaatgtgaaatttgctataaaggtaaccttgaaaatagtacaatgactgctgccattaaagatctccaagtgagagcctgcccgtttcttccagtcaagagaaaaggcaaaatcactactgttttgcagccctgtgacttgttttatcaaactactcagaaaggtacagatccacaagtgatcgatatgtcagtaaaatccctgacactaaaggtttcaccagttattataaatactatgattaccataacttcagcactgtatacaactaaggaaaccatcccagaagaaacggcttcttctactgcacatttatgggaaaagaaggatacaaagactttaaaaatgtggtttcttgaagaatcaaatgaaactgaaaaaatagctcccacaactgaattggtacccaaaggcgagatgataaaaatgaacattgattctatttttatagttcttgaggctggaattggtcatagaacagtacctatgcttctggcaaagtcacgtttttcaggggaaggcaaaaactggagttccctaataaatctgcactgtcagcttgagctagaagtgcattattataatgaaatgtttggtgtatgggagcctttgcttgaacccttagaaattgatcagactgaggattttagaccatggaatcttggtatcaagatgaaaaagaaagcaaaaatggccattgttgagtcagatcctgaagaagaaaactacaaagtgccagaatataaaactgtcatcagtttccattcaaaagaccaattaaacattacattatccaaatgtggtcttgtaatgttaaacaatttagtcaaggcatttacagaagctgccactggatcttcagctgacttcgtaaaggatctagcaccatttatgattttaaattcccttggacttactatttctgtttcgccaagtgattcttttagtgtactcaacattcctatggcaaaatcatatgtattgaaaaatggagaaagtttaagtatggattatatccgaaccaaggacaatgatcatttcaatgcaatgaccagcctaagcagcaaactcttcttcattcttcttacacctgttaaccattctactgctgataagattcctttaacaaaagtgggacgacgtctgtacactgtaagacacagagagtctggcgttgaaagatctattgtttgtcaaattgatacagtagaaggaagtaagaaggtcacaattcgctccccagtgcagataagaaatcatttttcagtcccactgtctgtttacgaaggggataccttattgggaactgcctcacctgaaaatgaattcaacataccattaggatcttaccgatcattcatttttctgaagccagaagatgagaactatcaaatgtgtgaaggaattgactttgaagagattataaaaaatgatggtgctcttctaaagaagaaatgtagatctaaaaacccttctaaggaatcatttctcattaatattgttccagaaaaagataatttaacatctctatcagtgtattcagaagatggttgggatttaccatacataatgcatttgtggccacctatcctgctccgaaatcttcttccttacaaaattgcttattatatagagggaattgaaaattcggtttttactctaagtgaaggacattcagcccagatttgtactgcacagttgggtaaagccaggctacatttaaaattacttgactatctcaatcacgattggaaaagtgaatatcacataaagcctaatcagcaagacattagttttgtcagttttacttgtgttacagaaatggaaaagactgatttagatattgctgtccatatgacttacaatactggtcagacagttgtggcatttcatagtccttattggatggtcaataaaactggccgcatgttacagtacaaagcagacggaattcatcgaaagcatccacctaattataaaaagccagttctcttttcttttcagccaaatcacttttttaataacaataaggttcaacttatggtaactgatagtgagttgtccaatcagttttcaattgatactgttggtagtcatggagctgttaaatgtaaaggcctgaaaatggactatcaagttggtgtcactatagacctgagcagttttaacattactagaattgtgacatttacccctttttatatgattaaaaacaaaagcaaataccatatatcagtggctgaagaaggaaatgataaatggctctctcttgatttggagcagtgtatccccttttggcctgagtatgcttctagtaaacttcttattcaagtcgaaaggagtgaagatcctcccaaaaggatatattttaacaagcaggaaaattgtattctattgcgtctagataacgagcttggaggtattatagcagaagtgaatttggccgagcattctacagttattacatttttagattatcatgatggagcagctacattcctcttaataaatcacacaaagaatgaacttgttcaatacaatcaaagttctctcagtgaaatagaagattccctccctcctggtaaagccgtgttttatacatgggctgatccggtgggctctagaaggctgaagtggagatgtagaaaaagccatggtgaagtaacacagaaggatgatatgatgatgcctatagatttgggggaaaagacaatatatttagtttcattctttgaaggtttacaacgcattattttattcactgaagatccaagggtatttaaagtaacatatgaaagtgagaaagcagagttagcagagcaagaaattgcagtggcattacaagatgttggaatttctcttgtcaacaattacacgaagcaagaagtagcctatataggcattacaagttctgatgtggtttgggaaacaaagcccaagaagaaggcaagatggaagccaatgagtgtaaagcacactgagaagttagagagagaatttaaggaatatactgaatcttctccttcagaagataaggttattcagttggacactaatgttccggttcgcctaacccctactggtcataacatgaaaattctgcagccgcatgtaatagctctacgaagaaattatcttccagcattaaaagtggaatataacacatctgcacatcaatcatcatttagaattcagatttacagaatacagatccaaaatcagatacatggtgctgtatttccctttgtgttttatcctgttaaacctccaaagtcggtcaccatggattcagcaccaaagccctttacagatgtcagtattgtcatgagatctgcaggacattcccagatatcacgtattaagtatttcaaagtattgattcaagaaatggatctcaggttagatcttgggtttatctatgctttaacagaccttatgacagaagctgaggtgactgaaaatacagaggttgagctttttcataaagatatagaagctttcaaagaagaatataaaacagcctcattagtagatcaatcacaagtcagcctctatgaatattttcatatatctcctatcaagttacatttaagtgtttcactgagttccggcagagaagaagctaaagattcaaaacaaaatggaggactgattccagttcattctttaaatcttttgctgaagagtattggtgccacactgacagatgtacaagatgtagtttttaagcttgcattttttgaactcaactatcagttccatacaacatccgatctacagtctgaagtcataagacactattcaaaacaggccattaagcagatgtatgtactcattcttggacttgatgttttgggaaatccatttggcttaattagagaattttctgaaggtgtagaagcatttttttatgaaccttaccagggagccatccagggtcctgaagagtttgtggaaggaatggcactaggacttaaggcactagttggtggagctgttggtggattggctggtgctgcctccaaaatcaccggtgctatggctaagggggtagcagctatgaccatggatgaagactaccaacagaagagaagagaagccatgaataagcaaccagctggttttagagaaggcatcactcgtggaggaaaaggcttagtttctggatttgttagtggcataacaggaattgttacaaaaccaatcaaaggagctcaaaaaggaggagcagctggtttctttaaaggtgttgggaaaggtttagtaggagcggtagcaaggccaactggaggcatcatagacatggctagcagtacatttcagggaataaaaagagctacagagacttctgaagtggagagtctgcgacctcctcggttcttcaatgaagatggagttatcagaccgtacaggttgagggatgggactggaaatcaaatgttacaggtcatggaaaatggaagatttgcaaaatacaaatattttacccatgtcatgatcaataagacagatatgctaatgataaccagacgtggtgtattgtttgtaacaaagggaacatttggacaactcacgtgtgagtggcagtatagttttgatgaatttaccaaagagccattcattgttcatgggagaagattgcgcattgaagcaaaggaacgagtgaagtctgtatttcatgccagagagtttggaaaaataattaacttcaagaccccagaggatgccaggtggatcctcacaaagctacaagaagcaagagaaccttctccgagcctctgacagagaacactgcctgaagacacacagcaataagtgattacagctcctagactaccttccaaaacctgtttgggaagcatattacagaaatgatttcaagtaccctgtattctggatgctaaaaaacaaaaacaaacaaaaaaacaaaaacaaaaaaacaaaaccagaatcaggtaaaacagctatgtgattaaaatattttaattcttcagcaattacccggttttctaaattgaatcatgcatctatttataattctaattattttgtaaaagaagacaaaattatgaatcttaagtatttgctccatctttttctctgtaatggtggagaggctgcccataattcatctccacatggagccaagtttaatgtttctagttcacattttgtacttctgtcatgcttatttcaaactccctgagtgatgggtaagaaatcaaacattgcctcagtggtatcaagagaactttggtggtggtttcttcagaatcatgaagttcttttgccagataaatattttgatattattttcctttttaatataaaggataggtttgaattgtacttaaaatgcatagcattattaaaaacaatcttttaaaatataatttataacatagattgaagcctccccttaagaaaccttaaagaaataagtatcctactcaaaaaaggaagtctgtttcagaactttagggcctttgaaatatttcctcaagcctatttcatgagatctacttggtttacccaagtcatgtttttaatagactgctaatatcaaaggagaatttttaaagccttaacaatgcctactttccattcactgttaacatggaataaacacaattcccaacatcttagatagtgtattatgcttccaacagacagtccctctcatataaagtttatgtaccctaaaatctaacccaataacctgtcccgttgccaatagattgagaatttctggtttgcttactctacagttattcaaatgagagtcacgcttttaaatttacagctcatcacagaaatcatcagctatacattagtaaaaataaggacatgaggttttctttcttggtttttgtccaagatctttgcaccttaatattaatggactgtttcaggtaaaagagaatgaatgtatgattgtgaactgtgaagagaatgatgcaggatcctatttagttactgaataatacagagtattcaatgcatgttgtatgtgccaccaagttactattaactgtttttggaattgaagactctgtatagtcaatagttgtgaaattcttctcaggctccttaaaccctcgctttgttgtaaaagctaaaataaacagcatgctatattgtaattgtatttcttgctgaccaaatctactaaatgctattgatttctctctgattactaaaacacattgtttattctcagtagtttcccccaaaatgcttttttctttgctgaacttaa

SEQ ID NO: 5794 - DNA, 1816 bp, Homo Sapiens
  NM_033311
caggcttaggctctctttcggcctcccactcgccttcctttcccttctcggtgccctcctctctttcctcacccggtagtcccagacaggggctgagggccgggcagcggaggtaaggggaaggctggagataggagggggactgggtgtgtccagccagagggatgtctgtggacagtgcagctgggggctttatggatctttgggtgtgtaggggatagaggaggagggtgtgggtgtcaggccagctcagtgaccccagcatccctggttttgcccgcagtgacgacagctccccaggagccccccgcccggcccctccaggcgggcagtggagctggcccggcgcctgggcgcgccatgcgcagcaccacgctcctggccctgctggcgctggtcttgctttacttggtgtctggtgccctggtgttccgggccctggagcagccccacgagcagcaggcccagagggagctgggggaggtccgagagaagttcctgagggcccatccgtgtgtgagcgaccaggagctgggcctcctcatcaaggaggtggctgatgccctgggagggggtgcggacccagaaaccaactcgaccagcaacagcagccactcagcctgggacctgggcagcgccttctttttctcagggaccatcatcaccaccatcggctatggcaatgtggccctgcgcacagatgccgggcgcctcttctgcatcttttatgcgctggtggggattccgctgtttgggatcctactggcaggggtcggggaccggctgggctcctccctgcgccatggcatcggtcacattgaagccatcttcttgaagtggcacgtgccaccggagctagtaagagtgctgtcggcgatgcttttcctgctgatcggctgcctgctctttgtcctcacgcccacgttcgtgttctgctatatggaggactggagcaagctggaggccatctactttgtcatagtgacgcttaccaccgtgggctttggcgactatgtggccggcgcggaccccaggcaggactccccggcctatcagccgctggtgtggttctggatcctgctcggcctggcttacttcgcctcagtgctcaccaccatcgggaactggctgcgagtagtgtcccgccgcactcgggcagagatgggcggcctcacggctcaggctgccagctggactggcacagtgacagcgcgcgtgacccagcgagccgggcccgccgccccgccgccggagaaggagcagccactgctgcctccaccgccctgtccagcgcagccgctgggcaggccccgatccccttcgccccccgagaaggctcagccgccttccccgcccacggcctcggccctggattatcccagcgagaacctggccttcatcgacgagtcctcggatacgcagagcgagcgcggctgcccgctgccccgcgcgccgagaggtcgccgccgcccaaatccccccaggaagcccgtgcggccccgcggccccgggcgtccccgagacaaaggcgtgccggtgtagggatccctggccgggcctctcaagggcttcgtttctgctctccccggcatgcctggcttgtttgaccaaagagccctctttccacgagactgaagtctggggaggaggctacagttgcctctccgcctcctccctggccccggcccttccctcacttccatccatctctagacccccccaaggctttctgtgtcgctgccccgggcgggtgtatccctcacagcacctcacgactgtgcctcaaagcctgcatcaataaatgaaaacggtctgc

SEQ ID NO: 5795 - DNA, 2544 bp, Homo Sapiens
  NM_033313
agagtaactgctgaaaggaggtggcgaaggaggatccggagcagctgctgccagcccgcgggcactgaagtcctcccggctgccgctcgagtagccacgggcgcgatcgggaccagaagtctcctcctccatgatcactttggaagccgggggaagactttgccctgccctgagagctggtctgcgtttcccaggcgcggcggcggcggagcagcagctgcagcagccgagtccaaataggagcggccacagccaggggcgtgagcgccccgcgcggagcgagctcgggttcccctcggaatgtccccggggcgcccggcgcgctgaccccgaagccgcctccgccttcggcgcctgctgcctccctcggccaggcttgttgttcgggactgtgagcttcctggctcctgggcagtggggaagcccccgggggcgagtgacctcagctggccacgacccagccctcccccgtgcgtatctcgcttaagatggcagcggagtcaggggaactaatcggggcttgtgagttcatgaaagatcggttatattttgctactttaaggaatagaccaaaaagcacagtaaatacccactatttctccatcgatgaggagctggtctatgaaaatttctatgcagattttggaccgctgaacttggcaatggtgtacagatattgctgcaaactaaacaagaaactaaaatcatacagtttgtcaagaaagaaaatagtgcactacacctgttttgaccaacggaaaagagcaaatgcagcatttttgataggtgcctatgcagtaatctatttaaagaagacaccagaagaagcctacagagcactcctgtctggctcaaaccccccctatcttccattcagggatgcttcctttggaaattgcacttacaatctcaccattctcgactgtttgcagggaatcagaaagggattacaacatggattttttgactttgagacatttgatgtggatgaatatgaacattatgagcgagttgaaaatggtgacttcaactggattgttccaggaaaatttttagcatttagtggaccacatcctaaaagcaaaattgagaatggttatcctcttcacgcccctgaagcctactttccttatttcaaaaagcataatgtgactgcagttgtgaggctaaacaaaaagatttatgaggcaaagcgcttcacagacgctggcttcgagcactatgacctcttcttcatagatggcagcacacccagtgacaacatcgtgcgaaggttcctgaacatctgtgagaacaccgaaggggccatcgccgttcactgcaaagctggtcttggaagaacagggacattgatagcctgttatgtaatgaaacactacaggtttacacatgctgaaataattgcttggattagaatatgccggccaggctctattataggaccccagcagcacttcctggaagaaaaacaagcatcgttgtgggtccaaggagacattttccgatccaaactgaaaaatcgaccatccagtgaaggaagtattaataaaattctttctggcctagatgatatgtctattggtggaaatctttcaaaaacacaaaacatggaacgatttggagaggtaagttttccctaggagattctatcttcttaaaactgatgttctgcatttgtttctcagttggacctatataacatagcagtgtcttttctctggatgccacgagtaccaagtttttagaagtagagccatccgtctatatagcaagaagcagaggaaagaaaccaattgcccttaaaaaaaaaaaagctataatttaaggagtaaattataaaggaggctactctggtaaggggtaatatttatagaaaggaaacagaaaagcaaactttctatttgaaaattaaaataaatatcaagaagaaaaattttaatgtgacaattgaggaaataatacataccacaagtggtgctttgaaagcctcaaattcatgctgatttctaaagtaagtgccaacttgaaaacatgattagggcacttttttaaaaaaaaattaaggctctactgtaaacaaaccacggtaaatagttgatatatattgtctgattaatattcataactacctggtgagttaggtaatactatctctattttataggaaggaaattgcatatcagagatgttctaacctcagtgtcaaacatggttcaatccatgtctgtctgagtccaagcttgtgtttttttatatcacaccctgttacctctgaataaaaatagaagtgatttactaagaattaggattatgagcatttttggaactagaaacaacgttgaaacaccatttgtttggttccactattgtagagacaagaaactggggtcccagaaaatttgtgatttgtgtaaagttccagggttgtttagtagtggggccactttgacaactgggcattcaattcctagtttaggtctttctaccacgttatacctgaggtgaagctaagtatctggtttatacttttatatctctaaagga

SEQ ID NO: 5796 - DNA, 1581 bp, Homo Sapiens
  NM_033318
gctttcttcccgagggcggcacgagggctgggcggtggggtgcgggtgcccgggtgaggggcggagctgggggcatggcgtccggagcggctcgctggctagtattggcacccgtcaggtccggggctctccggagcgggcctagcttgaggaaagatggcgatgtctccgccgcatggagcggctcaggccggagcctggtaccgtcggggtcagtcatcgttacccgcagcggcgccattttgcccaaaccggtgaaaatgtccttcggccttctgcgtgtgttctccattgtgatcccctttctctatgtcgggacactcattagcaagaactttgctgctctacttgaggaacatgacatttttgttccagaggatgatgatgatgatgactaacaggaattacagaaaggagaaagcactaactgaagaaatggtgatgctctcagtttctctgccttccctatcagcagaaaggctcggggaaggccctcagcctcccagtctggtgaagcttcctgtatggtccatgaccgtattccaccccaggctctgggaggctccctgagatgtgctgtccactaagcactgcacaaacaagcaatcaaattatgaataaacataataaatatcagccgtgcgtgactgagtgatggctgcagtttctcagtatccctaggttctagttggtgcagttgtctctgctgtcctttatttatgggagaaacataggcccaggctatccaggctgcagtggagcctggtgaactattctgggggccctgggaactattttcattgtttacaaaagcccaacagaaactgtgcattttcccttaagaaagcttcatgggctaactaaagcctcatgccattctgtgttcagtgccagtcatgacagctctgcttgttagcatactacttaaatataactagaatgattcaaaactcgggttctgtgatatgaggatatagataggttttcatctatttcctggcttataactcccaaaacccttgttttaggcttttgttataatgttgggcacttcgggcctcagaaaacagcaggctgtttctcagatcttctcctgacctcctttcacctgctgctttttctccccaaggcaggccatagaaactaaaagtataatcttcctttgcccatcttccagttggccataaaaagaatcctctgacctaccttgtctgattttaggtcatgagacccccatttcagaagggattctgccccatacctgagaggaagaaatgtagacaggccttgttggacttccccactccatctgtattagattatgcctcttttgtccaatcccatttctccagtgttgtccatgcttcaatcatccctatccaatgaggtctccataaaaggcccaagaagacaggtttagagagctttcggagaacagaacacttggctttgcaaagtggcacgcctggagagaacttggaagctccacgccccttctatacctcaccctatgcatctcttcagctgtatcttttgtgatatcctttataataaaccagtaaacggaaaaaaaaaaaaaaa

SEQ ID NO: 5797 - DNA, 2555 bp, Homo Sapiens
  NM_033319
aggaattcaacgaatcagtggtgaggtgccgccgccatgcctactacgggcggaaatttgagagaaagcttcgcaccggtaggaaaactgaggagcaaccgagcacgattggaaaggttgacgatagtggttaagtggctcggccttgccctcagttaaaatggcaattttagttgcttcactgatacggaatcggcgaggcgccaaggaggcttcctgcgtggggccgcagagcgagtcgggaaacgattttaaactgaagaggcggcggagggccgaattcccttttctcaacggcttgatttcagagctgggctggtctctgacaggctcagctggagagggacgggttgggacgcactgtccttttgcccttccccctccgcgagcagaagctgactccgcaggagcgagggtcgcagagctgggtgagcggaaatgtccctcccagagtgaagtcgcagggcccgccccgcgtctgagggagcggaggtcttcctgggggatttcagtctccacatagttttggagccggacttttgaagaatgattcgtgaatccggaatgggtgacagcgtcatcacggcattttattgacagaccatggattcttacagtgcaccagagtcaactcctagtgcatcctcaagacctgaagattactttataggtgccactcctctgcagaaacgattagaatcggtcaggaagcagagttcatttatcctgactccacctcgaaggaaaattccccagtgttcgcagttgcaggaagatgttgaccctcaaaaggttgcattccttctgcataaacagtggactttatatagtttaactcccttatataaattctcctatagtaatctcaaagagtattctagacttctcaatgcttttattgttgctgaaaagcaaaaaggacttgctgtggaagtgggagaagacttcaacatcaaagtgattttttctactctcctaggaatgaaaggaacacaaagggacccggaagcatttcttgtccagattgtgtcaaaatctcaattgccatctgagaatagagaaggtaaagtgctgtggactggctggttctgctgtgtatttggagacagtcttctggagactgtttcagaagatttcacctgtctgcccttattccttgcaaatggagcagagtctaacacagcaataattggaacttggtttcagaaaacctttgactgttatttcagtcctttagcaatcaatgcatttaatctttcctggatggctgccatgtggactgcatgcaaaatggaccattatgtggctactactgaatttctttggtctgtaccctgtagccctcaaagtctggacatttctttcgcaatacatccagaggatgcaaaagctctatgggacagtgtccacaaaacacctggggaggttacccaggaagaagttgacctattcatggattgcctttattcacatttccatagacatttcaaaattcatttatcagccacaagattagttcgtgtttcaacatctgtagcttcagcacatactgatggaaaaataaagattctgtgtcataaataccttattggagtgttagcatatttgacagaactggcaatttttcaaattgagtgaagccttatgtggactataagttatagattatatactcttattgataacttgcctaattgctatgctgaaagagactgcaggagaaataggcatctatctctgcatctgttttccccaccatgcctttggagttgccaagatggaagccaagaaggatctagaagaacaaagaatatggtagtagatgagccacagccaggtgcccatgtactaatcatgataacctgacatgccattctcaaaatgctgagttgttaatttcttgtcatctttaaatatatatatataggctgggcttggtggctcacacctgtaattccagcactttgggaggctgaggtgggtggatcatttgaggccaggaattcaagaccagcctggccaacatggtgaaaccccttctctactgaaaatacaataattagctgggcgtggtggcacatgcctatgatcccagctactggggaggctgaggcaggagaatcgttttaacccagaagacaggctgcagtgagccaagactgcaccactgcactccagcctgggcaacaaagtgagactctgcctcaaaaaataaaaaagaaataaaataaataaatacagcgtttattatgtttaaactcttaggattcaaatgagatgtatctaatggatatttctgatttgggtctttaaaacctttaatctcttttaagcattttagacttgcattcagaaagaattctgtcttctaaagacattttcctagcatttcactgcggagaactggcaatcaaaatcccctcaaaagggaactaaagattaatatacacatttttttagtcattaatatgcttctgttttaaatacagttcaactcctgttgcaatgttgaattaaatgtttattttaaaatgaaaaaaaaaaaaaaaaaaaaa

SEQ ID NO: 5798 - DNA, 5436 bp, Homo Sapiens
  NM_033360
ggccgcggcggcggaggcagcagcggcggcggcagtggcggcggcgaaggtggcggcggctcggccagtactcccggcccccgccatttcggactgggagcgagcgcggcgcaggcactgaaggcggcggcggggccagaggctcagcggctcccaggtgcgggagagaggcctgctgaaaatgactgaatataaacttgtggtagttggagctggtggcgtaggcaagagtgccttgacgatacagctaattcagaatcattttgtggacgaatatgatccaacaatagaggattcctacaggaagcaagtagtaattgatggagaaacctgtctcttggatattctcgacacagcaggtcaagaggagtacagtgcaatgagggaccagtacatgaggactggggagggctttctttgtgtatttgccataaataatactaaatcatttgaagatattcaccattatagagaacaaattaaaagagttaaggactctgaagatgtacctatggtcctagtaggaaataaatgtgatttgccttctagaacagtagacacaaaacaggctcaggacttagcaagaagttatggaattccttttattgaaacatcagcaaagacaagacagagagtggaggatgctttttatacattggtgagggagatccgacaatacagattgaaaaaaatcagcaaagaagaaaagactcctggctgtgtgaaaattaaaaaatgcattataatgtaatctgggtgttgatgatgccttctatacattagttcgagaaattcgaaaacataaagaaaagatgagcaaagatggtaaaaagaagaaaaagaagtcaaagacaaagtgtgtaattatgtaaatacaatttgtacttttttcttaaggcatactagtacaagtggtaatttttgtacattacactaaattattagcatttgttttagcattacctaatttttttcctgctccatgcagactgttagcttttaccttaaatgcttattttaaaatgacagtggaagtttttttttcctctaagtgccagtattcccagagttttggtttttgaactagcaatgcctgtgaaaaagaaactgaatacctaagatttctgtcttggggtttttggtgcatgcagttgattacttcttatttttcttaccaattgtgaatgttggtgtgaaacaaattaatgaagcttttgaatcatccctattctgtgttttatctagtcacataaatggattaattactaatttcagttgagaccttctaattggtttttactgaaacattgagggaacacaaatttatgggcttcctgatgatgattcttctaggcatcatgtcctatagtttgtcatccctgatgaatgtaaagttacactgttcacaaaggttttgtctcctttccactgctattagtcatggtcactctccccaaaatattatattttttctataaaaagaaaaaaatggaaaaaaattacaaggcaatggaaactattataaggccatttccttttcacattagataaattactataaagactcctaatagcttttcctgttaaggcagacccagtatgaaatggggattattatagcaaccattttggggctatatttacatgctactaaatttttataataattgaaaagattttaacaagtataaaaaattctcataggaattaaatgtagtctccctgtgtcagactgctctttcatagtataactttaaatcttttcttcaacttgagtctttgaagatagttttaattctgcttgtgacattaaaagattatttgggccagttatagcttattaggtgttgaagagaccaaggttgcaaggccaggccctgtgtgaacctttgagctttcatagagagtttcacagcatggactgtgtccccacggtcatccagtgttgtcatgcattggttagtcaaaatggggagggactagggcagtttggatagctcaacaagatacaatctcactctgtggtggtcctgctgacaaatcaagagcattgcttttgtttcttaagaaaacaaactcttttttaaaaattacttttaaatattaactcaaaagttgagattttggggtggtggtgtgccaagacattaattttttttttaaacaatgaagtgaaaaagttttacaatctctaggtttggctagttctcttaacactggttaaattaacattgcataaacacttttcaagtctgatccatatttaataatgctttaaaataaaaataaaaacaatccttttgataaatttaaaatgttacttattttaaaataaatgaagtgagatggcatggtgaggtgaaagtatcactggactaggaagaaggtgacttaggttctagataggtgtcttttaggactctgattttgaggacatcacttactatccatttcttcatgttaaaagaagtcatctcaaactcttagttttttttttttacaactatgtaatttatattccatttacataaggatacacttatttgtcaagctcagcacaatctgtaaatttttaacctatgttacaccatcttcagtgccagtcttgggcaaaattgtgcaagaggtgaagtttatatttgaatatccattctcgttttaggactcttcttccatattagtgtcatcttgcctccctaccttccacatgccccatgacttgatgcagttttaatacttgtaattcccctaaccataagatttactgctgctgtggatatctccatgaagttttcccactgagtcacatcagaaatgccctacatcttatttcctcagggctcaagagaatctgacagataccataaagggatttgacctaatcactaattttcaggtggtggctgatgctttgaacatctctttgctgcccaatccattagcgacagtaggatttttcaaacctggtatgaatagacagaaccctatccagtggaaggagaatttaataaagatagtgctgaaagaattccttaggtaatctataactaggactactcctggtaacagtaatacattccattgttttagtaaccagaaatcttcatgcaatgaaaaatactttaattcatgaagcttactttttttttttggtgtcagagtctcgctcttgtcacccaggctggaatgcagtggcgccatctcagctcactgcaacctccatctcccaggttcaagcgattctcgtgcctcggcctcctgagtagctgggattacaggcgtgtgccactacactcaactaatttttgtatttttaggagagacggggtttcaccctgttggccaggctggtctcgaactcctgacctcaagtgattcacccaccttggcctcataaacctgttttgcagaactcatttattcagcaaatatttattgagtgcctaccagatgccagtcaccgcacaaggcactgggtatatggtatccccaaacaagagacataatcccggtccttaggtagtgctagtgtggtctgtaatatcttactaaggcctttggtatacgacccagagataacacgatgcgtattttagttttgcaaagaaggggtttggtctctgtgccagctctataattgttttgctacgattccactgaaactcttcgatcaagctactttatgtaaatcacttcattgttttaaaggaataaacttgattatattgtttttttatttggcataactgtgattcttttaggacaattactgtacacattaaggtgtatgtcagatattcatattgacccaaatgtgtaatattccagttttctctgcataagtaattaaaatatacttaaaaattaatagttttatctgggtacaaataaacaggtgcctgaactagttcacagacaaggaaacttctatgtaaaaatcactatgatttctgaattgctatgtgaaactacagatctttggaacactgtttaggtagggtgttaagacttacacagtacctcgtttctacacagagaaagaaatggccatacttcaggaactgcagtgcttatgaggggatatttaggcctcttgaatttttgatgtagatgggcatttttttaaggtagtggttaattacctttatgtgaactttgaatggtttaacaaaagatttgtttttgtagagattttaaagggggagaattctagaaataaatgttacctaattattacagccttaaagacaaaaatccttgttgaagtttttttaaaaaaagctaaattacatagacttaggcattaacatgtttgtggaagaatatagcagacgtatattgtatcatttgagtgaatgttcccaagtaggcattctaggctctatttaactgagtcacactgcataggaatttagaacctaacttttataggttatcaaaactgttgtcaccattgcacaattttgtcctaatatatacatagaaactttgtggggcatgttaagttacagtttgcacaagttcatctcatttgtattccattgattttttttttcttctaaacattttttcttcaaacagtatataactttttttaggggatttttttttagacagcaaaaactatctgaagatttccatttgtcaaaaagtaatgatttcttgataattgtgtagtaatgttttttagaacccagcagttaccttaaagctgaatttatatttagtaacttctgtgttaatactggatagcatgaattctgcattgagaaactgaatagctgtcataaaatgaaactttctttctaaagaaagatactcacatgagttcttgaagaatagtcataactagattaagatctgtgttttagtttaatagtttgaagtgcctgtttgggataatgataggtaatttagatgaatttaggggaaaaaaaagttatctgcagatatgttgagggcccatctctccccccacacccccacagagctaactgggttacagtgttttatccgaaagtttccaattccactgtcttgtgttttcatgttgaaaatacttttgcatttttcctttgagtgccaatttcttactagtactatttcttaatgtaacatgtttacctggaatgtattttaactatttttgtatagtgtaaactgaaacatgcacattttgtacattgtgctttcttttgtgggacatatgcagtgtgatccagttgttttccatcatttggttgcgctgacctaggaatgttggtcatatcaaacattaaaaatgaccactcttttaattgaaattaacttttaaatgtttataggagtatgtgctgtgaagtgatctaaaatttgtaatatttttgtcatgaactgtactactcctaattattgtaatgtaataaaaatagttacagtgacaaaaaaaaaaaaaaa

SEQ ID NO: 5799 - DNA, 1116 bp, Homo Sapiens
  NM_033362
cacaagcgccgcgccatggacgcagccatcttggaccgggaacaaggcggcacttcgtcccgcccactccgcgtttagaccaattgcaaggcagcgaacctgaccgtgacgagccaatcagatcctgaggaaagttgaccgcgatagagtccttcgtcgcccaatcgtcgtctgtgtcccgcctcttcagtgacgcgaggcagaaccagccaatccctgcacggatagcgcccggaagaggctagaagctggattcagcgtgtccgcgacctcacctttaggtcctgtgagggacggcccaggtggcaggatgtcctggtctggccttctccatggcctcaacacgtccctaacttgtggcccagctctggttccccggctctgggctacctgctccatggctaccctgaaccagatgcaccgcctggggccccccaagcggccgcctcggaagctgggccccacggaaggccggccgcagctgaagggtgtggtcctgtgcacgtttacccgcaagccgaagaagcccaactcagccaatcgcaagtgctgtcgagtgcggctcagcactggccgcgaggccgtctgcttcatccctggggagggccacaccctgcaggagcaccagattgtccttgtggagggcggccgcacccaggacctgccaggcgtcaagctcaccgttgtgcgtggcaagtacgactgtggccacgtgcagaagaagtgacggctgggggcacagtgggctgggcgcccctgcagaacatgaaccttccgctcctggctgccacagggtcctccgatgctggcctttgcgcctctagaggcagccactcatggattcaagtcctggctccgcctcttccatcaggaccactattaagccataggagtcctgggggtgcaaagggtgcccctctgtcaacacccttggctcctgtgtttagaggggtggcctgaaggaccttttctgctgggacaagacactgtactgccctctgctgggaaggggttttaataaacagaccctggcgcttgtgatgtaaaaaaaaaaaaaaaaaaaaaaaaaaaaaaaaaaaaaaaaaaaaaaaaaaaaaaaaaaaaaaaaaaaaaaaa

SEQ ID NO: 5800 - DNA, 991 bp, Homo Sapiens
  NM_033363
agctggattcagcgtgtccgcgacctcacctttaggtcctgtgaggtcggtggaatcctggggtcctccaaatctaccaggccatctccccagtttcccagttcttcctgcgtgcgggcgagagtggttgggccctcgggaacccactcagagcgaggctaaatttacggagggactttctgttagcagcatgagggcctgtggttagacctatagagggacggcccaggtggcaggatgtcctggtctggccttctccatggcctcaacacgtccctaacttgtggcccagctctggttccccggctctgggctacctgctccatggctaccctgaaccagatgcaccgcctggggccccccaagcggccgcctcggaagctgggccccacggaaggccggccgcagctgaagggtgtggtcctgtgcacgtttacccgcaagccgaagaagcccaactcagccaatcgcaagtgctgtcgagtgcggctcagcactggccgcgaggccgtctgcttcatccctggggagggccacaccctgcaggagcaccagattgtccttgtggagggcggccgcacccaggacctgccaggcgtcaagctcaccgttgtgcgtggcaagtacgactgtggccacgtgcagaagaagtgacggctgggggcacagtgggctgggcgcccctgcagaacatgaaccttccgctcctggctgccacagggtcctccgatgctggcctttgcgcctctagaggcagccactcatggattcaagtcctggctccgcctcttccatcaggaccactattaagccataggagtcctgggggtgcaaagggtgcccctctgtcaacacccttggctcctgtgtttagaggggtggcctgaaggaccttttctgctgggacaagacactgtactgccctctgctgggaaggggttttaataaacagaccctggcgcttgtgatgtaaaaaaaaaaaaaaaaaaaa

SEQ ID NO: 5801 - DNA, 4449 bp, Homo Sapiens
  NM_033364
gttaccatagcgacgtgcacgcagtagccaggcctgacccgctggtcccttgctggcgggaggaaagaggcggcaccatgagccacgcagtaaccatcgaggagccccaggcccagccgcaggtgtctcaaactcggtaccgggagaggtcgcgggctgggagccacatctcctccaatcgagcgtatgattttctgtacgatccattgtttattgtgtcaagtgagaaagaccatacacaggcaaatatccaagctaccctgattcgcagcagactgagaaaagttcccaggtttaaaaccatgttcagtaacctgatccattatccaagatattctctatattggagcaagtcagatcctgtcccaccatttatcagtcgggaatggaagggacataaggagaaacacagagaagccctccggcagctcaccacaactgacgcttcttttcagatgcctaaagaagtttatgaagatcctgaagttactggaaagaatcgctataaatactttgaaaggccttttctcccattttttcagcagatgccattcaatgttgtttatgccgtatccaaggcagaaccatacacttttcctcctacttctactaagcacctatccatcccttcaaagtctactgtgggcactcagactgattatcgggatgctgacgttcaaacagatccatactctccagaatatgtagtatgtcaggactcaatccctgagctcttgaccctggctacgcttacttggggtcggggtctcccagcaggacaagctgaggtggagatgatagaaagagcccgcgagaagcgtgcttgggaagcctctctccccgctctgagtgacacctcccagtttgagaagaggaggaaaatgatgaatgaaatggagaggaaggagtgggccttcagagagcaggagattgaaaaactgcaggagattcgcctggaagttctaaaagagctgttgaggaagcgtgaagagaatcagaatgaagtgaatatgaagcacttgaatgcccggtggtctaaactgcaggagggaaaagaggcaaaaatggcaaaaattcagcgcacgcatgtatcaacaatcagaaaacttgtaggaaagagaaagaatatagaagggaagttggagagaagaaatatcatcaaggattattctgattatgcatcacaggtctatggacctctgtctcgtcttgggtgtttcccagacaacaactcagaggactttgtagtaaaaaactactatctcaacacctatgaaggattagtggaacttgagtcatgtctcccagattttgtgacacaaccccaaatcagagctccaaaacctaaagtcattaccaccaaagctggttttctgaagagggcagcaaggttggactatgagttggcagaggttcataaggcactgttggataagaagaataaagttcttgaagtaaagaaaccccctcgcttccttcaaagaaacccaatacctcaacctcggcttccaactccaaccttggaaatgacgtccaatgaagaagaagaaatggaaatggctgtgatctaccttcaaaagttactccggggcagagtcgttcagaacatgatgtttgaagggaaagaaaagcgactggagttgatccaggagttgcgcacctgccacgcactacaagaagatgaaaagctggtgaaaaaagccgagaagcaagtgaccctggccttacagcggcagaggaacttgcatgagcacaaggtgtcactggttgaaaaccatttggccggactggaaggaagggcactagcagacatgtttgacttcctgtccaaagagctggtgagactgcaggaggagaggaggatccatgcctttgtcatgctggctgagcgccagcggcgggtacgagaggctgaagagagtggtcggcgccaggtggaaaaacagcgcctgcgggaggaggacgagatatttaaggaggtggttaaagttcaccatagtactataagctcctacctagaagacataatactgaataccgaagcgaatactgcagaagaacaagccagggcagaaatagagaagatggctgagaaaatcaatgacattgcttatgaaatggaaagccgccgaacctatcttcagtcagaggagattgttgctgagttggtttatagttttctgatcccagaggtgcaaaaatactttgtcaaagaaaaagtgaggaacgcacagcggaaacatattcttgcagcccatcagatcatccacagttacacggaaagcatggttcaaaagaaattaactgagggagagcaagatgaggcctcaaatgctgccatgttacttgagaaagaaactcaaaatgagaacaacagctaagattgtgatttttttgtaaaagaagctgtacgaatcatcataaataattccaatagtctgcacttctcccaaggtgtgcactgctcataaacttgccagtgtgtgattcatgagaaaggagatttattttccttaaacatccaataatttaaaatgattttcaataataataatcaaatgaaaaagcttcattctcttcagtgtcttctagatgccctacttaaagagaacattttcttatgtctcatttcaatattttgttaactatgaggatgtgctggtttgttgaatcaaacaaaaggaaatgttgtggaatatttttccaagtagttttggttcactattcacaggacattggcattatctactaaggctgaaaatgtgcatattccatgactcaggattttatctcctagatatatattcaacagaaatgcatgagtatgtgcaccaacaggcatgacaaaaatatttatagtagtggtgttcacaatagtcccaaactggaaacccaagtgtccatctccatcggaacagaaaactatactttggtctgcttctacagtggcacatcaacccacctttgagctttagatctaagaagtgtgttcatgcaacagccatagagatggtgctattgaaaggcaatctgcccatcctgtgtattgacaagcatcaggattccaggaggattcttcctgattcaaagactgtcaaataggaaaaaagaaaacagtaaatgaacaaaaacatcaacatggagtccaagtaatgaatttatagaggaaaatgtatgctactctgaaaacaaagcttatgttagagaatatcttactgtaagaaacaaggaaaattgcagaaacatttgctgagtgtttttaataggagtcaaaaagaaagggtcttttcagaaactgaagtaggaaataataacagacaaggtcaaaaaatagatgcaggctgaaaagaaaaggaagtgggctaagatgggaaaaatataaaaagatttaaaatccagcaacaaaatttacacattcatttggatgcagtgaaaagggcagaaataccacagcagagaataaaattgataatgttggcaacacatttattaagtgatccaacatgggatgggaaggaatgggcaaagagattaaaatgacagaagttagctgtagatgacctatcccacagcaatcggagttcttgaagaagaaaccagaacaaataaaatagaaacaataatcagagtttaataattaattttctgagtttttttttaaaaaaactaattatacaaacttgaaagggttcaccttgccctagcaaaactaggattgggacacctttttttccccctgaggatcactgacaaaaaacactgcaccagtaaggaagcaactaaattttgttttgttctttgaaaaaggctaacctgagctaggtaaaggttatatcattcacttttgaaataaaccatcgagaacacaaaatgacaagtgagttaggttgggctgatgggatagaaggtgggaggggaatgctatacagctgggaacagcagactttctctgaagggccagatggtaactacattagggtttgcgggtctgatggtcgccatcataactgcatactcaactctgccgttgtagggtaagagcagcactcgatgacacagaaatgaatgcacatgactgtgttccagtaaaattttattttaattaaaatcaattcatgtttgaaaaaggatttaaagtagcttctaataaaggacatgtgtaatgaaacttaaaatatgatattttctttaaaaatctttatccttatgtagacttctaaaactatgttttgcatttagacagtcaaggaaaatacaagttgttatacaattctcattgactaattgaagtttactaggagaggaaaactttttcttgataccggcaatcttttacttataatggcttgagttaaaatgctccaacttttctaatttttgcttttgaaaataaaacacctatagtgacaataaaaacacacatttaaagccaaaaaaaaaaaaaaaaaa

SEQ ID NO: 5802 - DNA, 3957 bp, Homo Sapiens
  NM_033387
cgcctgcttcctccgaagacttcagggagagtctgcgagctgccgtccccgcgtgtgaggcacagaagggctggatgtcagaaccgcataattattcattaaactacaaactttttttaacccaaagaatatcggtgatttttgtccactgcgaggagaagaagagagagcccagggctcatgaaatgcagcagaatccttatttataaacaggccgcggtagtgatatatgcaaccccagtctactcagtgagttttctatcctatggatatcggtcttgagagttgagattggagagcagcgccgtctgtactgggtcctgcagcctctgtcctttcaatgcctggttttttctgtgactgctggccttccctggagatcagagcgctcctgtatgccatgggctgtattcagagcatcggaggcaaagccagagtcttccgggaagggatcacggtgattgatgtgaaagcctccatcgaccccgtccccactagcatcgatgagtcctccagcgtggtgctccgctaccggacaccccacttccgggcctcggcccaggtggtcatgccgcccatccccaagaaggagacttgggtagttggctggatccaggcgtgcagccacatggagttctacaaccagtacggcgagcagggcatgtccagctgggagctccccgacctccaggagggcaagatccaagccatcagcgactcggatggggtgaactacccctggtacggcaacaccacagagacctgcaccatcgtgggccccaccaagagggactccaagttcatcatcagcatgaatgacaacttttaccccagcgtcacatgggccgtgcccgtcagcgagagcaacgtggccaagctcaccaatatctaccgggaccagagcttcaccacctggctggtggccaccaacacctccaccaacgacatgatcatcctgcagacgctgcactggcgcatgcagctcagcatcgaggtgaaccccaaccggcccctgggccagcgcgcccggctgcgggagcccatcgcccaggaccagcccaaaatcctgagcaagaatgagcccatcccgcccagcgccctggtcaagcccaatgccaacgatgcccaggtcctcatgtggcggcccaagtacgggcagccgctggtggtgatcccgcccaagcaccggtgacagccaggaccacccgctaggttagactcacaaataataataccgctgaaaacaaaactcagactcactcttcagtcattcagcaagatacaaccattctaccctctccagcgggcggatctcactgtgctgatgcccccgggaaggcctccccggctctcggcacctgcttcctttcagggagaggggagatctaagcaggacagacagaccccacgtgcgccctcagggtgacctctggtctccttgcctctcctttttctcagtttcagtcgctcacttgtaacagattccctgaaacactgctttttccgttttttaaaaaaactcctcttttgggggctcaggggcaggaggagggggagctgattaggagggaagctccagcccccgatcaaagagacagatccacactgctgccgatttgtggcgctggccggccttccccccaggtccctccgccctctgtcatgcggccttatgtagacttgctttgccaaacttttgccttaagctgaattgaaaggaagaaaaccaatcggagaaagaaagcaggatctcttttctaccggacttttcctcttctgccagaggtggagggagggttggggtcgcccgcgagagtctcttgagcccttcttcccggttgtcttgggagaagggtgaggatgggcatttagacccgaaaccagctgctcactctttctttttggcagaaataaaaccacaggtagattctgcctgaacagccccttctctccctccacccccaggtcgtatccctgcacctgcggagaggggctgtgagctctggcggggggtggctccaccagtcgcctggcctcttctcccctctcttcccagcagccttaacttcccttgggcggctctaggaggagagaggcaggctcctgtgagcccagggaattttcaccctctcagtcctcaggacccacccccagttgagtccctggcccttcctccaggtgtgtggctttttccttctccatccacactggtcccaaatgcctgggggccggccacctggaccgccgacacacagcctcaatgttagtctcaaaggtaaggaaggcattcacgtcccttcttgcagggcattttaagacttgaatcgggtgggccccggcccctgtggctggctggcccctggtgtactgtaaaagggccaagacagggctcgttctcaggggcgcccctcccaggccctcagggcagcgggacggtgcagtcaggctctgggtgccacagtgatggaggtggaaggcacccaagctctagggaagtcttgggaggcagtcggccgagcccctgcttcctgtcctcaaataagtgaatccaggccaagggctgggagggctgggtgggcttatcgtcgagagggttcagagccactctggaggctgggctggcacagtggagagcaacaggtgaggacagacgtctggaagcccatccctgggacctgccctccctcggtcccaggtcactggagctccagggcttacttagtcctgacccattgtgccagggttctgagcagtgtcggccttgtggccacttgcaggggctattaggggacatcccgctgaagccacgctccttccagcttgccaaacccacagctacccgcccgggacccacactcagcctaataattatcaagcacagaaaaccgtccatttagaaaaataatccatttctgctgcagatgagccacttgtaagagtctccgtgacagcgtgggacggtgtgggaaccaaagtccctgccctgctcctttgtccacgggctattgcgtttattcaaggggtgcttaatgaccgtttagccactgccgtcggtctccgggcccagctcgtgccaggaggctgtcctgggacacactgggctggagctgccggctggcacggtgctcagggggcccctgatgggggccaggacctccccgcagaaactgcaggttctcttgtgaggatggaggccgtgccaccccgaaaggcagtagccttaggggaacagtgggtcccagctgcatgtctgaggatgggtggggacagggctgggactcagctttcattcactggagacttctccactcaggtctttgttgcactaaagcagggacaggaccctgggggttcaggaagcgggtctcaggccgctggtttattcctggaggtggggctggagaccagaatggaaaggggcttcctgagctgctagggggtgaaggacccccgaacccgcatttcttgagtgagagcaaacactcgaggcaggagccagcacccctcccactgcatgcccggcccccagcccaccttgccccctgacccaccttcacccgtgccccttctttctgcccttcctcaccgaagaagggctaggaacaccctggagaggctgcaggtccggccacggacgctcagctgagccccggtctgctccttcagcctccttgctcatgttggagcacaggccccaggcttcctgccagggccccgattcttcttatgtcctccagccccgccctggcgtggacatccactcactccttccagcaataagaaccgtccttggtcgtggagagtactgtgaaacaaaccaatgcacttaccaggaggcacaagactcttgaagaagatgtacaatgaacctttttttttttacaaaaaacaaaaagcaaatattcataaagagaaataaaatgtaattttaaagtaaaaaaaaaaaaaaaaaaaaaa

SEQ ID NO: 5803 - DNA, 9166 bp, Homo Sapiens
  NM_033389
atggctttggtcacggtccagcggtcacctacccccagcaccacctccagcccctgcgcctcggaggcagacagtggggaggaagaatgccggtcacagcccaggagcatcagcgagagctttctaactgtcaaaggtgctgccctttttctaccacggggaaatggctcatccacaccaagaatcagccacagacggaacaagcatgcaggcgatctccaacagcatctccaagcaatgttcattttactccgcccagaagacaacatcagactggctgtaagactggaaagtacttaccagaatcgaacacgctatatggtagtggtttcaactaatggtagacaagacactgaagaaagcatcgtcctaggaatggatttctcctctaatgacagtagcacttgtaccatgggcttagttttgcctctctggagcgacacgctaattcatttggatggtgatggtgggttcagtgtatcgacggataacagagttcacatattcaaacctgtatctgtgcaggcaatgtggtctgcactacagagcttacacaaggcttgtgaagtcgccagagcgcataactactacccaggcagcctatttctcacttgggtgagttattatgagagccatatcaactcagatcaatcctcagtcaatgaatggaatgcaatgcaagatgtacagtcccaccggcccgactctccagctctcttcaccgacatacctactgaacgtgaacgaacagaaaggctaattaaaaccaaattaagggagatcatgatgcagaaggatttggagaatattacatccaaagagataagaacagagttggaaatgcaaatggtgtgcaacttgcgggaattcaaggaatttatagacaatgaaatgatagtgatccttggtcaaatggatagccctacacagatatttgagcatgtgttcctgggctcagaatggaatgcctccaacttagaggacttacagaaccgaggggtacggtatatcttgaatgtcactcgagagatagataacttcttcccaggagtctttgagtatcataacattcgggtatatgatgaagaggcaacggatctcctggcgtactggaatgacacttacaaattcatctctaaagcaaagaaacatggatctaaatgccttgtgcactgcaaaatgggggtgagtcgctcagcctccaccgtgattgcctatgcaatgaaggaatatggctggaatctggaccgagcctatgactatgtgaaagaaagacgaacggtaaccaagcccaacccaagcttcatgagacaactggaagagtatcaggggatcttgctggcaagcaaacagcggcataacaaactatggagatctcattcagatagtgacctctcagaccaccacgaacccatctgcaaacctgggctagaactcaacaagaaggatatcaccacctcagcagaccagattgctgaggtgaagaccatggagagtcacccacccatacctcctgtctttgtggaacatatggtcccacaagatgcaaatcagaaaggcctgtgtaccaaagaaagaatgatctgcttggagtttacttctagggaatttcatgctggacagattgaggatgaattaaacttaaatgacatcaatggatgctcatcagggtgttgtctgaatgaatcaaaatttcctcttgacaattgccatgcatccaaagccttaattcagcctggacatgtcccagaaatggccaacaagtttccagacttaacagtggaagatttggagacagatgcactgaaagcagacatgaatgtccacctactgcctatggaagaattgacatctccactgaaagacccccccatgtcccctgatcctgagtcaccaagcccccaacccagttgccagactgaaatctcagatttcagtacagatcgcattgacttttttagtgccctagagaagtttgtggagctctcccaagaaacccggtcacgatctttttcccattcaaggatggaggaactgggtggaggaaggaatgagagctgtcgactgtcagtggtagaagtagccccttccaaagtgacagctgatgaccagagaagcagctctttgagtaatactccccatgcatcagaagaatcttcaatggatgaggaacagtcaaaggcaatttcagaactggtcagcccagacatcttcatgcagtctcactcggaaaatgcaatttcagtcaaagaaattgtcactgaaattgagtccatcagtcaaggagttgggcagattcaactgaaaggagacatcttacccaacccatgccatacaccaaagaagaacagcatccatgagctgctccttgagagggcccagactccagagaacaaacctggacatatggagcaagatgaggactcctgcacagcccagcctgaactagccaaagactcagggatgtgcaacccagaaggctgcctaaccacacactcatctatagcagacttggaagaaggggaaccagctgagggggaacaagagctccagggctcagggatgcacccaggtgccaagtggtaccctgggtctgtgaggcgagccaccttggagttcgaagagcgcttacggcaggagcaagagcatcatggtgctgccccaacatgtacctcattgtccactcgtaagaattcaaagaatgattcttctgtggcagacctagcaccaaaagggaaaagtgatgaagcccccccagaacattcatttgtcctcaaggaaccagaaatgagcaaaggcaaagggaaatacagtgggtctgaggctggctcactgtcccattctgagcagaatgccactgttccagctcccagggtgctggagtttgaccacttgccagatcctcaggagggcccagggtcagatactggaacacagcaggaaggagtcctgaaggatctgaggactgtgattccataccaggagtctgaaacacaagcagtccctcttccccttcccaagagggtagaaatcattgaatatacccacatagttacatcacccaatcacactgggccagggagtgaaatagccaccagtgagaagagcggagagcaagggctgaggaaagtgaacatggaaaaatctgtcactgtgctctgcacactggatgaaaatctaaacaggactctggaccccaaccaggtttctctgcacccccaagtgctacctctgcctcattcttcctcccctgagcacaacagacccactgaccatccaacctccatcctgagtagccctgaagacagaggcagcagcctgtccacagccctggagacagcagcaccttttgtcagtcatacaacccatttactgtctgccagtttggattacctgcatccccagactatggttcacctggagggcttcacagagcagagcagcactacagatgagccctctgcagaacaggttagctgggaagaaagtcaggagagccctctctccagtggcagtgaggtgccatataaggactcccagctaagtagcgcagacctaagtttaattagcaaacttggtgacaacactggggagttacaggagaaaatggacccattgcctgtagcctgtcgactcccacatagctctagtagtgaaaacataaagagtctcagccacagccccggtgtggtgaaggagcgtgctaaagaaatcgagtctcgagtggttttccaggcagggctcaccaaaccatcccaaatgaggcgctcagcttctctcgccaaattaggttacttggacctctgtaaagactgcttaccagagagggagcctgcctcctgtgaatcccctcatctcaaactgcttcagcctttcctcagaacagactcaggcatgcacgcgatggaggaccaagagtccctagaaaacccaggtgccccccacaacccagagcccaccaagtcttttgtagaacaactcacaacaacagagtgtattgtgcagagcaagccagtggagaggccccttgtgcagtatgccaaagaatttggttctagtcagcagtatttgctccccagggcaggacttgaattgactagttctgaaggaggccttcccgtgctacagacccagggactgcagtgtgcatgcccagctccagggctggccgtggcaccccgtcagcaacacggcagaactcacccccttaggagactgaaaaaggcaaatgacaaaaaacggacaaccaaccccttctataataccatgtgattctgagcctacacatgtgactttctagaagaaatgtttgtaaaaggggcaggtgtaatatgtaaggaacatgcactttattggttaattttataatattttggtcattttactgtttctggtgcatgcagggtttgggtgtttttcagtgtgtatgtgtgtgtatatgtaaggggaaagagagattgatctggatggcaagaccgtttatcattttttatttaaaaaaatcaaacctcaaaaaagtcattttcagagaacacctttatcaaaggcaaattgctgtttttcagtcagctgccacctgcttctcattttgccctctgagaaaaggcatggtttcttaattgagggaaggaagcagattcggaggggtggagataaagctggggattggagatgttcccctgcctttgtgatgatggtttggtttccagacctgaggcatcgaatgggctaaaggtcagccagaagtcagagggctctcagccttcatccagccgcagccctttagagttcctgaaggaggcaggttccgctttgctttaaaagagggtcttccggtgttccagagtgtatcgttacagtaagacatgataatggccggctctgcaaatttatcatatagtttttttcccaagaaaattatttttgaaattaaaacaggaccccaaatgaaatccaagtggtcttctgtagaggaaagcatgataagaggaggaagacataaagttgggggtggagaggctgctgcccagaaactgctgggttggtgggatccacacagatgggcatcttggctctccctgccagaaaaatgtgctctgcagtgtcctcccaactgaaaacaacagtgacatgtttgaaaagcagcaatcgaaagtcagtgtgttcttgtaaaatgaatatgtatgtagggttttaacccttccattacttgaataattctttgggccttctgagtttaatggccatattttcttccagtttattttccttccccatgctgttgtccccatgctgcctatttttttaaatttcatagattatatttgaattgttacatatgtttaacatccattgaatgcaacgttttatttttggtattatcactgttaacacttttttttccttttcctggaaggtttgtcatttctctaaagtttgtacacagtatttatgtacataatattgtcactgtcttagtgtcttgttcatgttgtagggtaattttgatttattctttttaagaaggagtagagttgcaactggaaaacacagacaccagaaatgaaagtgttgggtgttgataggaatctgtacaatatgttgatggtggctgtagttgtttaaatggagacttccaatcaccagctcctgccaaattatgcattagtaactttttcctcagagacacccctaaaggctcccattaggtcacagcgtgactgaaagctgatttctctgtgagactgaaatcccagaacattgtttgccagtatctcaaccacagccaggaagtatatgtgagttgcccagagtggaagctcctagtagaggctgaaggccacaggggaggcctcagccaggggcaagtgcccacagtgactccatttaggatgctgtcgttttgctactgttgtggagatccttaacgcagcagcgcctgtcataaacaagcctcttgtagcttcttacagaaaacagatttagtctagcatgaaacacctctgcatctcattgaaactgaagaggcttgcagatttgctttcgttgatgtccacgttactgaggattgactgagtatagactggagacaggtttttggcttatcacagcactgaggaaaatacaaatgcacagactgtcagcatgatgtcagaggccagagtttggtgggggcagatggcagggcgacccaaaagatgcagaaaaggtagactggggccactgggtcttaagaggagctgtgaagttgtgtggaagccaaggctgggtctgacatccctgccaggaagcaggttggacagaaaccacttgctaaaagcgtctctatggtgcagtgattatgtgtaccctgtgctgttgctcagtagtctccttgaatgttcaagtatctcatccactcagttttgtgattcctggatatttgtgtgttgtaaagtgttttgttaggtggtatgaaccaatgtgaggaggcttgagacagggttatggatttccagagctcttccatgtagaataccctgccttcttgaagcagttccaccaccaatatgatggggaagggcaggaacttatggcagggtggggagagggtttgcctggaagttaagagagtggcatccacttgtggtaaccccttacgatgatgacatcccacacactaagaggtacaagcaggaccaaagttttggactgttccctcttctcccctccactgtgtttaatgttcactcactgcattaaataacaacaaagatgggacaaaacccactaatactgtggggaaaaaaaattttcaagagcagaggaaagtctttctgcctttttataattactttttttatcatttaatttacctgcctaaataaacatcttctacagaatatctgtcattcaaccatgccaaggagtttgtgccagccttttcagactcccagaattgggtgttcctgggttatttacatagctgagcagtgtccaggggaggtgcgcagtgaactgtcaaggactttccagactgtcttctcttcagacttttataatctccagtggcatctttcccttttcttttgttcatgacctgacctgaagcagcagatttgatagactggcaaagatgaataggaaaaactttgactcttgcccagtgcctgcctgcctctctctctctcctctctctctctctctttttaaaccaccatagactctcacttattttggaggagtgtatgtgcatgtgtacacatatgtacatatataaaaacagttgatgttttggtgtatggggtaaaagccccaggagcatacagaacttgagctgaacctggtcagtagaaagggaaaccccaaccctttcttgatttttggagacacccaggactaatggatactgtagtagacatgtagtactatagtaccgtaatattcatctctcctcattttagttgcctttcagattctaaatgtttgggatcattcctatcatcttagtctcttcaggatctttagtattttcctggttctgaggaggcttgagacagggttatggatttccttgttctgtgtctttatccctactgatagttcctctttctcattttgcaaactacccagagctccaaggacagcctgaagatctcagtgcctcaggctctgaggtactctgctcacaggccccagacagatgctgttgggtaaactcaaagcttcctatgagaagcttctgagatgtagcaggtcacagaagtgttcacctgtttcatctgaggatttcagttctgaagtgatctaggcatgtttggtaaaaatgtttttgtgagagttctttttttaagaaagcattatgcaaaaagtcacttttaagggcatttaaaaatttttaagtaaagccattctttggcttttttggactatttgtggatactttgtttacattttgaatattaaaatgtgcatcatcttgtcggccatgcagtcctgcaggcatcagtgccctggctgtcctgtgagtcctcatgcagagcagggccatcatggtcagcccttgtgagtaagtgggtatacgctgaagctgacttccgtctgtgtcctgccctcccatccagcactctctatggaaatagttgtcatttcctcagtgatggtgtgtcttatagtgatggttgtaatggtgaatggctagtgtcattttgtttaattttgttttgctttttgatggtggataagatgaaattttagctgtttcagcatcaatccaacttaaaagcatcttggactttgttttcccttccaaactaaaagatcaaggcatgtattagacacaagcatatttgctgcctcaactcctctgacacccatattaggaaaaggcctgccaccaaagcaggaagctgcacactcctaacccttctcccagggtgtggggtcccttgacgtcatgaagagctattgcaaggtgcttctgtacttttccagcctggaaatggagggtgactggccctggctcctgctatgagaagataaccagcctcattttctcagtgccccagaggtctaggataggatttctaaactggaatcatccttaatcaccttgaagatcccttaagaggcatttgactggtgctgccgtctgtgtcctcaaagcaatgctggtggcagcgtcctgtgtacacatgcagagctaatacccaaactaaaaactgggtaactggccctgaagtgcttcccaatcagtaagcccacagggaaatgtttgatttttatgttctgttggattttggtttgcttggcatatctaaaggtgcctttacttttctttttttttttttttctttctgctttgttttgtaggacttgttctaacatggaaaacaagtccagaagactctcctctgactgttacctttgccccaagccaccccaaacttttatgctcatgttttattaaagcaggtgctccctggaatctctgggacatttttgaggcatttgaagcagaatatagagtggtctcatctccttccttaatcttcctggtggttgggatgttccacttgtatcatagatttttttattacagatatgctccactgtttttaaatgtgaacttgtgcgcaaatgtgcagattcaatgttcttgttacagattgaataaatttttattttg

SEQ ID NO: 5804 - DNA, 4378 bp, Homo Sapiens
  NM_033397
gtgcgctcttcaggacagcagaggtcggttggaggtctgcattctctgccgacttgggccccaacttccccatcaggtcactgctccctcctctgaggtctggacaaaggacaaggctgtagggacctagactgtcctagacggggaggacatctatcctcagtggtctttccagcagtttgtttggagctgctcatcctgatcttttggctgactctggcagagggaaagtcagatttgaggcctgagctctaacaggcatccagagaggaaggaagggcccaccccgtgacatcagtgaaacggaagcaccctgcaggtgacatcactgttgctcagggcaacgcctccaccctaaggcggacggggaggtgaaaaatcggcctcaagtgtgagacgcatgttgaagggaagggacatagaaggtgtaacgttcacaggaaagctccaaccatggccatggggctcttccgcgtgtgtctggtggtggtgacggccatcatcaaccacccgctgctgttcccgcgggagaacgccacagtccccgagaacgaggaggagatcatccgcaagatgcaggcgcaccaggagaagctgcagctggagcagttgcgcctggaggaggaggtggctcggctggcggccgaaaaggaggcactggagcaggtggcggaggagggcaggcagcagaacgagacacgcgtggcctgggacctctggagcaccctctgcatgatcctcttcctgatgatcgaggtgtggcggcaggaccaccaggaggggccctcacctgagtgcctgggcggtgaggaggatgagctgcctgggctggggggcgcccccttgcagggcctcaccctgcccaacaaggccacgcttggccacttttatgagcgctgcatccggggggccacggccgatgcagcccgtacccgggagttcctggaaggcttcgtggatgacttgctggaagccctgaggagcctctgcaaccgggacaccgacatggaggtggaggacttcattggcgtggacagcatgtacgagaactggcaggtggacaggccactgctgtgccaccttttcgtgcccttcacaccccccgagccctaccgcttccacccagagctctggtgctccggccgctcagtgcccctggatcgccagggctacggccagatcaaggtggtccgcgccgatggggacacattgagctgcatctgcggcaagaccaagctcggggaagacatgctgtgtctcctgcacggcaggaacagcatggcgcctccctgcggcgacatggagaacctgctgtgtgccacagattccctgtacctggacacgatgcaggtcatgaagtggttccagacggccctcaccagagcctggaagggcatcgcccacaagtacgagttcgacctggcctttggccagctggacagcccggggtccctgaagatcaagttccgttcagggaagttcatgcccttcaacctgattcctgtgatccagtgtgatgactcggacctgtactttgtctcccaccttcccagggagccctctgagggcaccccagcctccagcacagactggctcctgtcctttgctgtctatgagcgacacttcctcaggacgacactaaaggcactgcccgagggcgcctgccacctcagctgcctgcagatagcatccttcctgctctccaagcagagccgcctgaccggtcccagcgggctcagcagctaccacctgaagacggccctactgcacctcctactcctccggcaggccgccgactggaaggcggggcagctggacgctcgtctgcacgagttgctgtgcttcctggagaagagcttgctccagaagaagctccaccacttcttcatcggcaaccgcaaggtgcctgaggccatgggactccctgaggccgtgctcagggccgagcccctcaacctcttccggcccttcgtcctgcagcgaagcctttaccgtaagacactggactccttctatgagatgctcaagaatgccccagcgctcattagcgagtattccctacatgtcccctcagaccagcctaccccaaaaagctgacgtcttttacagaatgtgggatcctcgagctaagatgagggcatccctcacgttcacacccctggtggcatctgccagccctgttctggggacaaggcgggctttcgtgggagccgtgctcagcctgccaggaagccaagccctacagtgcagaggaaacagaatttcaacgggaagctggtttgcttcataccattgggatctgctggtaaagctgttatttgggtttagggactgatcccttgcagtttacttctggatcaccatgaatggccaagatggtggcagaacacgctgtggaccctgagttagagacaatgcaaatgttggattgggtgtaattctttttgaatcccagatccagtctgtacttgaatatgagcagaggatctacaagaatgctgacagggaaccgtgttaagacccagcacccctattcccaggagcttctggcctgaccatctgcagccaaagcactaacagggacagatatgggaatgtccacctttgatccgcatcctgcacaatagtggtcccaccatggctgccacttttttatactatttggagaaaagaccttgtataaattcgaggcccgaatgactaacgtctctgtcacacggaaatgggtacttggtggcatagagaaacacaattagccactttttcagctacacttctcactcagctgcaccctacacttctcactcaggtgcacccccttctgctgtcctttccccaacgtactgggtcccgagcgtggtgggtatttgccacactgggtgccagctcagcagccccccacctctctttattctctccaaagctggtctttctgactatcattgtggtagggggaggacagatgctaaaggtggaagctgacctggagaaagagacacacggggtgactgtggcaaaggacagctggaaaagaaactctatcacttcttcattggcaaccacaaggcacctgaggccatggcactcccagaggctgtgcgcagagccaagcctctcaacctcttctggccctgcgtcctgcagcgaagtctctgctgtaagacagtagactccttcgatgaggtgctcaaaaatgctacccggggtggtggtgtctggcttgcagtctggcccagttcagagaaagttgcagagatcaggggccaaggatgtcatagccccaggttgtcctcagggtcccaatcctagggcagggtgtgcatggaagcaagaactatggaaacctagctccagtctgcaggctctgagcccctagttcctcactccagcggggctccctcactgcacagaacccaccccttctgtgtgggcactgctgaccacacagatgacccagacccaaagagcctggcagaagctctgtggttggagctgggctccgtctccaggtctggttcagggggatcaggaaggctcttttccacctgtggcttcactggccctttgagatttcctatctcaccgttacttcagttacccttgcagggggccagggagtcaagaatataccgtgttcctccagggtttaagccggccatgccttcccgagagcataaccaacttgacaggggtgcccagttaccccacaaactgaaggaaggagatccttcccccatccccaggagtgctctcaaccagcctcagaaagcttgagaagatggaccctttgcccaccagggttaattcctggtggggcagctcggctgtgatcagggcaaccaaacctataggaagccttccagtgtgagctggaattagactgaacatgtgcttgggcctgcctctccctagacgcagttgcggggcactccagggaatgaaccagctcaagtgtgtccctaacagcagcctggagctacccccaatccctcacagcctgaccctcctcattccatcagatgcatttgtagaatcggggcaaatttccttatttatttatggcccatgcctttcgccctcttcatcctgatcccgttttgctttgaagagaccccagtaaccaaaaaacagcctccagaagccaaaaccatgcctggatctcccatagcttctcctttgcttccaggagaaagttcactgaaaaaaaaatatcttctggcttcttgtgtgtacagagacaacagaactcggtggggaaacgggaatcttttctgcaccaaagctgcttctaaagcagaaagcagtggggctcttggtgtttcatgctgccttatttatattaaaggaagaattaaatcttgcaaaaaaaaaaaaaaaa

SEQ ID NO: 5805 - DNA, 3876 bp, Homo Sapiens
  NM_033402
aaaaacgaaagaagcccacagttgggacgaggattccagttttgcgtcaccgtcaaggcgggaaagttcccggctgtcggttggagggtgggtcctcgccccgccccgccccctcgggccgcccttccgcgcttccgggaggcttgtcccaagctcacggacccctcgctgggtgccggttaagaccccgctccccgtcgccagtgctatggaggcggcggcggcggtggtggcggcagaggcggaagtggaaaacgaagacggcgacagcagctgcggggatgtatgcttcatggacaaaggcttgcagagcatatcagaattatctttagattcaactcttcatgccgtcaatcttcattgcaataacatctccaagatcgaagccattgatcatatttggaatttacaacatctagatctgtcatctaatcaaataagtagaattgaaggactaaacacactgacaaaactgtgcacattaaatttgtcctgcaatttgattacaaaagtagaaggacttgaagaactaattaatctgactagactaaatgtatcttataaccacatagatgatcttagtggattgattccccttcatggaattaagcataaacttagatatattgatctacatagtaatcgtatagatagtatccatcacttacttcagtgtatggtaggattgcacttcctgaccaatcttattttggagaaagatggagacgataatcctgtctgtcgactgccagggtacagagcagttattctccagactttgccacagcttagaatcctagattgcaagaacatatttggtgaaccagtaaatttgacagaaataaattcatcacagctgcagtgcctagaaggtcttttggataatttagtttcttctgattctcccctaaatataagtgaagatgagatcattgatagaatgccagtgataacagcacctatcgatgagttagttcccttggaacagtttgcaagtacaccaagtgatgctgtgttgacgtcttttatgtctgtgtgtcaatcttctgagccagagaaaaataatcatgaaaacgatttgcagaatgagataaaacttcagaaattagatgaccaaattctacaacttctaaatgaaacttctaattcaatagataacgttcttgagaaagaccccagaccaaaaagagacacagatataacttctgaaagtgactatggaaacagaaaagaatgcaatagaaaagttcctcgaagatcaaaaatcccttatgatgccaaaaccattcaaactattaagcaccacaataaaaactacaactcttttgtaagttgtaatcgtaaaatgaaaccaccttaccttaaagaattatatgtaagctcatctttagcaaactgtcctatgttacaagaatcagaaaagccaaagactgaaataattaaagtagaccaaagtcactcagaagacaacacttaccagtcccttgttgaacagctagaccaagagagagagaagagatggagagctgagcaagccgaaaataaactcatggattatattgatgagctgcataaacatgcaaatgaaaaagaggatattcatagtctggctctacttaccacagataggctaaaggaaattatttttagagagagaaattccaaaggacaactcgaagttatggttcacaaacttcaaaatgaaattaaaaaactgactgttgaactaatgaaagcaaaagatcaacaagaggatcaccttaaacacttaagaaccctcgaaaaaacattagaaaaaatggagagacaaaaaaggcagcagcaggcagcacagataagactgatccaagaggtggaactcaaagcttcagctgccgatagagaaatatacttacttagaacttcccttcatcgagaaagagaacaagcgcaacaacttcatcaacttcttgcattgaaagaacaggaacacaggaaggaacttgaaacaagggagttttttactgatgctgacttccaggatgccttagctaaagaaatagccaaagaagagaaaaagcatgagcaaatgataaaagaataccaagagaaaattgacgtgttaagccagcagtatatggatttagaaaatgaattccgtattgctttaactgttgaagccagaagatttcaagatgttaaagatggttttgaaaatgttgcaactgagttagcaaagagcaaacatgctcttatttgggctcaacgaaaagaaaatgagtcttcctctttaattaaagatctgacctgtatggtaaaggaacaaaaaacaaaactggcagaagtttctaaattgaaacaagaaacagcagcaaatttacagaatcaaatcaacacccttgaaattttaattgaagatgacaagcagaagagtattcaaatagaacttctcaagcacgaaaaagtccagcttatttctgagctagcagccaaggaatcactaatatttggtttaaggacagaaagaaaagtatggggacatgagctggcacaacaaggatcttctctagcccaaaatcgtggaaaattggaggctcaaattgagagtttatctagagagaatgaatgtctgcgaaagacaaatgaaagtgatagtgatgcattaagaataaagtgcaaaatcatagacgaccaaactgaaactattagaaaattaaaagattgtttacaagaaaaagatgaacacatcaaaagattacaagaaaagatcacagaaatagaaaaatgcactcaagaacaacttgatgaaaaatcttcacaactggatgaggtacttgagaagttggaaaggcacaatgaaagaaaagaaaaactaaaacaacagttgaaaggaaaggaagtagaacttgaagaaatcagaaaagcttacagtacactgaatcggaagtggcatgataaaggagaacttctatgtcatcttgaaacacaagtaaaagaagtgaaagaaaaatttgaaaacaaggaaaagaaacttaaagcggaaagagacaaaagtattgaactacaaaagaatgcaatggaaaaacttcatagtatggatgatgcctttaaaagacaagttgatgcaattgttgaagctcatcaagctgaaatagcacagctggccaatgaaaagcagaagtgtattgattctgcaaatttaaaggtccatcaaattgaaaaagaaatgcgtgaacttttggaagaaacatgcaagaacaaaaaaacaatggaagcaaaaattaagcaacttgcttttgctttaaatgaaattcagcaagatatgtgatggttctgagaatgaatttaattgaaatagaccagcagacctattgtaaaaatgattaaatattgtaatagtagtaactgctatgactttgaaatgtctctttctatacatttcattatgaatatatttttaaagacttttgatcaagtatttattaattgtataggttttttataataaattgttgacaattttgtctattagaaaaaactatcataactagacttacaatatttttcttgtttctgtactatacattgtttggtaattacacatttgcctacaaatttgtgaatgaaaagattagtattttcaccatatgaggtaaaacattttaatcattgttatcttattgtgatgatgaagaactaattatatttgttatttaattgatgtagctcaattcttttaaagtacttatgtagccaaaaagcatttgaaatctgtatgataaaagatgtggcattcttaagaaagtatatgtagccatctccacatcactcattatgaccccttcttttataatgcttatatcttttcattaaagattacatttaaggttttataaa

SEQ ID NO: 5806 - DNA, 1654 bp, Homo Sapiens
  NM_033406
gggccagacctgcaccgggccaggcaagatggcggccatggagaccgagacggcgccgctgaccctagagtcgctgcccaccgatcccctgctcctcatcttatcctttttggactatcgggatctaatcaactgttgttatgtcagtcgaagacttagccagctatcaagtcatgatccgctgtggagaagacattgcaaaaaatactggctgatatctgaggaagagaaaacacagaagaatcagtgttggaaatctctcttcatagatacttactctgatgtaggaagatacattgaccattatgctgctattaaaaaggcctgggatgatctcaagaaatatttggagcccaggtgtcctcggatggttttatctctgaaagagggtgctcgagaggaagacctcgatgctgtggaagcgcagattggctgcaagcttcctgacgattatcgatgttcataccgaattcacaatggacagaagttagtggttcctgggttattgggaagcatggcactgtctaatcactatcgttctgaagatttgttagacgtcgatacagctgccggaggattccagcagagacagggactgaaatactgtctccctttaactttttgcatacatactggtttgagtcagtacatagcagtggaagctgcagagggccgaaacaaaaatgaagttttctaccaatgtccagaccaaatggctcgaaatccagctgctattgacatgtttattataggtgctacttttactgactggtttacctcttatgtcaaaaatgttgtatcaggtggcttccccatcatcagagaccaaattttcagatatgttcacgatccagaatgtgtagcaacaactggggatattactgtgtcagtttccacatcgtttctgccagaacttagctctgtacatccaccccactatttcttcacataccgaatcaggattgaaatgtcaaaagatgcacttcctgagaaggcctgtcagttggacagtcgctattggagaataacaaatgctaagggtgacgtggaagaagttcaaggacctggagtagttggtgaatttccaatcatcagcccaggtcgggtatatgaatacacaagctgtaccacattctctacaacatcaggatacatggaaggatattataccttccattttctttactttaaagacaagatctttaatgttgccattccccgattccatatggcatgtccaacattcagggtgtctatagcccgattggtaagttaaattttcctctagtgctgatttacatgactttgtagggttaacactgcagataagccaggcaaatagttagtttataaatagtgttccagagaaccctagagattttgagaaagtatcttgggggtcatgtgaatttgttgagagaaatggacaagtaaatgaggctccatagtctctaaccagagaatttctgctgttttaaagattcaacttgtttttcactgttcagtggcctaaatgtagattatgagaaataccacattagaccagtagaatcagctttaagactgggaaaacaacttcttacagtgtttttgctcaaacttccaatttaatgtcaaataaacaaatattccataaagatcattataaagaaaa

SEQ ID NO: 5807 - DNA, 7063 bp, Homo Sapiens
  NM_033407
agccgccgccgccgtcgccgtcgccgcagcagccatggccgagcgccgcgccttcgcccagaagatcagcagaacggtggcagccgaagttaggaagcagatctccggacaatatagtggttctccccaactgctcaaaaaccttaatattgttggcaatatatcccatcacaccacagtgccccttaccgaagcagtagatccagtggatttggaagattacctcattactcatcctttggctgtggattctgggcctttacgggatttgattgaatttcctccagatgatattgaagttgtttatagtcctcgggactgcagaactcttgtttcagctgtacctgaagaaagtgaaatggatccacatgttagagactgtataagaagttatacagaagactgggcaattgtcatcagaaaatatcataaattgggaacaggatttaatcccaatacattagataaacagaaagaaaggcaaaaaggtttgccaaaacaagtttttgaatctgatgaagctccagatggcaacagctaccaggatgatcaagatgaccttaaaagacgttcaatgtcaatagatgataccccaaggggtagctgggcctgtagtatctttgacttgaaaaattcacttcctgatgctttgcttcccaatttacttgatcgaactccaaatgaagaaatagaccgtcagaatgatgaccaaaggaaatcaaaccgtcacaaagaactttttgctttgcatccatcaccagatgaggaagaaccaatagaacggcttagtgttcctgatatacccaaagaacattttggtcaaagacttcttgtaaaatgcttatcactcaagtttgaaattgaaattgaacccatttttgcaagtttggctttatatgatgtcaaggaaaagaaaaagatttcagaaaacttttattttgaccttaattctgagcagatgaaagggttgttacgtccacatgtaccacctgctgccattactaccctggcaagatcagcaattttttctatcacttatccttcccaagatgtttttcttgtaataaagctagaaaaagtcctacagcaaggagacattggagagtgtgcagaaccatatatgattttcaaagaagcagatgccaccaagaataaagaaaaactggagaaactgaagagtcaagcagatcagttttgccaaagacttgggaaatatcgcatgccttttgcttggactgcaatccatttaatgaatattgttagcagtgctgggagtttggaaagagattctacagaagtagaaatcagtactggagaacgaaaagggtcttggtcagagaggaggaattctagtattgttggcagacgatcacttgaaaggacaacaagtggagatgatgcttgtaacttgacgagctttcgaccagctactctcacagtgacaaatttttttaagcaggaaggagaccgcttaagtgatgaagatctctacaaattccttgctgatatgagaaggccatcttctgtcttacggcgactaagacctattacagctcagctcaagatagacatttctcccgcacctgaaaatccccattattgcctaactccggagctgcttcaagtgaagctttaccctgacagtagagttagacctaccagagaaatcttagagtttcccgcaagggatgtttatgttccaaacactacttacagaaatcttctctacatataccctcagagtcttaattttgccaatcgtcaaggttctgctagaaatataacagtgaaagtccagtttatgtatggagaggatccaagcaatgccatgccggtaatctttggtaaatctagctgttcagaattttcaaaggaagcctatacagccgtagtatatcataacaggtctcctgattttcatgaagaaatcaaggttaagcttcctgctactttaactgaccatcatcacttgctttttactttttatcatgttagttgtcaacaaaaacaaaatactcctcttgaaacaccagttggatatacatggataccaatgcttcagaatggacggttgaagactggccagttttgcttgccagtctcattggaaaaaccaccacaggcttattctgtactgtctcctgaggttcctctacctggcatgaaatgggtagataatcacaaaggtgtttttaatgttgaagttgttgctgtttcgtctatccatacacaagatccttatcttgacaaattttttgctctggtcaatgctctggatgaacacctgttcccagtccgaattggggacatgcgaatcatggaaaataacttagaaaatgaattgaagagcagtatttcagcactgaattcatcccagctggaaccagtggtccgatttcttcatcttctgctagataaactgatacttttagttattagacctcctgtcattgctggccaaatagttaacctaggtcaagcatcttttgaagccatggcatcaattataaatcgacttcacaaaaacttggaaggaaatcatgaccagcatggcagaaacagccttcttgcatcatatattcattatgttttccgcctaccaaatacttaccctaattcatcatcaccaggtcctgggggtttgggaggatcagtgcattatgccacaatggctagatctgcggtgagacctgcaagccttaatttaaatcgttctcgaagccttagtaatagcaatccagatatatctgggactcccacgtcaccagatgatgaagttcgatcaatcatcgggagtaaggctatggatcgaagttgtaatcgtatgtcttcgcacacagagacgtcaagtttcttacaaacattaacgggacgcttaccaactaaaaagctttttcacgaggagctggctttgcagtgggttgtttgcagtggcagcgttcgggaatcagctttgcaacaagcctggttcttttttgaattaatggtaaagagcatggtgcaccatttatactttaatgataaacttgaggctccaaggaaaagtcgttttccagaacgtttcatggatgacattgcagctcttgtcagcacgattgctagtgatatagtttcacgatttcagaaggacacagaaatggttgagagactcaatacaagccttgcattctttctcaatgatctgttgtctgttatggacagaggatttgtttttagccttataaagtcctgctataaacaggtgtcttcaaagctttactcattaccgaatcccagtgttctggtgtccttgaggctggattttctacgaatcatctgcagtcatgagcactatgttacattaaacttaccctgcagcttacttactccacctgcatctccatcaccttctgtttcttctgcaacatctcagagttctggattttctacgaatgtacaagaccaaaagattgcaaatatgtttgaattatccgtgcctttccgccaacagcattatttggcaggacttgtgttaacagagctggctgtcattttagaccctgatgctgaaggactgtttggattgcataagaaagtcatcaatatggtacacaatttactctccagtcacgactcagacccgcggtactctgaccctcagataaaggctcgagtggccatgttgtatctacctctgattggtattatcatggaaactgtacctcagctgtatgattttacagaaactcacaatcaacgaggaagaccaatttgtatagccactgatgattatgaaagtgagagcggaagtatgataagccagaccgttgccatggcaatcgcagggacatcggtccctcaactaacaaggcctggcagtttcctcctcacgtcaacgagtggcaggcaacacactaccttttcagcagaatcaagtcgaagccttttgatctgtctactttgggttctcaaaaatgcagatgaaacagttctacagaagtggtttacagatctctcagtcttgcagctaaaccggctattagatctgctttatctctgtgtgtcttgctttgagtataaagggaaaaaagtgtttgaacgaatgaatagcttgacctttaagaaatcaaaagacatgagagcaaagcttgaagaagctattcttgggagcataggtgccaggcaagaaatggtacggcgaagccgaggacagctcggtacgtacacaatagcttctcctcctgagagaagcccatctggaagtgcctttggaagtcaagaaaatttgaggtggaggaaagatatgactcactggcgtcaaaacacagagaagcttgacaaatcaagagcagagattgaacacgaagcactgattgatggaaacctggctacagaagcaaacctaatcattttagatacattagagattgttgttcagaccgtttctgtaacggaatccaaagagagcattcttggtggagtgctaaaagtgctactacacagcatggcctgtaaccaaagtgcagtttatctacaacactgttttgctacacagagagccttggtttcaaagtttcctgaactcttatttgaagaagagacagagcagtgtgctgatttatgcctcaggcttctccgacactgtagcagtagcatcggtacaatacggtcacacgccagtgcctccctttacctactaatgaggcaaaactttgagattgggaataactttgccagggttaaaatgcaggtaacaatgtcactatcctccttggtgggcacatctcagaattttaatgaagaattcttaagacgttctctaaagactatattgacatatgctgaagaagatctggaattgagggaaacaacatttcctgatcaggtccaggatctggttttcaatctccatatgattctttctgatactgtgaaaatgaaggaacaccaggaggatcctgaaatgttgattgatctaatgtacagaattgccaagggttaccagacctctccagatctgcgattgacctggttgcagaacatggcaggcaagcactcagaacgaagcaatcatgctgaagctgcacagtgtctagtccactcagcagcacttgttgctgaatatttgagcatgctggaggaccggaaatatcttcctgtgggatgtgtaacatttcagaatatttcatctaatgttttagaagaatctgcggtctcagatgatgtggtatctccagatgaagaaggtatctgctctggaaaatactttactgagtcaggacttgtgggattactggaacaagcagctgcttccttctctatggctggcatgtatgaagcagttaatgaagtttacaaagtacttattcctattcatgaagctaatcgggatgcaaagaaactatccacaattcatggtaaacttcaagaagcattcagcaaaattgttcatcagagtactggctgggagcggatgtttggcacctattttcgtgttggtttttatggaaccaagttcggggatttggatgaacaagaatttgtttacaaggagcctgcaataaccaaacttgcagagatatctcacagattggagggattttacggagaaagatttggagaggatgtggttgaagtaatcaaagactctaatcctgtagacaagtgtaaattagatcctaacaaggcatatattcagattacctatgtggagccatactttgacacatatgagatgaaggacagaatcacctatttcgacaaaaattacaatcttcgtcgattcatgtactgtacaccctttactttagatggccgtgcccatggggaacttcatgaacaattcaaaaggaagaccattctgactacgtctcatgcctttccttatattaaaacaagggtcaatgtcactcataaagaagagatcatcttaacaccaattgaagttgctattgaggacatgcagaaaaagacacaggagttggcatttgcaacacatcaggatcccgcagaccccaaaatgcttcagatggtactccagggatctgtaggcaccacagtgaatcaggggcctttggaagttgcccaggtttttctgtctgaaatacctagtgacccaaagctcttcagacatcataataaactgcgactctgctttaaagattttactaaaaggtgtgaagatgccttaagaaaaaataagagcttaattgggccggatcaaaaggagtatcaaagggaactggagagaaactatcatcgccttaaagaggccctacagccactgatcaacagaaagatccctcagttatacaaggcagtattgcctgtcacctgccacagagattccttcagtcgaatgagccttcgcaaaatggatctctaaactgaatgcacttgttttattcatctgcaaagagccatgtattcaacatcgagtgtgaaaagatctattggaaaacaacatggaatggaattctggaaattattattcattgaagaatgcagtggccaagaaaatatcaaatgtagattgttaacgcttgagaatcatggctatggtttctaatgttctggtaacaagctgttatcttttaagacattttaatgactcaaaggtacactatacatttaccattatttataccatagctaaggttaaaaatttattcactttaagttcgtattttttaatttatattaccatttatagattcattttggaaccattttaaatgtagtaatgcttattttaaaggtactattaaatatgtgaatgtttacactaattttaccgagtgggacttcaaaatttttattattgacaatggcagagaacaattaaagggttgactcaagaactagttccaaacctagcagaataaaaatcatagatagccccaaattaatgagtttggtaactgtttcaaagttattttccatttacatacccaaaacaggaatttagaattgcagaactttacttagtaaaacctttgtgtaaaataatttaaatacggggataactaataccagtgacaacaccttaacttgattaaatcttattacaccaaaaaaaaaaaaa

SEQ ID NO: 5808 - DNA, 1432 bp, Homo Sapiens
  NM_033411
aatcacggcagaggactatccgccagccccgcccccgcctcgccgcaggtcgcgcgcagctggcgcctgaggaactgcggctgcggttccgagcggggtctggggctgttaccattgagtgaccagaaaggctctcggtgcaaagcgttcctgcagaattgcttccacgtaaagggaccttcgggaaatttcgctggataccggctggcattgacaaacccagcgtccctgagccttgtgaggtttccaggcaggctgattgcgaggcaacatgtctgcttcggtgaaagaaagccttcagcttcagctactggagatggaaatgctgttttctatgtttcctaaccaaggagaagtaaaacttgaagatgtaaatgccctgacgaatataaagaggtatttggaaggcacaagggaggcgctgccaccaaaaatcgaatttgtaattacactccagattgaagagcccaaggtgaaaattgatttgcaagtgaccatgcctcacagctacccctatgtagcattgcagctgtttggacggtcatctgaacttgacagacatcagcagctacttctcaacaaaggtctcacttcttacatagggacttttgatccaggtgagctctgtgtatgtgcagcaatccagtggctacaggacaacagtgcatcttatttcctgaacagaaagcttgtatatgaaccatctacacaagcaaagccagtcaagaacacattcctccgaatgtggatctacagtcaccatatatatcagcaggacctaaggaaaaagattttggatgttgggaaaaggttagatgtgactggattttgcatgacaggaaagcctggtataatctgtgtggagggtttcaaagagcactgtgaggagttctggcacacaattaggtaccccaattggaagcacatttcctgtaagcatgctgaaagcgtggagacagaaggaaatggtgaggacctgcgccttttccattcttttgaagagttactccttgaggctcatggtgactatggattaaggaatgactatcacatgaatctgggccaattcttagaatttctcaagaagcacaaaagtgagcatgtttttcagatactatttggtattgaaagcaaaagttcagactcataaaaagcgattaagaggcctatgcctgtaatttcactaagtcagtatttctgttaataagaccaaattaaaaaggctagtggctgtgtagcatcctcagtgcaaaacccagctccagaattttcacctggtaacgaatttcaactgacagtgaaatgaataggcctttaaactttataacattgcaattgtgatgttatctctaggtttttgtgtgaagtcattcaaaaactatttcattgtaaattaataaaaacaatccatttaaaaaaaaaaaaaaaaaaa

SEQ ID NO: 5809 - DNA, 2397 bp, Homo Sapiens
  NM_033415
tcctggtgcgcaggcgcgggccgccgcggcccggctctcttgcgcaagcgcgctgtccgcttcttctgggcggacgctctggaggcaaaacatttccctgctgggggcggcgaccaccgtgagcgtcccggaaggggcggcaaagacgcctccgtcgcgcacgaggtggcctcgttggctttaccttggttcgcggtcgtccttggttatcgtgagcgtccgcgagtctctgggaggccaagcctaggggcgccacagcgcctgcgcgcgtacggcggccggaaggggctagaggcggctccctgggtgacaaccgcgcgccccacctttccccacgtggccgcgaagaccggctcaggagcatctatcggctgcacgccaacatcaacacaggcgaagatggtctccaagcgcattgcccaggagacctttgatgcagctgtgcgcgagaacatcgaggagtttgcgatggggccagaggaggcagtgaaagaggccgtggagcagtttgaatcgcaaggggttgatctgagcaacattgtaaagacggcacctaaagtctctgcagacggatcccaggagcccacacatgacatcctgcagatgctcagtgacctccaggagtctgtggccagctctcgcccccaggaggtgtcagcatacctcacccgcttctgcgaccagtgcaaacaggacaaggcctgccgcttcctcgcggcccagaagggggcctaccccatcatcttcactgcctggaagctggccactgcaggtgaccagggccttctgctccagtccctcaatgccctgtcggtgctgactgatggacagccagacctcctggatgcccagggcctgcagctcctagtggccacgctgacccagaatgctgatgaggctgacctgacctgctctgggatccgctgtgtgcgtcacgcttgcctgaaacatgaacagaatcggcaagacctggtgaaagctggcgtgctgcctctgctgactggtgccatcacccatcatggccaccacactgacgtggtcagggaagcctgctgggccctgcgtgtcatgaccttcgatgacgacatccgtgtgccctttggccatgcccacaaccatgccaagatgattgtgcaggagaacaaaggcttgaaggtgctcatcgaagccaccaaagcgttcctggataaccctggcatcctgagcgagctctgtggaaccctgtcccgcctggccattcgcaacgagttctgccaggaggtcgtcgacctcgggggcctgagcattctggtgtccctgctagccgactgcaatgaccaccagatgagggaccagagcggcgttcaggagctcgtgaagcaagtgctgagcaccctgcgagccatcgcaggcaacgacgacgtgaaagatgctattgtccgtgctggtgggacggagtccatcgtggctgctatgacccagcatctgaccagcccccaggtgtgtgagcagagctgcgcggccctgtgcttcctggccctgcgtaagcccgacaacagccgcatcatcgtggagggtggcggggctgtggcagcactgcaggccatgaaggcacacccgcagaaggccggcgtgcagaaacaggcttgcatgctgatccgaaacctggtggcccacggccaggccttctcgaagcccatcctggacctgggggctgaggcactcatcatgcaggcccgatctgcccaccgtgactgtgaggacgtggccaaggccgccctgcgggacctgggttgtcatgtcgagctccgagagctgtggacaggccagaggggcaacctggcgccatgaccccaggcccagtctgggccgtgactctgggtgagtcgtgtgactcaggaatgggggtagatccatgtcctccactgtcccccattagttctgtccccttcacaatgagaagtgttttctggcaggccctaggtaaagggtcgggggaggggggagccttgtagggaggcctctacacagaagaaagcagcccccatgtcccagccacttctgggtcccagccagcagcacggatgttactgtcctgctccttcccccagccccacgccctaccagagggggcaaagggcacgtcccatcactcactgccctgtctgaaatgtggcagccactgtgggccaggctcagggcagggcaggcgattccagtggggttgggccccctggcgcctgctgcttactgcagtttcatgcaggcctctgctccttgtctttcttacctgtaaaatgggtctcagatgctccgccctgcttggccccagcttgtctgtctctgggtcctgggccagccaggatacctgataataaaagatcattgggtgaacagcggaaaaaaaaaaaaaaaaaa

SEQ ID NO: 5810 - DNA, 1074 bp, Homo Sapiens
  NM_033416
tggaagcggcactcaagatgctgcgccgcgaggcccgcctgcgccgcgagtacctgtaccgcaaggcccgggaggaggcgcagcgctcagcccaggagaggaaggagcggctgcggcgcgcgctggaagaaaaccgcctgattcccactgagttacgccgagaggctctggccttacaggggtccctggagtttgatgatgctggaggtgaaggtgtgaccagccacgtggatgatgaataccgatgggcaggagtcgaggatcccaaggttatgatcactacctcccgagaccccagttcccgcctcaagatgtttgcaaaggagctgaagctggtgttcccgggcgcccagcgaatgaaccgaggtcgacatgaagtgggggcactggtgcgagcctgcaaagccaacggcgtcaccgatctgctggtcgttcacgagcatcggggcacacctgtggggctcatcgtcagccacctgccctttggtcctactgcctacttcacgctgtgcaatgtggtcatgcggcatgacatcccagacctgggcaccatgtcggaggccaagccccacctcatcacacacggcttctcctcccgcctgggcaagcgggtctctgacatcctccgatacctatttcccgtgcccaaagatgacagccaccgggtcatcaccttcgcaaaccaggacgactacatatcattccggcaccatgtgtataagaagacagaccaccgcaacgtggagctcactgaggtcgggccccgctttgagctgaagctgtacatgatccgtctgggcacgctggagcaggaggccacagcagacgtggagtggcgctggcacccttacaccaataccgcacgcaagagagtcttcctgagcaccgagtgagcacactcaccactcagtcaggacatggacttggaactcaggatggggctgtcatagacagacccaccagtaggaactgtcacagaatggcctgctgaactgggatgtggaactgtggcgggtggagaggtctgaataaaccgtctgtgtcatggcaaaaaaaaaaaaaaaaaaaaaaaaa

SEQ ID NO: 5811 - DNA, 1468 bp, Homo Sapiens
  NM_033417
gcctcgcagccacccctcctgcgtctccacaaatggtccgacccgcaagcaagggggcgggtccggctttgaaaagccggcgggtcgggccttgaggtggaaggcgggaaaatggcggattcctcggggcgaggcgctgggaagcctgcaaccggccccacaaattctagcagtgccaagaagaaggataaaagagttcaaggtggaagagtgattgagtcccggtatctgcagtatgaaaagaagacaacccaaaaggctcctgcaggagatgggtcacagacccgagggaagatgtctgaaggtggaaggaaatccagcctgctccagaaaagcaaagcagatagcagtggggtcggaaagggtgacctgcagtccacgttgctggaagggcatggcacagctccacctgacctggatctctctgctattaatgacaaaagcatcgtcaaaaagacgccacagttagcaaaaacaatatcaaagaaacctgagtcaacatcattttctgcccctcggaaaaagagcccggatttatctgaagcaatggaaatgatggagtctcagacactactgctgacgctactatccgtaaagatggagaacaatcttgctgagtttgaaagaagggcagaaaagaatttattaataatgtgtaaggagaaggagaagctacagaaaaaggcccacgagctgaagcgcaggcttctcctctctcagaggaagcgggagctggcagatgtcctggatgcccagatcgagatgctcagccccttcgaggcagtggccacacgcttcaaggagcaatacaggacattcgccacggccctggacactaccaggcacgagctgcccgtgaggtccatccacctggagggagatgggcagcagctcttagacgccctgcagcatgaactggtgaccactcagcgcctcctgggagaacttgatgttggtgattcggaagaaaatgtgcaggtgctggacttactgagcgaactcaaggacgtgacggcgaaaaaggaccttgagctccgaaggagctttgcccaggtgctggaactctccgcagaggcaagcaaagaggcagccttggcaaaccaggaagtctgggaagagacccagggcatggcgccccccagccggtggtatttcaatcaagacagtgcctgcagagaatctgggggagcacccaagaacacgcccctgtctgaggacgacaacccgggtgcctcgtcagcccccgctcaggccacgttcatcagcccaagcgaagatttttcttcaagcagccaggcagaagtcccgccctctctctctcgttcagggagggacttgtcatgactcatggttacattcaggatacttgagcactttatatactaccgtagcactgtagctattttttatgtgataatcttgtttgataaaaaagtaaacctgttttgcaattgaaaaaaaaaaaaaa

SEQ ID NO: 5812 - DNA, 2708 bp, Homo Sapiens
  NM_033419
atactcctaagctcctcccccggcggcgagccagggagaaaggatggccggcctggcggcgcggttggtcctgctagctggggcagcggcgctggcgagcggctcccagggcgaccgtgagccggtgtaccgcgactgcgtactgcagtgcgaagagcagaactgctctgggggcgctctgaatcacttccgctcccgccagccaatctacatgagtctagcaggctggacctgtcgggacgactgtaagtatgagtgtatgtgggtcaccgttgggctctacctccaggaaggtcacaaagtgcctcagttccatggcaagtggcccttctcccggttcctgttctttcaagagccggcatcggccgtggcctcgtttctcaatggcctggccagcctggtgatgctctgccgctaccgcaccttcgtgccagcctcctcccccatgtaccacacctgtgtggccttcgcctgggtgtccctcaatgcatggttctggtccacagttttccacaccagggacactgacctcacagagaaaatggactacttctgtgcctccactgtcatcctacactcaatctacctgtgctgcgtcaggaccgtggggctgcagcacccagctgtggtcagtgccttccgggctctcctgctgctcatgctgaccgtgcacgtctcctacctgagcctcatccgcttcgactatggctacaacctggtggccaacgtggctattggcctggtcaacgtggtgtggtggctggcctggtgcctgtggaaccagcggcggctgcctcacgtgcgcaagtgcgtggtggtggtcttgctgctgcaggggctgtccctgctcgagctgcttgacttcccaccgctcttctgggtcctggatgcccatgccatctggcacatcagcaccatccctgtccacgtcctctttttcagctttctggaagatgacagcctgtacctgctgaaggaatcagaggacaagttcaagctggactgaagaccttggagcgagtctgccccagtggggatcctgcccccgccctgctggcctcccttctcccctcaacccttgagatgattttctcttttcaacttcttgaacttggacatgaaggatgtgggcccagaatcatgtggccagcccaccccctgttggccctcaccagccttggagtctgttctagggaaggcctcccagcatctgggactcgagagtgggcagcccctctacctcctggagctgaactggggtggaactgagtgtgctcttagctctaccgggaggacagctgcctgtttcctccccatcagcctcctccccacatccccagctgcctggctgggtcctgaagccctctgtctacctgggagaccagggaccacaggccttagggatacagggggtccccttctgttaccaccccccaccctcctccaggacaccactaggtggtgctggatgcttgttctttggccagccaaggttcacggcgattctccccatgggatcttgagggaccaagctgctgggattgggaaggagtttcaccctgaccattgccctagccaggttcccaggaggcctcaccatactccctttcagggccagggctccagcaagcccagggcaaggatcctgtgctgctgtctggttgagagcctgccaccgtgtgtcgggagtgtgggccaggctgagtgcataggtgacagggccgtgagcatgggcctgggtgtgtgtgagctcaggcctaggtgcgcagtgtggagacgggtgttgtcggggaagaggtgtggcttcaaagtgtgtgtgtgcagggggtgggtgtgttagcgtgggttaggggaacgtgtgtgcgcgtgctggtgggcatgtgagatgagtgactgccggtgaatgtgtccacagttgagaggttggagcaggatgagggaatcctgtcaccatcaataatcacttgtggagcgccagctctgcccaaggcgccacctgggcggacagccaggagctctccatggccaggctgcctgtgtgcatgttccctgtctggtgcccctttgcccgcctcctgcaaacctcacagggtccccacacaacagtgccctccagaagcagcccctcggaggcagaggaaggaaaatggggatggctggggctctctccatcctccttttctccttgccttcgcatggctggccttcccctccaaaacctccattcccctgctgccagcccctttgccatagcctgattttggggaggaggaaggggcgatttgagggagaaggggagaaagcttatggctgggtctggtttcttcccttcccagagggtcttactgttccagggtggccccagggcaggcaggggccacactatgcctgcgccctggtaaaggtgacccctgccatttaccagcagccctggcatgttcctgccccacaggaatagaatggagggagctccagaaactttccatcccaaaggcagtctccgtggttgaagcagactggatttttgctctgcccctgaccccttgtccctctttgagggaggggagctatgctaggactccaacctcagggactcgggtggcctgcgctagcttcttttgatactgaaaacttttaaggtgggagggtggcaagggatgtgcttaataaatcaattccaagcctcaaaaaaaaaaaaaaaaaaaaaa

SEQ ID NO: 5813 - DNA, 1046 bp, Homo Sapiens
  NM_033423
ggagtcaacaccaacagctctgacctgggcagccttcctgagaaaatgcagccattcctcctcctgttggcctttcttctgacccctggggctgggacagaggagatcatcgggggccatgaggccaagccccactcccgcccctacatggcctttgttcagtttctgcaagagaagagtcggaagaggtgtggcggcatcctagtgagaaaggactttgtgctgacagctgctcactgccagggaagctccataaatgtcaccttgggggcccacaatatcaaggaacaggagcggacccagcagtttatccctgtgaaaagacccatcccccatccagcctataatcctaagaacttctccaacgacatcatgctactgcagctggagagaaaggccaagtggaccacagctgtgcggcctctcaggctacctagcagcaaggcccaggtgaagccagggcagctgtgcagtgtggctggctggggttatgtctcaatgagcactttagcaaccacactgcaggaagtgttgctgacagtgcagaaggactgccagtgtgaacgtctcttccatggcaattacagcagagccactgagatttgtgtgggggatccaaagaagacacagaccggtttcaagggggactccggggggcccctcgtgtgtaaggacgtagcccaaggtattctctcctatggaaacaaaaaagggacacctccaggagtctacatcaaggtctcacacttcctgccctggataaagagaacaatgaagcgcctctaacagcaggcatgagactaaccttcctctgggcctgaccatctctgggacagaggcaagaatccccaaggggtgggcagtcagggttgcaggactgtaataaatggatctctggtgtagaaaaaaaaaaaaaaaaaaaaaaaaaaaaaaaaaaaaaaaaaaaaaaaaaaaaaaaaaaaaaaaaaaaaaaaaaaaaaaaaaaaaaaaaaaaaaaaaaaaaaaaaaaaaaaaaaaaaaaaaaaaaaaaaaaaaaaaaaaaaaaa

SEQ ID NO: 5814 - DNA, 4397 bp, Homo Sapiens
  NM_033426
gggcgggaggctgtggggatagcgagacacccagcgacgacgaggttgtcatggtgccgcggggccgtgctcgcgcatgcgccacctgacccacaggccggtcgtggagctgcgaccccggccctagggcagtccagatgaaaagagtaccaatgaatctgcctccagctgaataaaccatggagaggaaaaacccatccagagagagccccagaagactctctgccaaagtaggcaaaggcacagagatgaagaaagtggctcgtcagcttgggatggctgctgctgagtcagacaaggactctggcttttcagatgggagctcggaatgtctgagctctgcagagcagatggagtccgaggacatgctgagcgccttaggctggagcagagaagacaggccgaggcagaactccaaaactgcaaagaatgccttccctaccctgtctcccatggtcgtcatgaagaatgtgcttgtcaaacagggcagcagctcatcccagctccagtcgtggactgtccagccctcctttgaagtgatctcagcacagccacagctcttattccttcatccacctgtaccatctcctgtcagtccatgtcacactggtgagaaaaagtccgactccaggaactacttgcccattctgaattcttacaccaaaatagccccacatccaggcaaaaggggcctttcccttggcccagaagaaaaaggaacaagtggagtgcagaagaaaatctgtactgagagacttgggcctagcttgtcttccagtgagccaaccaaggctggtgctgtcccatccagtccctcgacgccagcaccacccagcgccaaacttgccgaggactcagctctgcagggtgtgccctctctggtggcaggtggaagtccacagactcttcagccggtatccagcagtcacgtggctaaagctcccagtctgaccttcgcttcccccgccagtcctgtctgcgcatcagacagcactctccatgggttagagagcaactctcccctttcaccactgtccgctaattatagctcacctttatgggctgcagagcacctctgccgcagcccagatatcttttcagagcagcggcagagcaaacataggcgctttcagaataccctagtagtcctacataaatctggtttgctggagatcactttgaaaaccaaggagttgattcgtcagaatcaggcaactcaggtagaactagaccagctaaaggagcaaacccagctgtttatagaagccaccaagagcagggcccctcaggcttgggccaagctgcaggcatctttaacacctgggtccagtaatacaggcagtgacctagaagcattctctgatcacccagccatatagcacagaggcatattttcctgttacttgagtggttcttttagctcatttgctgttacctactcctgtttcccaaagcttatgtaagagcttttccttctaaacttaaactgtgttgtggttcacttaggaagccacgtgccaatacctggctgctgtcttaactcgtagtctgggcacaggatacatatgtccccgtcccactgaggacctcagtttgggagtgcccttgagccccttttccttagcctgcaggtgcttcaatggatcatggggcaaagcaggagatgattgtgtggggctcttcctgctgtcacctcccatcatcccactctctcaccaggatcaagggtacagtaacacgaatgagcatacagagcaacgcctgttgagccagggagtaggtgacacaaggaaaccttcatggatcttcccttgcctgtcttagtcacagagagaaataagaggaggttgtttgcatcccacaaggcatcgtactagttgggcgagacctaaaattccctgggcacaggttgcacctgggtgtgagcacttaatcactcaacgctttgttttcttacacttgaaaatcaagggaaagagtagtaccatctgactcctacactttcattacaagtcagatttttcttaaactagcaggcaaaaacagtacttccaaattttaaggtatggaatgaatgcagtacatctggaattgtagtcgatgaattgcttttttgacttagaagctgaagaaaatagacatagccggcatatctcatggtcaggagctggacgattctggtaacttaggctttttttctctcttcttttgaaacagtgtaacctgttttatgtctaaaaatcttaaggatagtttcagtggttcctgggatgtagtataagttaactctgctgccatcttgttttttttttttttcctttattttgataagtgattattatgcttgataaactttgaattaaatacagttgtcttgagggtatgataagtccacaaaaaattggaaagcatcttacccattttcttcacatcccaaatttttatttgttccatgtcatagtgatgggaagcagttacagagcagcgtcttctgtgtttccttcatgtgttagatattggcaacaaagccagaggtgtaatgttggttatatgaagttcatctcaaaatggagaccatgaccagagtttccagatgatacacgttcttttcagcttcattaaataggcaactatgtttctaaatagtaaagtttcaaaatattctctcaatttaaaatttcatcctcttgaaaatctttgttctttacaaaattatcttaataagttctatatggtcagcttcatcttccttttttttttttttgagatggagtttcgctcttgttgcccaggcggagtacaatggtgggatctcggctcactgcaacctccgcctcctgggttcaagtgattctcctgccacagcctcccaagtagctgggattacaggtgcctgccaccatgcccagctaatttttgtatttttagtagaaatggggttttaccgtgttggccaggctggtctcgaactcctgacctcagttgatccgcctgcctcagcctcccaaagtgctgggcttacaggcctgagccaccacgctcagctcagcttcaccctgtctgcaaagaaaagttttaccaagaccagaagttaaatatgacatttcctaggtagttgtaactctaacatagtttaaaaagtatgtggcttcagattgcctatactttgttcacaaacgtgtgatttagatatgactgatttagaagtgaacaacttggtaacatccctagactccactcatgaacgcagaattattacctgctgtttgctttctgaaagaatttcagaaatcagagcaaatgtgtctttaggcagattcagctccttttaatatttttctcttggcccactctctttgcttcccctgaatctgtgtggtactatagcagctctactctgtgcaccatgctaggaagcttcctttttggcagaatatgtttggcagcaaagctatagagacaggtgcattcagaacatcctgggcaccagtcatgagtcttactgtgtcaaaaatctgaaaacacttgctgagaaccaaatttattccattggaaaaaccctctgtggagctataagcctcttggactcttcttcctagattaaggcttgcatttccctccctgtttcagtaaaagatgatgaaagccactatcaatcctcactgctgagtggcagggagaagcagcaccactctcagctcttttctaatcttgtaacttagtgctagaagtctctccaggctattaccatgggcatttgttctctgttggagctgtaagcagatgaacccaagtagagaagatagatcttggaaggagagatccattgagtccagaagccagatcagcaaatggaggaacctcggaggtgaccagaaagatctccatcggttgcccaaggctgtaagtagtgatggttttagcgatgaataacgtaattggctatgaagtactgtggcagagctgctgttttctgaaggtgagaagccatttttagctcagagcaacccttaagagaacttttggcagattttgttggcattattgaaatatatatagaaaagttgctgattgcaatggttatgggaatggaatttaatgacatttgtaatttattacactcattggtttttattgattatagtattgtctgactttttattttctactatggttcctttagcagaaaagtaacttttgtgcatatattgaagtggtttttcagctatgaattctttagggtagaaatttatttagcaaatgtgaattcttttgagaaagtatgaagttttgcagaaattgactgtgaaatgtcagagaaaaataaaagtcacttacttgaaacctaaaaaaaaaaaaaaaaaaaaaaaaaaaaaaaaaaaaaaaaaaaaaaaaaa

SEQ ID NO: 5815 - DNA, 2487 bp, Homo Sapiens
  NM_033428
ttccggtgcgtcgtttacgccagtttgaaccaaagacgcccaaggttgaggccgagttccagagcatggggtctcggttgtcccagccttttgagtcctatatcactgcgcctcccggtaccgccgccgcgcccgccaaacctgcgcccccagctacacccggagcgccgacctccccagcagaacaccgcctgttgaagacctgctggagctgtcgcgtgctttctgggttggggctgatgggggcgggcgggtacgtgtactgggtggcacggaagcccatgaagatgggataccccccgagtccatggaccattacgcagatggtcatcggcctcagcattgccacctggggtatcgttgtcatggcagaccccaaagggaaggcctaccgcgttgtttgaaagtaccaccagtgaatctgtcttctgtctctgtccctttccccgtgacacacagagcaggcatggaatttaatgggtgttctggacagacacttgtacatggacagacatcactactgtggatactacaagactgaaaagaaaatcgtatgttgtcattctctggctatggagtgtttgtggccttcacagatttcacaggaaccaataaatccctcagagaagtaaacaggttctttgtcttatctggggaaggaaagtataacttatatttaaatataattgcttaattaagcattatatataaacataatagtatgtcttatataattgcatgtcatattatatataataaacataaatatgtttagttatatagttagtataatttttaaaacttttaaatacagcatatggtaaaccaacgggaaaattagctattttacttcattattttaaagagttctttttatttctttcataattggatcaacaactgttaacctaaccctgggtgggcatcatgcaatatatagaagtacgtgaaattttctgtgtatgaattgctgatactttgcaaggcattttcaaatccatcaccttatgagagcttcacagctagtctgaggtagttacttcattggaggtaaaacttaaaacacaagaaagagcccacatgatttgcctagggtcattcagtaagtccgtgatggagctagaacttgttcttgtcagttttttgttctagtcttccctttcatggaggcaagaataaccattatgaaacagttagataatcataaaaatcagcatacaataaaagacttaaatgtcacaagaaaaattcaaaacctttagctaaaaaaaaaaaagatcttttgattctttttccacaagcactagatatgtttctgtgatgattttgagataagtactcaaaattacatagttcatttctaagagaaggccatgttttctacctattgggtttttctaccctgagatactatggcttctttgtaaaggtatataaagtgtttttcaaagcggaaagatactgttaaattcagctgctaatcatagtgtatttgtttggaatgacatgttgagcaggtagtacctttacggctgttgctttttgcagcattatgtggaagtgcctaagtctatttagcctcacagatgactttagaatcttgtattttctacatcagagttcatagcggggatggtgctacatatatctatgcaactgaaaaagaaaacatttcaaacctaaagtacgcaacaagatattatttatatgaaatccatagctcagttatgctatgttcatgaatagagaagttttaagttggaagggaccatggatgacccaaagcagatacatatggtcattcatatacctaaaatacctacaaagacaagttgttccctggtttaaaaggcagtctgttctattgatggactgctttagtccctgaacattttctttggttaaaccaaaaacacataaacctaacttggtcttggcttgatctactgggtaaataataactcttaaatatatatacagttgacccttggacaacacaggagttaagagcgctgaacatttgctcagtggagaatctgcatataacctgactcctcaaaaacttaattagtagttagtttacaattgactggaagccttattgataacataaagcagttgattaacacattttttgtgttgtatgtattatattccgtattcttacaagaaggtaagctagagaaaaaaaaaatgttattaaggaagtaatatattcactattcgttaggtagaagtgaatcatcctaaaggtcttcatcctcatcttcacgctgagtagtctgaggagcaagaggagttggtctttctgtcccagtggcagaggtggaagaaaatccacagatacgtggacctgcgcagttcaaacctgtgttgtttgggtcaactgtattgtaatagcattttaatgtttttctcagacttttacgagtatgaatctgagctttttctgaataaacctgcctgctcaccattaataatgccaaa

SEQ ID NO: 5816 - DNA, 1206 bp, Homo Sapiens
  NM_033453
tacgcgccttggggtccgggtcggctttccccgggacccctggccggaaactgagccgttcacttccgccaccagccggaagttttctgtcactggacgccaaggagttttcggtggctcagctgggtaaccggggatcaccatggcggcctcattggtggggaagaagatcgtgtttgtaacggggaacgccaagaagctggaggaggtcgttcagattctaggagataagtttccatgcactttggtggcacagaaaattgacctgccggagtaccagggggagccggatgagatttccatacagaaatgtcaggaggcagttcgccaggtacaggggcccgtgctggttgaggacacttgtctgtgcttcaatgcccttggagggctccccggcccctacataaagtggtttctggagaagttaaagcctgaaggtctccaccagctcctggccgggttcgaggacaagtcagcctatgcgctctgcacgtttgcactcagcaccggggacccaagccagcccgtgcgcctgttcaggggccggacctcgggccggatcgtggcacccagaggctgccaggactttggctgggacccctgctttcagcctgatggatatgagcagacgtacgcagagatgcctaaggcggagaagaacgctgtctcccatcgcttccgggccctgctggagctgcaggagtactttggcagtttggcagcttgacttctgcagctggaggaggcccctcaggccggggatctggggagggctagcccaaaacctcccgcatcgggcaggcaccccctgaagtacttccttcagggtttcccctttgtgagggtgtcgagtagcctcaccggcctgtctggaggagcagctggctctgctctgagaaactctggcaagtggacgccattctcttgcccttaggattcactgctctctcctacagccgccaggcctggggtcctgaaaggaccttgggtggtaaagctgtacttggtgggagtgagggcgtggggaggaaccatgcaaatcgccttccatggtttttaaatgcagtaaataacatttctggatgagacttgtttccaaaataaaccagctatatctgttttgaaaaaaaaaaaaaaaaaaaaaaaaaaaaaaaaaaaaaaaaaaaaaaaaaaaaaaaaaaaaaaaaaaaaaaaaaaaaaaaaaaa

SEQ ID NO: 5817 - DNA, 4688 bp, Homo Sapiens
  NM_033480
gtccggggtctccagtagggctgacgctccggtgctcgcacaatcccccgcctcggctggcaacgggcgtccctccactccccgagtccccggcagccgccgccaccccagcgcgccccgatctggccccctgccccgcgaagatggctgccgtacgccgggcccgcagttattgccgctgcctggtgcgcttctccgaccgagaactctgctaagctccgctgcagagacaggcaggagtagacacccggacacccagcacccctcctccggggggcggtgcagagggggcacggagagcccctcgagcgcagcaggccgccccgccagcatggcagaagctgaggaagattgtcattctgatactgtcagagcagatgatgatgaagaaaatgaaagtcctgctgaaacagatctgcaggcacaactccagatgttccgagctcagtggatgtttgaacttgctccaggtgtaagctctagcaatttagaaaatcgaccttgcagagcagcaagaggctctctccagaaaacatcggcagataccaaaggaaaacaagaacaggcaaaagaagaaaaggctcgagaactcttcctaaaagcagtagaagaagaacaaaatggagctctctatgaagccatcaagttttatcgtagggctatgcaacttgtacctgatatagagttcaagattacttatacccggtctccagatggtgatggcgttggaaacagctacattgaagataatgatgatgacagcaaaatggcagatctcttgtcctacttccagcagcaactcacatttcaggagtctgtgcttaaactgtgtcagcctgagcttgagagcagtcagattcacatatcagtgctgccaatggaggtcctgatgtacatcttccgatgggtggtgtctagtgacttggacctcagatcattggagcagttgtcgctggtgtgcagaggattctacatctgtgccagagaccctgaaatatggcgtctggcctgcttgaaagtttggggcagaagctgtattaaacttgttccgtacacgtcctggagagagatgtttttagaacggcctcgtgttcggtttgatggcgtgtatatcagtaaaaccacatatattcgtcaaggggaacagtctcttgatggtttctatagagcctggcaccaagtggaatattacaggtacataagattctttcctgatggccatgtgatgatgttgacaacccctgaagagcctcagtccattgttccacgtttaagaactaggaataccaggactgatgcaattctactgggtcactatcgcttgtcacaagacacagacaatcagaccaaagtatttgctgtaataactaagaaaaaagaagaaaaaccacttgactataaatacagatattttcgtcgtgtccctgtacaagaagcagatcagagttttcatgtggggctacagctatgttccagtggtcaccagaggttcaacaaactcatctggatacatcattcttgtcacattacttacaaatcaactggtgagactgcagtcagtgcttttgagattgacaagatgtacacccccttgttcttcgccagagtaaggagctacacagctttctcagaaaggcctctgtagagcctcaagtccagtcctctatcacttttgcatgaattaaagtatatagcgcaaaagagcacctaagttataaatgtgtgtgtgtgcgtgtgtgtgtatatatatatatatatatatatatatatatatatatatatatatatatggaattggaacttattttaaattgttggagttcttttaagaagaatataaattgattattttttttatttaaagggatagttgattcctggggtgttttgaaattaagttggaattaagttgcttaagcatatttatgttgtgagaaaccttaatatgaggtttatcatgccctttttcaagcagatttatgagcagatttctgtcacataagtcgtcttctgcttgagtatcctaatatttcaatgcatcaggggagcgctccactggataagcattttatttcccgcatggcataatgtttttgcactaaaggctcaaagtgtgagaacctgttctggatttgtttgaaattatttcaccaataaagatcataaataaatgtttctttcaagaaaatatatttggatggcctttttaaagtaacaggatatttaataagagtcctagatagccagcggagactttaagaatcattgcctctagctgggtgtggtggcatgcacctgtagtcccagctatttgggaggctgatgcaggagaatagcttaagcccaggaatttgagtctgggagtttgagtccagcatgggcaacataacaagaccccatcccttattaaaagaaaaaaaaataattcctcatttcatcattggtctttatatgtagccacaaacactgacctcatgtaggcaccttaccaatatatgacattaagtgagagtgaatcccttaggactggaacacttcaagctcaaccaactgactcagttgtcattcttcacaaaagaatagtagaggatcatgtaaacctgagcctaactcttgttccagtatgaaagttgggggagagcaccagccacctaggaaaactgtatgttacctttttactcaaaggagtcccccctgcccagtaacagtcctattagtgtttaatttcagagtttgtgtctggtagacctctacctgattcagatttggttttgttgtttcaaccatagttagagacaaattctcatgtactttcagaaatcaatatctgcagccactgttacttttaattgacattaagagacacttcataggttcccacaattcagtatgggataggctttttaaaaagcacatacagaccaggcgtggtggctcatgcctataatcccagcactttgggaggctaagacaggcagatcacctgagctcaggagtccaagaccagcctgggcaacatggcaaaacaccgtctctacaaaaaaaaaaaaaaaaaaaattagccaagtacagtggggcacacctatagtcgcagctacttgggaggctggggcaggagaattgcctgagcctgggaagtggaagttgcagtgagccaagatcgtgccattccactccagcctgagcaacacagtgagaccctatctcaaaaaaataatgatgatagtacacgttatgttaaaggtgaaatgtgcatacagaaggaagagagttggccaggtgtggtgactcacacctataatcccaatactttgggaggccaaggcaggaggattgcttgaggtcaggagttttagaccagcctggacaacatagcaagacctcatctcttctaaaaattaaaaaaaaaaaaaataggcatggtggtacacacctgtggtcccagctagttgggaggctaaggcaggaggatcacttagccaggaggctgaggctacagtgagccaagattgcaccactgtgctccagcctgggtgagaaagcgagaccctgtctcaaaaaagaaaaaaaagagaggttggccttttgtagcaatctgagaagtgtgtttttcaagttggaaaggaaggagaaaagcaacttgcctaagataaggtagctcttcatgatatgactgttatttctgatatacaaataaatagaacatgattaggacatagtcaaatatagctagaaaaatatattcctaaggaaagtgagatttgaggagtccctgttgttctgcaacatccctagattgaatgatctgttgcagatggtggataccaagttcaaatttaaagatttctttgtaagcagtaaagtgactttcacttatttaacttagaactggaaaaagtaacttttttccagattacattttctgtatatttgtaaaatgcaaaagcaatatatatttgttgtgagaaaattagaatatacagataaaataaaatttaaaaaaacacccaaagataaccagaagaaaatttttgctatgtaacctttttcttctggtctttgcaaatcctgccgtagaaactttttaacttcaggagtgtccttcctttgctctattaggacattacagaaaccaatactatgaaaagctgacagcagtatctggattaactttttaaaaacaatgaaagcattttacagaaattacatttcagatcgtgctggaactgtgttcagaagatatcctcagagggaatctggcctgagcaccatcatgtttaattgcctcctcctgtcttgcattttcctcccagcccccttcctaccccttagcagagggccaggtgagggtgcttggggcccatgggggctgggagtgtagacttcagttacacccccagcccccaggggaaagcattagccttgaatcctcaatcccaggccctctactaaccactctcaacctatggtatttatcttttgattattctgtgcatctataaaaatgggattatattgtacagaatgctttgtaagctttctctccccacataagaatgccctgtaagcattttgttaaatatttttaatgactttagagtccaactttatactcctctttacgcattttggttttctaatttaatggtagtgtaaacgtttttggaataaacattcctgtggctaaa

SEQ ID NO: 5818 - DNA, 3614 bp, Homo Sapiens
  NM_033496
cctggctcaaaactctaccacaacctgacactgggcaagatggcccacctgtggcatcccaggttcctgccctgtaaagaggagtctgggtgtatatccagatggactgtgagcacagcctgagtttgccctgtcgaggtgctgaggcctgggagattgggattgacaagtatctctatgccatgcggctctccgatgaaactctcatagatatcatgactcgcttcaggaaggagatgaagaatggcctctcccgggattttaatccaacagccacagtcaagatgttgccaacattcgtaaggtccattcctgatggctctgaaaagggagatttcattgccctggatcttggtgggtcttcctttcgaattctgcgggtgcaagtgaatcatgagaaaaaccagaatgttcacatggagtccgaggtttatgacaccccagagaacatcgtgcacggcagtggaagccagctttttgatcatgttgctgagtgcctgggagatttcatggagaaaaggaagatcaaggacaagaagttacctgtgggattcacgttttcttttccttgccaacaatccaaaatagatgaggccatcctgatcacctggacaaagcgatttaaagcgagcggagtggaaggagcagatgtggtcaaactgcttaacaaagccatcaaaaagcgaggggactatgatgccaacatcgtagctgtggtgaatgacacagtgggcaccatgatgacctgtggctatgacgaccagcactgtgaagtcggcctgatcatcggcactggcaccaatgcttgctacatggaggaactgaggcacattgatctggtggaaggagacgaggggaggatgtgtatcaatacagaatggggagcctttggagacgatggatcattagaagacatccggacagagtttgacagggagatagaccggggatccctcaaccctggaaaacagctgtttgagaagatggtcagtggcatgtacttgggagagctggttcgactgatcctagtcaagatggccaaggagggcctcttatttgaagggcggatcaccccggagctgctcacccgagggaagtttaacaccagtgatgtgtcagccatcgaaaagaataaggaaggcctccacaatgccaaagaaatcctgacccgcctgggagtggagccgtccgatgatgactgtgtctcagtccagcacgtttgcaccattgtctcatttcgctcagccaacttggtggctgccacactgggcgccatcttgaaccgcctgcgtgataacaagggcacacccaggctgcggaccacggttggtgtcgacggatctctttacaagacgcacccacagtattcccggcgtttccacaagactctaaggcgcttggtgccagactccgatgtgcgcttcctcctctcggagagtggcagcggcaagggggctgccatggtgacggcggtggcctaccgcttggccgagcagcaccggcagatagaggagaccctggctcatttccacctcaccaaggacatgctgctggaggtgaagaagaggatgcgggccgagatggagctggggctgaggaagcagacgcacaacaatgccgtggttaagatgctgccctccttcgtccggagaactcccgacgggaccgagaatggtgacttcttggccctggatcttggaggaaccaatttccgtgtgctgctggtgaaaatccgtagtgggaaaaagagaacggtggaaatgcacaacaagatctacgccattcctattgaaatcatgcagggcactggggaagagctgtttgatcacattgtctcctgcatctctgacttcttggactacatggggatcaaaggccccaggatgcctctgggcttcacgttctcatttccctgccagcagacgagtctggacgcgggaatcttgatcacgtggacaaagggttttaaggcaacagactgcgtgggccacgatgtagtcaccttactaagggatgcgataaaaaggagagaggaatttgacctggacgtggtggctgtggtcaacgacacagtgggcaccatgatgacctgtgcttatgaggagcccacctgtgaggttggactcattgttgggaccggcagcaatgcctgctacatggaggagatgaagaacgtggagatggtggagggggaccaggggcagatgtgcatcaacatggagtggggggcctttggggacaacgggtgtctggatgatatcaggacacactacgacagactggtggacgaatattccctaaatgctgggaaacaaaggtatgagaagatgatcagtggtatgtacctgggtgaaatcgtccgcaacatcttaatcgacttcaccaagaagggattcctcttccgagggcagatctctgagacgctgaagacccggggcatctttgagaccaagtttctctctcagatcgagagtgaccgattagcactgctccaggtccgggctatcctccagcagctaggtctgaatagcacctgcgatgacagtatcctcgtcaagacagtgtgcggggtggtgtccaggagggccgcacagctgtgtggcgcaggcatggctgcggttgtggataagatccgcgagaacagaggactggaccgtctgaatgtgactgtgggagtggacgggacactctacaagcttcatccacacttctccagaatcatgcaccagacggtgaaggaactgtcaccaaaatgtaacgtgtccttcctcctgtctgaggatggcagcggcaagggggccgccctcatcacggccgtgggcgtgcggttacgcacagaggcaagcagctaagagtccgggatccccagcctactgcctctccagcacttctctcttcaagcggcgaccccctaccctcccagcgagttgcgctgggagacgctggcgccagggcctgccggcgcggggaggaaagcaaaatccaactaatggtatatattgtagggtacagaatagagcgtgtgctgttgataatatctctcacccggatccctcctcacttgccctgccactttgcatggtttgattttgacctggtcccccacgtgtgaagtgtagtggcatccatttctaatgtatgcattcatccaacagagttatttattggctggagatggaaaatcacaccacctgacaggccttctgggcctccaaagcccatccttggggttccccctccctgtgtgaaatgtattatcaccagcagacactgccgggcctccctcccgggggcactgcctgaaggcgagtgtgggcatagcattagctgcttcctcccctcctggcacccactgtggcctggcatcgcatcgtggtgtgtcaatgccacaaaatcgtgtgtccgtggaaccagtcctagccgcgtgtgacagtcttgcattctgtttgtctcgtggggggaggtggacagtcctgcggaaatgtgtcttgtctccatttggataaaaggaaccaaccaacaaacaatgccatcactggaatttcccaccgctttgtgagccgtgtcgtatgacctagtaaactttgtaccaattcaaaaaaaaaaaaaaaaaa

SEQ ID NO: 5819 - DNA, 3979 bp, Homo Sapiens
  NM_033500
aaaacatctatcttgctgtgtttggacaggccagcccctgaaacatcttgggcaatggagggttaacttctcaaagtttaataggcaagaccagcaaccatgcaacaaggacttcaactaaccaactaaagaactgttccccagagcattgttcctgagaaggaaaagagtccaaacacctacccacacctgctttgtgccaagaatccacagttggattgcaaggacagtgtatgttgtccttttggaaaaatgagagtgagcccaaatgaagaacaagcaaaggcgttcaagacccagctgttgagagtagaaaagcagaagaaaggacccgaggtcagcaagtgccctccccacaatggggcagatctgccagcgagaatcggctacagcagctgaaaaaccaaaacttcatctacttgctgaaagtgagcattgttgatgctcttgagagcatcagccaggacattaatgtgcaccactgtggtggcgtggaaagatggcaaaaagagccctgcatgattttattgacaagtatctctatgccatgcggctctccgatgaaactctcatagatatcatgactcgcttcaggaaggagatgaagaatggcctctcccgggattttaatccaacagccacagtcaagatgttgccaacattcgtaaggtccattcctgatggctctgaaaagggagatttcattgccctggatcttggtgggtcttcctttcgaattctgcgggtgcaagtgaatcatgagaaaaaccagaatgttcacatggagtccgaggtttatgacaccccagagaacatcgtgcacggcagtggaagccagctttttgatcatgttgctgagtgcctgggagatttcatggagaaaaggaagatcaaggacaagaagttacctgtgggattcacgttttcttttccttgccaacaatccaaaatagatgaggccatcctgatcacctggacaaagcgatttaaagcgagcggagtggaaggagcagatgtggtcaaactgcttaacaaagccatcaaaaagcgaggggactatgatgccaacatcgtagctgtggtgaatgacacagtgggcaccatgatgacctgtggctatgacgaccagcactgtgaagtcggcctgatcatcggcactggcaccaatgcttgctacatggaggaactgaggcacattgatctggtggaaggagacgaggggaggatgtgtatcaatacagaatggggagcctttggagacgatggatcattagaagacatccggacagagtttgacagggagatagaccggggatccctcaaccctggaaaacagctgtttgagaagatggtcagtggcatgtacttgggagagctggttcgactgatcctagtcaagatggccaaggagggcctcttatttgaagggcggatcaccccggagctgctcacccgagggaagtttaacaccagtgatgtgtcagccatcgaaaagaataaggaaggcctccacaatgccaaagaaatcctgacccgcctgggagtggagccgtccgatgatgactgtgtctcagtccagcacgtttgcaccattgtctcatttcgctcagccaacttggtggctgccacactgggcgccatcttgaaccgcctgcgtgataacaagggcacacccaggctgcggaccacggttggtgtcgacggatctctttacaagacgcacccacagtattcccggcgtttccacaagactctaaggcgcttggtgccagactccgatgtgcgcttcctcctctcggagagtggcagcggcaagggggctgccatggtgacggcggtggcctaccgcttggccgagcagcaccggcagatagaggagaccctggctcatttccacctcaccaaggacatgctgctggaggtgaagaagaggatgcgggccgagatggagctggggctgaggaagcagacgcacaacaatgccgtggttaagatgctgccctccttcgtccggagaactcccgacgggaccgagaatggtgacttcttggccctggatcttggaggaaccaatttccgtgtgctgctggtgaaaatccgtagtgggaaaaagagaacggtggaaatgcacaacaagatctacgccattcctattgaaatcatgcagggcactggggaagagctgtttgatcacattgtctcctgcatctctgacttcttggactacatggggatcaaaggccccaggatgcctctgggcttcacgttctcatttccctgccagcagacgagtctggacgcgggaatcttgatcacgtggacaaagggttttaaggcaacagactgcgtgggccacgatgtagtcaccttactaagggatgcgataaaaaggagagaggaatttgacctggacgtggtggctgtggtcaacgacacagtgggcaccatgatgacctgtgcttatgaggagcccacctgtgaggttggactcattgttgggaccggcagcaatgcctgctacatggaggagatgaagaacgtggagatggtggagggggaccaggggcagatgtgcatcaacatggagtggggggcctttggggacaacgggtgtctggatgatatcaggacacactacgacagactggtggacgaatattccctaaatgctgggaaacaaaggtatgagaagatgatcagtggtatgtacctgggtgaaatcgtccgcaacatcttaatcgacttcaccaagaagggattcctcttccgagggcagatctctgagacgctgaagacccggggcatctttgagaccaagtttctctctcagatcgagagtgaccgattagcactgctccaggtccgggctatcctccagcagctaggtctgaatagcacctgcgatgacagtatcctcgtcaagacagtgtgcggggtggtgtccaggagggccgcacagctgtgtggcgcaggcatggctgcggttgtggataagatccgcgagaacagaggactggaccgtctgaatgtgactgtgggagtggacgggacactctacaagcttcatccacacttctccagaatcatgcaccagacggtgaaggaactgtcaccaaaatgtaacgtgtccttcctcctgtctgaggatggcagcggcaagggggccgccctcatcacggccgtgggcgtgcggttacgcacagaggcaagcagctaagagtccgggatccccagcctactgcctctccagcacttctctcttcaagcggcgaccccctaccctcccagcgagttgcgctgggagacgctggcgccagggcctgccggcgcggggaggaaagcaaaatccaactaatggtatatattgtagggtacagaatagagcgtgtgctgttgataatatctctcacccggatccctcctcacttgccctgccactttgcatggtttgattttgacctggtcccccacgtgtgaagtgtagtggcatccatttctaatgtatgcattcatccaacagagttatttattggctggagatggaaaatcacaccacctgacaggccttctgggcctccaaagcccatccttggggttccccctccctgtgtgaaatgtattatcaccagcagacactgccgggcctccctcccgggggcactgcctgaaggcgagtgtgggcatagcattagctgcttcctcccctcctggcacccactgtggcctggcatcgcatcgtggtgtgtcaatgccacaaaatcgtgtgtccgtggaaccagtcctagccgcgtgtgacagtcttgcattctgtttgtctcgtggggggaggtggacagtcctgcggaaatgtgtcttgtctccatttggataaaaggaaccaaccaacaaacaatgccatcactggaatttcccaccgctttgtgagccgtgtcgtatgacctagtaaactttgtaccaattcaaaaaaaaaaaaaaaaaa

SEQ ID NO: 5820 - DNA, 7580 bp, Homo Sapiens
  NM_033502
ggcgaggatggggagcaatgcaaagctctgctcgccccccatctcaccccccaagcggatactggtcttctcgtcggattgcccatgcacttgttgcagaaacagccaaggccctggctgtggagaatgctgaaggaagaagacgcagaagcaggacgaccctgaaagattcagcctcttcatcctcaaacaggaccaggcctcctcttcccacctgtccagcagcatgaaagcagcatgattggccgaccgcaggagaagcccccagaaccaggcccccaactcagccatctgcggaggtcaaggtgtgagcgacgtctcctcaccacagtgctgtgtggtctatacctcagccagggagaggatgtgaaaccccccgccctgcacatgagtggtacaggccaacaggaacacctggctccagccacgttcacagacatgtcagccgtggagtagtgctgacacttttctctcagcttctcagggtttcagtccttttgggtttgttttatttaccttttttatggttttgtggctggacgttcacaaccaaggcagacagcatgggtgaccagcaactgtacaagaccaaccatgtggcccatggtagtgagaaccttttctaccaacagccaccacttggcgtccacagcgggctgaaccacaactatgggaatgcagttacagggggcggaatggatgcccctcaggcctcgccaatctccccccacttccctcaagatacacgggatggtctgggcttgcctgttggctccaaaaaccttggccaaatggatacctcgaggcagggagggtggggaagtcatgcagggcctggaaaccatgtccagctacgtggaaacctggccaactcaaacatgatgtggggggcaccagcccaggctgagcccactgatggctaccaatacacctactcccaggccagcgagatccggacccagaagcttaccagcggtgtcttacacaagctggactctttcacccaggtgtttgccaaccaaaacctgcgaattcaggtcaacaatatggcccaggtgctgcacactcagtcagcagtgatggatggagcccctgacagtgctctccgccagctgctgtctcagaagcccatggagcccccagcaccggctatcccttcccgctaccagcaggtgccccagcagcctcaccctggtttcactggtgggctgtccaaaccagctcttcaggtcgggcagcaccctacccaagggcacctgtattatgactaccagcagcctctggctcaggtgccagtgcagggaggacagccactgcaggccccacagatgctgtcacagcacatgcaacagatgcagcagcaccagtattacccaccgcagcaacagcagcaagccgggcaacagcgtatctccatgcaagaaatacagacgcagccgcaacaaattcgcccatcacagccacagccgccgccacagcagcagcagccgcagcagctacagctgcagcagcggcagggttcaatgcagatacctcagtattatcagccccaacccatgatgcagcacttgcaagagcagcagcagcaacagatgcacctgcagcctccttcttatcacagggaccctcaccagtataccccagagcaggcacacactgtccagctgattcccctgggctccatgtcccagtactactaccaggagccccagcagccctacagccaccccctctaccagcagagccacctgtcccagcaccagcagcgtgaggacagtcagctgaagacctactctagtgacagacaggcccaggccatgctgagctcccatggggacctggggcctcctgacacaggaatgggagacccagcgagctcagatctgacccgggtcagcagcaccctcccccatcgccccctcctatcccccagtgggatccacctcaacaacatggggcctcagcatcagcagctgtctcccagtgccatgtggccccagatgcacctacctgatgggagagcccagccagggtcccctgagtcaagtggccaacccaaaggagcgtttggggagcagtttgatgccaagaacaagctgacatgctccatctgcctgaaggagttcaagaacctgcctgccctgaatggccacatgcggtcccacgggggaatgagggcctcccccaacctcaaacaggaggaaggagagaaggtcctgccgcctcagccccagccaccactgccgcctccgcctccgcctccgccgccaccacagctccctcccgaggcagaaagcctcacgcctatggtcatgcccgtgtctgtccctgtcaagcttctcccgcccaagcccagctctcaggggttcaccaacagcaccgttgccgccccctccgccagagacaagccagccagctcgatgtcggacgacgagatgcctgtgctcgaaatccccaggaagcatcagccgagtgtgcccaaagccgaggagcccctcaagaccgtgcaggagaagaaaaagttccggcaccggccggaacctctcttcatcccgccgccgccctcctacaacccgaaccccgctgcctcctactcgggcgccaccctgtaccagagccagctgcgctccccgcgcgtcctcggggaccacctgctcctggaccccacccacgagctgcccccttacacgcccccacccatgctgagcccggtgcgccagggctcggggctcttcagcaatgtcctcatctccggccacggccctggcgcccacccgcagctgcccctgacgcccctgacgcccacaccacgggtgctgctgtgtcgctccaacagcatcgatggcagcaacgtgacggtcaccccagggcctggagagcagactgtagatgttgaaccacgcatcaacattggcttgagattccaagcagaaatccctgaactccaagatatctctgccctggcccaggacacacacaaggccacactggtatggaagccctggccagaactagaaaaccatgacctccagcaaagagtggagaatcttctgaatttgtgctgttccagtgcattgccaggtggagggaccaattctgaatttgctttgcactctctgtttgaggccaaaggtgatgtgatggttgctctggaaatgctgctactgcggaagcctgtcaggttaaaatgtcatcctttagcaaattaccactatgccggttcggacaagtggacctccctagaaagaaaactgtttaacaaagcactagccacttacagcaaagactttatttttgtacagaagatggtgaagtccaagacggtggctcagtgcgtggagtactactacacgtggaaaaagatcatgcggctggggcggaaacaccggacacgcctggcagaaatcatcgacgattgtgtgacaagtgaagaagaagaagagttagaggaggaggaggaggaggacccggaagaagataggaaatccacaaaagaagaagagagtgaggtgccgaagtccccggagccaccacccgtccccgtcctggctcccacggaggggccgcccctgcaggccctgggccagccctcaggctccttcatctgtgaaatgcccaactgtggggctgtgttcagctcccgacaggcactgaatggccatgcccgcatccacgggggcaccaaccaggtgaccaaggcccgaggtgccatcccctctgggaagcagaagcctggtggcacccagagtgggtactgttcggtaaagagctcaccctctcacagcaccaccagcggcgagacagaccccaccaccatcttcccctgcaaggagtgtggcaaagtcttcttcaagatcaaaagccgaaatgcacacatgaaaactcacaggcagcaggaggaacaacagaggcaaaaggctcagaaggcggcttttgcagctgagatggcagccacgattgagaggactacggggcccgtgggggcgccggggctgctgcccctggaccagctgagtctgatcaaacccatcaaggatgtggacatcctcgacgacgacgtcgtccagcagttgggaggtgtcatggaagaggctgaagttgtggacaccgatcttctcttggatgatcaagattcagtcttgcttcagggtgacgcagaactataaagccctgtgtgtcacttagagacagtgaaaacccacggcctccatcttcattaatcaggaaacctggactgcctgcttgttttgtaacccttttaaactacctgttttaaaagtggtcattttattcaggtttagaaaaaaaaatcctatttcttttccttttatttaaaaaaatttgtttttgtggggggttgggggaataaataattggcacaactatctttaagaggtgtttcatctgggctaccttctcatgaaatcattcccagtagggactgaagctgaccttcatgttccattgcattcagatgtcaaccatcccggttgccttttatcccaaagcttgctgtgagtgtgtgtgtgtgagacgcaggcgaccctcttagtactggggtcttggggccaacttttcccatcaagcgttactttgattctgttctgacctcattccatagtttgcagtgagcatggcatctttgcctggagatactatgctaggggcagctttccaggggcaaagcaagccctcgtgttacacggctctcctccagctcacacgacatgtgaggagatgaccaaatgtgaaaacaggtttcccctgtgttgcccgtcatcctttggcccgttcacaggaatggagtactgtataattttaggctttcattcccagcagtgtttactgaggacctggttttctagaacaggtgtgtcctgtcctcttccatgttccctgggggctggtcagctccaagttgtgggtggcagagctgtgtttcagcatgaactgactagagacccatctggaggcaaatattaagttgccaggactgctttcacttcagggtgattgaaggacacatattgaagtacctagaatgccagaaagtgttctattgcccaaaaaacaaatcagaaaagcctattcttttttgcaacgctgttaatgattagtggagttctgaaattactttgtgccacttggaagtactgtgaaaccgcattcactgggattttgctgtaattcacatccgctggactgaagtttaccttgatgttagctataagaaatagttttctaacacatacgatagcaaatacaagacaaatagcattgaaggccaacaaaaatggcttcagatacaccttagctataatgtttgcattcaaacaatgaatgtattcatcacaagtcacttaccaaagcacttctagacttctccaacctccatgactttgctctgcttcctcctgtccctgtcagcagggttgctgtttgtacttgaaggtaataaacctgtaatccttcaaaaatgccatttagccccaggcttctgagctgagtcagactgacccatcccaccgttagggcaaaagtcaggctgggacacagcgccagtacagagaggatcctgcttcatgcaactccccttttggagttaatgcagcgtgatttcctgggccggtgttttcaggcatcgcccaccccaggtatgctggttcccagctccacgtaggtgtgcctatcacgctgggccactttgctgacaacattcatagcttgacatgagagagaatatcagcagaagcatgagagtaggacctgacgtctttgactctgcaaaagcatttagcacacactcatgggggggaactggctgtgagccacagcagccccacacagacagtggtctctgaacttcaggaaagccatggacagaaaaaaaaataaaattcttttccatcattctattttcaaagaggtcttggcgttttcctacatcttttgtttagagggggaaaaaagtttcatttgctgccatttcagaaaggttatgctatcctgttttatccaagcagttgtgagtcaggaactgcctgggcagtgtgcatcaactttgtggccgaaccattacagctgtcatatccttggctgatcgtctctcccagggactactgccctccacttagtgtctgagggtaagcctagaagggtgctgctattgggtctatggaagcttatctatcaaaggagcaaacatccagaaaagtgtttataaagcaaatgtattgcctctgtttagagatttgcccagctgttccagttttaaacattaaaaaataaactcagttgccatggcaaaaatagaatgcacagcttacttataattttccatgcagtatagcataaggatttttgacttgaaacaaccaaagaactcctccttaacgagacagttcaaattcctgaattagtatttcttgactatcaacttaaagaatggacttcctagtacaatgttgcacttatttttttttctgaaataattctgcctgcatgtatgtgttgtgttttagcttctccccttaccccaccccaaagatcttttcttcctaatggttaatgtctcaactcggttactgtttactatcagatggtttttcattagtgaatttagacctctttgagaaagcttgtatataaaaagttaacagatatattttatggaaaaacccatcttattttcaaatatatttaactgctgttatattttattagaggaaggttgtaaatattttctaggagttctattgtaaagaaaagtatttttgaaaaaaattaatgtaataaaaaggaaaacatttttaaatagtggttgtgattgcttcctgttctggcttcgttatgttctattctcagcagatgaattgcatgccttccatatcaggatgtaatttattcaggtttgcactattataagttgacatcataatatctagtgtgcttaactgtattttcccggaatgcaagtcccttggtccatattaaagcactatgtatagcatattcataatttttcttttgtaacgtgtgtatttttaataaggattttatgtaacattttggcaacaagaggaccgtattttctagtgaattttataataacattttgctaaaaatgtttcttcctaggtcagtttttgttaaggtgaaccaaaagtcttattttaccaggggtttaaaaaaagtttgaagcttgaaagcaaagttatatttaaacatcatatgtaacaaataaataaagatgttttatagacttgtcctaaaaaggtgcattccttaaaaaaaaaaaaaagaaaaaaaaaggaaactggggcattctaggttgtttcccctccaagtgataagctttttttttttcttaattatcacaatgcttcttcaaaaagggaaccagggaaattttatttaacacattctaatcattagcctctcagaaagttattacagttcctatagatgggcattcatcaaatggagatgtaaccaaacagacactgtcatatttatttgtgaaaacctgattcaatattgcatcagctgctctgaaaataaaatattaatcttttgcgttt

SEQ ID NO: 5821 - DNA, 4551 bp, Homo Sapiens
  NM_033503
gtaccctgcatgcatatagctgctgattctactcctgctattgctcacaaccctcagagtcaaactttgtgaccggcctaggagagatggagccatctcagtgtgtggaggagctggaggatgatgtgttccaaccagaggatggggagccggtgacccaacccgggagcttgctctctgctgacctgtttgcccagagcctactggactgccccctcagccgacttcagctcttccctctcacccactgctgtggccctggccttcgacccaccagccaggaagacaaagctacccagactctcagcccagcctcccccagccaaggtgtcatgctgccttgtggggtgactgaggaaccccagcgactcttttatggcaatgctggctatcggcttcctctccctgccagtttcccagcagtcttgcccattggggagcagccccccgaagggcagtggcaacatcaagcagaggtacagattgcccgaaagcttcagtgcattgcagaccagttccaccggcttcatgtgcagcaacaccagcagaaccaaaatcgtgtgtggtggcagatcctcctcttcctgcacaaccttgctttgaatggagaagagaacaggaacggggcaggccctaggtgagggtgggctgccctcttcacatggggcaccaggaacaccgtctggaacaggaaggacatcgggcaggactgacactgtgtcttgtgaaattgtttttttgttgttattttgtgttttaattttttttaatttctctctgagtgtacatacaacatactcaagcgggaccttctttctctgtcaggcccttgacctggaatgggggcctttgtcaaacactgttgaaggagaggctgatgtgtctgtgatggtgagaattcccaagggctctgacaagtagattcttcgactgaggaatctaccagttgtcgaagatgatccgttagtgatgttctctgggaagtggactgtggtttttccagaggaactcagttaagaaatcgagagtggattagactcccagttccaccaaacctatgagccttccactgtggatgggggccgtgatcctgatggtcacattgctttaacccagcagggcttcggccaggggctttccacttgaggatagcagcttcactaggctggccggccagctccacatctgactgggttcttacttctcagccagtacctgccccatgggctcaaggattcctggccagctcctgccacctccagcagacctcagggagggttgggtttctctaaggacccctcaaacatgtcgcaaaatgaaccaaacttctggctaggcctcaaaactgacttggtcccacttggaggccccaggattggtcctgaggtacagagccactgccaccactggcggcctgggaccagctgggtgtcagccacggatgagccgaatagccagtcagcatgttgctgctggcagcctgtgcctttgtcagctcttctttcaaaagaccccaccgacagaccgcattccacccccaacatcggcactgagggacatcgggggcaagtttgcagtggggccggaaaatatggtggccaccctaccatgagagtcagccgtaggggaccccagaccccttggtttccttggaaacaacatacctcttcccccttatccccagtcctttttcatacctagtgggatacagaagaagccaggacagtggctttgccagctaagtgacttttagagtaacagataacgattagagtggggaaccgtcaaagctgggtacacatttcctatcttcctccagcttccagctaggccagaagggcatgctctggaacccagcaggatcacagctgcctgtgcacgtcttcccttctctccctgctgcggcacttatggagaggatctaaagcagccggtgtggcagctccgatagcaggcacagggaatctgttaaccagacgctagaaactaaattataacttttgcatatgtgagaaaagacaacattggtgctaacagtgaagtaaggcccaaaggaaagacggcttccctggacaaagaagacctcagggctacccaaggaaataggaggagtctagagtagactcacaaatctgaacaagcccaagtcttccagttctgaggagaggaggtcttcagtactattgaaggagacattgatcttctggatgtacagttgtgcaggttgttcactgcacaagggcacctgcagctaatggaggctggaattcagcttgtgttctgctcactaagctgtgtgcgtgccctggtgtggggctacttctcccaagaagaaggggtgcctttcctaatttgcaaaggtgccatatgggctcacagcaccctggaggagaagggcctcaaactgtgcatgtaagcctttgttttgttctgctcagatattctggatattacctcttcttggtcagaattctattctcagggtgtgtaccatgatttgtctgctaagaagacgggttcctgctttgcagagaaggagccggggaccagcttgaagactggctctgggacacactgaccattgtgaaattcagccttccctgtgggtctccataccattttatgatgtgtatgggacatacgttgttctcccctctctggatcaaggtggtgacaggcagcctgctgccgtatgcttcagtggcacacaccaaaaaaccgggattatttacagcagccactattcaccccttttggcagactctccacctgagttcagtgagagagaaaatgatttagatcttggtgctggggcaaggccatcagcttcagagaccttgccaggcccaggctgggtgccctgtggcctgagaactgagcccagactttgacaaacccacctcaacatcaagcctggggcaggtggaaggtggtctgactgcactgtctccatcttatgcaaagccaggaactcactcactgtcttaagtgagccagggcaaaatttacacccctcacgtttccctctcccttcttccccaccaacaaaacccaggaggtagctggcagagtagctgtcaggaaggagaaaggttctttctggctggttgtttttaattggcttagtgatctaaactggccccttcctcctctgcctggtgagttggcctaaacattcctcaagtctagcctcaggagacctgcccctcccccccgacctccaccccctcagactccatcccccacccccaggagcctggctgtctctagcgaggggtggagaatcagatttagagggagggagagtctgacctggatcctgacctgtaaccagctgaagacggtggaggctttgtggcttgctgagggtgggggttgggagagggactggaaaccttcctcctcgggaaagaaatgcctgggaggaagggaagcctgatattcagggtcaaaacagcccttctaattcacaaccccaaagcaggggtttctagaagttggtcaacagatctggtgagggaagtccccaggccagacgctggactcctgcaatgagggtggaggactcagcctggcctctgcctggcctgtttcaaagtctgggccactggcagccttctcttgctcaatccgaggtggaaaaagatcacctcccagtgacctccctcagcccccaggggagtaggtctgtgtccaaagctatgtggcaggcttgtttgaaggacccagaggggcccagctgacctgtctcactgctcctggcagcccagccccatcggcaggtggcccctgcctgggggttattcgggatggttcagccagggcctcccaggaagagtgctgtggagccacggtgactgtcctggacagcaaggagcatgctaccccagtgagcacttctttttgagggacttgatggggaggtggggtaggcagaagggacgtggcagaagcgggaagactttggtcaccatggctctgcaggccttctgcaaatcagtgctggcctgggctggaaacagctctgtgtgtgaaggtgaggactcttggaagcaggccatcctggccagacaccctagcaggaaggggctcacctgtcacccttaggcagcctgagggctggtggggacttttgagtcttgaggggatagcggaaaaagctgagctcataggtgcccagccagcctcccagctaaaggtgctcagagccccactgccccctctctctgtgcaggtggccagtgcccctccctgctctgggagcattgctagccttctaccccatccctggatccacaggggctatcgaggagacccagtgagaatgtagcattttgttcatccccagggtagctgccctggggtctgggcactctgcctctgggagagaggaagaagaaaggggccccattttttaaaaaactgtacagagcctttggctttatgtgtttatgttcttcacatgcatatgtgtgtatgtgtgtatatctttccccccatcaattggtacaatttttaataaaatcatttaaagcaaaaaaaaaaaaaaaa

SEQ ID NO: 5822 - DNA, 8143 bp, Homo Sapiens
  NM_033505
acgcgtgcgcggtgggcggagcgcggctctcctaccttctcgggcagcccagtctttgccatccttgcccagccggtgtggtgcttgtgtgtcacagccttgtagccgggagtcgctgccgagtgggcgctcagttttcgggtcgtcatggctggctacgaatacgtgagcccggagcagctggctggctttgataagtacaagtacagtgctgtggataccaatccactttctctgtatgtcatgcatccattctggaacactatagtaaaggtatttcctacttggctggcgcccaatctgataactttttctggctttctgctggtcgtattcaattttctgctaatggcatactttgatcctgacttttatgcctcagcaccaggtcacaagcacgtgcctgactgggtttggattgtagtgggcatcctcaacttcgtagcctacactctagatggtgtggacggaaagcaagctcgcagaaccaattctagcactcccttaggggagctttttgatcatggcctggatagttggtcatgtgtttactttgttgtgactgtttattccatctttggaagaggatcaactggtgtcagtgtttttgttctttatctcctgctatgggtagttttgttttctttcatcctgtcccactgggaaaagtataacacagggattcttttcctgccatggggatatgacattagccaggtgactatttcttttgtctacatagtgactgcagttgtgggagttgaggcctggtatgaacctttcctgtttaatttcttatatagagacctattcactgcaatgattattggttgtgcattatgtgtgactcttccaatgagtttattaaactttttcagaagctataaaaataacaccttgaaactcaattcagtctatgaagctatggttcccttattttctccatgcttgctgttcattttgtctacagcgtggatcctttggtcaccttcagatattttagagctacatcctagagtattctactttatggttggaacagcttttgccaacagtacatgtcagctgattgtttgccaaatgagtagtacccggtgtccaactttgaattggttgctggttcctctcttcttggttgtcttagtggtaaacctaggagtagcctcttacgttgagagcattctcctgtatacattaacaactgcttttactctggcccacatccattatggagtacgagtggtaaagcagctgagcagccattttcagatttaccccttctcattgaggaaaccaaactcagattgactaggaatggaagaaaagaatattggcctgtaataatctttctttgggcacaaagaagtactgtaaataaatgcttgtaaatatttcctccatcaccattgaactagactgatctgcttgacagacgtgggatctcagtatggtacttggacagcaggaatgatacatataatctgaacttgggaaattttggacctactaactctaagcctattttattttttataaaactatgtgacattttggttgagcagaatgtacgttagaccagcaaaatgttcctaatggttctaacttcgtgagtttacaatgttgtgattcatgcagggttaaagatgctttgtttttattttttaagtaccaaaattggtttcagaacactgataacactcagaaaaccacagtgtgttttcatatttggaactttgtaatagcgggagtagcagtagtccaaacctagtatagggaaaggataaaaataagtcaccttcaccaagagatgccaatgattaccaaacaacagacagttgccaaatactggtttctctttcccctgaaaatggcttttgttctcaaatgataagagagctaatacatttagctaatattctagctctctttattatggaacagatcttgatagatggtttaattttctcctaaagagaaataatcagttgagaatttgagaatgggttgtaattatcgctcacccattgggatggttcattgtttaaatatggcattttccccccttcagctgcaggttcctgagatttggtgcctgtgagctctgattgtaggaatgcatgtgacagtcccagtcctatggtaatgacttaggaggaatgcagataaaagtaccttgtaagataaatataaattggagttaggaatttcatgaacctcactatgaccaaaattaattttttgattcagtttgtctgtctgtctgtccttcccctctcttcttttttcagggtgaggtgctgtgtttcttatttcatacgagataaaacagagagaagttctctcttctccagcttgtccatttccccacttgaagaaaacttttgatatatatgccttactgagtacatgccccctttaatgttaatatgacttggagtaatttctgaggtttactgacaaacataaaaatccctttaattgtagtgtagttgttctataaaccatattttttcatgatgtggatattttcttctatttctttgtcttcatttaatttggtggtggtgaactttacttgctgattttcttttatttttcactgaatgaagtttgtgcttgaatgaagagtgtatcttaaaccccctttttttggacaggctgcacttggataaaataggcaccactgtgttgatatgtaattaaattcataactatttatgaatgtgaccattgttaaatttaattatagtgtatttctttcttgaatttcagtctgctgctttgtaaaaaataactgtaattgatatttcatttttaaaatttataaattccaatcattgtcattcaagttattagaaatgagtcacggcactaactcatggttctatactcattttaagaaattgtaaaggttgaggtgtatttggtgactttctctgagacacagatgaacgttggaaatagatgagaaatggatgcagaataatgcagatagtgatcccatgtttgttaattgccatcatggaagtcagagaattaaccaattaagtgacggtaactattttttgtataccttgttctttgtgatctataaaattaaactggataaaatgttaattgggggtagggaaaaagctttgttttaagatttctaagctaattattttaccgttttgttgaccttgtacacaagaatgagattaatctgtattatataagaaaagaactgataaatatttataaaatgacaaacttggaccacaggctttcttgaccttgtacagtatagtaaaaataccctttacttctgacattttaaggtcacgtcctatagtttgggggcccttttacttcaaaggtgtgtttctgccctcttttggttgtatcaaatttatttgaaaattgttttgtgctgtactttatgacttgtttccctatggtggtaaagaatgatgccatagtcagttttattgacattgttagatgaaagaaaagtagctgtcaacaaggggaaagtgaaattgagcaattcactgtttcaggatacttgaggatctttagtgtactgctgactctttttcttgttttgtctgccattcttgaaagtgcatcttgagagcccccatttgttgtgtagagatatagcagctgaagcaggacttcattccagatagctgtgtgcatttatgtcatgccaattactataacatttccaaagtatgaaaggtctttcaggcttatgcatgatattgtgggtgacttcatgccccagcctttctccccagcatacagtgagctgccttttggggagcaatgccatgataaggagcatacgtgcatgttttccgtactttcagaatagagtgccttagctaggccagaggctcgtattgtgtttctgctgaccaaagttgcatacacctgtaagaagtgtctttttaggttatggtattaaaaaagtcgtttcaggcttatcagataataattctcctatatttgaggggggcatgggataaaaagatttaataatacctggatagagaatgctaatgctgccttttgtgatcctttaatattatccatgcttttataaagtgcagtacacattttgacattgccacagtttacagtgtcattcttccacgaataggtaattgatagagtttatgggtcttagtcttaagggtaacagagtgaataccttccaaataaaaagctaaatattcctccttgtcattttaatgtcattattgaaatacttttaattctaattttcaaaagaaagctaaatgctgattgtggtttaggatgttacagtactaataccatcatgttatttattctaatatagaggcattgagaggaggggagtgtatgtctagagttaccccaattctaaataggtaccaaaagagtattgattatgacctggagcctgagctttgggagaatatacaaaggaaaaagcaggcatagtttccactttaaagggaagaagggactttaacatcctatgaatttgaaacatcctatgaatttgaaagtttcctaagtgttgttttcaaagaactggtttattttatagtcagtcaaaatgcatttggaatgtaccttgcttccataacagactttgactctatgacctatgaagaataaaaagataatctgaaggtgtttgagtcagaggctacttttcccctttatattttatatagaagcctatttgtaattcttcctcttcgttcttcacctgggtttcctcttatctacccaccacctaggacagaggctgcccactcaggtcttgccttgttgcccctagatgttgccacattcacatctccttgatggccttagatctcttgactagtcaaggactgggaacgtgccagggggaacaaagtaagcttgatgggctggaacttttgactttgggtccccaaacagccaaaaacagatacagaaatctttggttgtgtggatgcctgtgttcagagtggccttatcttgacctcagttctggatttaagtactctatagaaaatttgtgaagtcagaccagaattttctttgtcccatgaggtgtctttgtaagtcagcatgctcttgcttgaacaccctgtgggtgaataactttagtaagttagctgccagcattagaaccttccaggaagaattttaactagtatgctacatttgaagcactctgacatgtacatttaaagtgacagttttaaaagtaaaatggtgttaaatctctgaaacttgaacgtatgatgctctggacattttaggaagcttaagtaaatttctgattttcctttattgattatgtaacccacgtgatttgcatattttagtttttatgtttgacagtggtacaaatgactgacattggcaggcagttattgtagggtatatggttaatcacgattgtctaacttttccagagaaagtggtgatatgcttcttccttgcatggagctgtgggaattggatttgttggctcttcatttccagtgtttctacagtgcagaataaatgtaactttttaagcctgcatgctagtaatatgctttgctctttagtaaacaaatatgcaatagatagtaatctatctactttttttaaagcagggatctgctccctatctagacagatcttttaatgcattaatatttagagtagcaaaagaagttttgccatttgtagctctctcacaggtagcttaagcgagggggttgtgttgcatgtgcttagaaaggccaggttcccagaattggaaggtgccacatatacttttagaatattttaacaaaggcttgtctctaggaaaatccacttggactgcagcaggattgttctggtcttccacagaccattcacatggtctttctctccagagaatcattcttagaaagccaggctaaatcagagtagtgctgtttttaaagcaagtatattggatgatggctatagggtaccttaatgctgtgttgaaattggaagcagactgctcttcagcagcacatatactgcaactgaagttagagacagtactgaagacgagggagtagctaaatgctgtggatatttcatgtctgtttggctaatgtcttctcttgaggagtttctatgggtagcaattaaaattagaatttattttaaggtttttattaaaatatatacaatttgccataaattctagattctgatattcttgacaagcactttttgaatatctcaagagtaagttcttgacctggaacatatatagttagtacttgatgtcactaaccaagttgtagaaggagcctgttataattctgcaagatctgtgaatagcattataaatctggggcaggtgcctgtaatcccagcactttgggaagccaaggcaggtggattgcttgagcccaggagttcgacaccaacctgagcaacatggcgaaaccccgtctgtaataaaaatacaaaaaaattagctgggcatggtggcatgtgcctgtaatcccagttactggggaggctgaggcaggagaatcacttgaacctgggagatggagattgcagtgagcagagattgtgccactgcactccagccagagtgacagagcaagactccatctcaaaaaataataataaaaataaacaaatctgtttaaattactgttgcctttcagcattagactttgagtttaataactacaaattgagactgctcacaatattaactttttttgtaggttattttgttgtttagataacttgcctccctagaggagcattcaggagataaagacctagctacatgtaatgatatgatcatttcaaaaatgtgccaagaaagcaaaattcattattgaactctaaatttctgggtgtttttttttttaaagtagcattttctctgggtaaagggaaaggcaatgaatgattgccaacatgtaaactccctgctgcccgccttcccccagtcccctccatctaacataatacagtaaatttgtagccagttgtagaaaaagaaattgatatctttctgagtaaggtttcatgccctgtgactaagaataggtggaggaatcatggccaaatcaaatatgaattgtttagcttggtcctgttgcagttggctttctgtagtgttctgaaacaagaggacgattccattccttctcaggaacctagaaacaacaccgcttgagcaactggaatatgtttgctgcaagcagaatattttggggagaggaagagtagtttaattcaagtagtttaattgaacatattagtcattggtctgtctgggacgtgcagtgttcatagtagcaatgtatgtaccatttattttatctggttgtgtgtgatgtgtgtgtatgcctatttaatatgtacacatatattcactacatatgtatgtatgatatattcatatatacatgcagtctgcttgattatcagcaaaatggtcagcctttatcagatagtttcttcatgtggagttcatctgcatgtggcccttactctgaagcctcttcctgatctggagccacagtctgtctgtcttccagttcatctcagtcctcgagaaaggccctttaaatatgtcactttcccattttcctttaaccatgggttgtgtgagccagaaagagctttgagaaagatggctgcttccaccagggtggaggcttctaggtctgcatgatgatggggcccgtttctggccagagggtggctctgggagcagttgtgctgcgggcttgctgggggagaactctaactgttgcagaaacagagcttcatggcttgcttaaattacttagctggaatattttaaagtgtcagataatgtgatgtacaaagagagtatgccgatgcatttcattgtttttgcattatctgtatcagtgtttcccattgctagcccgaataatcaagaccagactgtttcttgtcactggattctggaagccttgccctttcaactggatttatgtttgtttctgctgctgtgaaaccccaaagtaatgcagtaggttttaattgaaaattgtttaattctattattgataattatttattgtaataaaagtaaaagagtaatttttaaatccttttaattgtttaaaaaaaaaaaaaa

SEQ ID NO: 5823 - DNA, 4478 bp, Homo Sapiens
  NM_033512
gacgtcggcggttgccgtggagagacccgctcggtcccgaccgagagctggcgtcaggagccgcagggtcacagcgtgtctttgaagctgcctccgccgccaccatgagcggccgaagtcggggtcgaaagtcctcccgcgccaaaaaccggggcaaaggccgcgccaaagcccgagtccgccctgctccggacgacgccccgcgcgacccggacccttcacagtaccagagtctcggggaagacacccaggcggcacaggtgcaggctggcgcggggtggggtggcctggaagccgctgcgtccgcgcagctcctccggctcggggaggaggccgcctgccggctccccctggactgtggcctcgcgctgcgggcccgagctgcgggggaccacgggcaggccgcggccaggcccggcccggggaaggccgcatctctctcggagcgcctggccgcagacactgtcttcgtgggaacagcgggaaccgtgggaaggccgaaaaatgccccccgcgttggaaaccggcgtggccctgccgggaagaaggccccagaaacctgtagcaccgcggggagggggcctcaggtcatagctggtgggaggcagaagaaaggggcggcaggggagaatacctcggtgtcagctggggaggaaaagaaggaagagagggatgcagggtcggggcccccagcgacggaaggcagcatggatacgctggagaacgtgcagctgaagctggagaacatgaacgcccaggcggacagggcctaccttcggctctccaggaagtttgggcagttgcgactgcagcacttggagcgcaggaaccacctcatccaaaatatcccgggcttctgggggcaagcatttcagaaccatccccagctagcatcctttctgaatagccaagagaaagaggtactgagctacttaaacagcttggaagtggaagagctcggccttgccagattgggctacaaaatcaagttctacttcgatcgcaacccgtatttccaaaataaggtgctcatcaaggaatatgggtgtggtccttctggccaggtggtgtctcgttctactccaatccagtggctcccagggcatgatctccagtccctaagccagggaaacccagaaaacaaccgtagtttctttgggtggttttcaaaccacagctccattgagtctgacaagattgtggagataatcaacgaagaattgtggcccaatcccttgcagttctaccttttgagtgaaggggctcgtgtagagaaaggaaaggaaaaagaaggcaggcaaggtccaggaaagcagccaatggagactactcagcctggggtgagccaatccaactgatcctgcacaagtctccctgctacctcctgctgggctgctcctggttgactacatatttggctctctgccttctcttcatgttggcctctgtgtactatagaccctttggactttagttacaagaatatggcatttatgatcatgttcttttgcctcccatagcctcttgcttttctacgttagtgtcacatgttatgtgatcgcacccggactgttcatatgttaagcacacatactttagatgtgtgctccctgttatctacattgcctggaccttgttcttggctctggcctttcctacttgtctttaacatggacactcatgagtcatcctccaggacgaccagtgcatcctcaagctctgctccttcagggccagtgacttgctgggcttcgtgttcatgctggccatgcatgtcatctatgcaagcgtttccattgccactgcagaatgaagccagtgcacatggtattagtcatcagccagaacttcctgttctgtgggtctggggtcaccagctgagatgtcacctgctttatttctggctttggcctgtggtctgtgatacccatcctgcttgatgttctgcagaatggcacttgactgctgggcatgcatgaagttaagggcaagaaacagtatgccatgtgttctgtaccatcatgtgtctcttcttgcttctgggcccttctactggtgaactttcatcaagatctgcgccatgccgtgtcactatcaagccattaagttttgtctgggttgctgtcagccccagttggcttcctggtcaacaaggacctcaagaactgcctgtggaccgaggccccctaccagtgcatgagacacacacctaccctccccagctttccaggaaccctactggctgccagactgatgggcgggctggtatgtgtggacatgtgttcactgtcattatgctgtggctccaggtgagggtgaggactgggcctatatagaatccagataccattgtcaacttcccttattcccgtctaagatgtgagcagagtgccatagtaggggttctgggaagaggtatttctgatttgtgggcctctgcttgcttgacttcaggtcacttatacttcttattttgcttgcctgccttcatccctcatttcctccctctcattcttctttcctccctccctttcctggtagcctcctttcctccccttctgccttccccttccttctttccttattcttttttattttgtttaaatagtaccacagagaaaacaactgaaaaaccacatttttctacatacagctggggaggtagctgagaacttggcactgcgcacacatactaggttgaaagagagttgaggaaaccagaaggccaagtggatctgctggcaaaccctgaacctgtctcctgcgcttgctctacagttctgaagttgaaaatccttttcatgcctagcatctgcttgagttataaaccccaaggcagccatgtcatagactagtgtttactcttgttttgactttgttttaatgcttcctaagacccaagtgcctcctgctgtttcctcctttgtggtagcctctggccatctggacctcaatccccagctttcccactttcagcagtcctttgctctctttgcttctacctcaaatagccccaggagtgggctttagtctccaatatggagcatctcaagcttctcctgggggatggggattgggatgggcagaatctgttttggatctccgggttatttccagtgggtgtaaaagcagagctgggcctttccctctcttatccctgagggtgggtaagaaggactgtatctacacctgttcttccctaccttctcttttgttagggaggcctcattctaagttcctcaagagagtccttggcttaaagctgtagcaagggtgtgctaggtgggggatttggagcaaaaccgtcgagtaggcatgatactggtatggagtgggcctgcaaaatcagacagaaatggcttgagaagccgcagggggagcatgcctgtctctcagtgatagagtatgggagggacctccctagcttggaaaatgagaattgaaggggttatgaacaaataggatgcctagttgaggatgttcccaaagttttgtccaatcttatcattagtagattttataagccacagagacaaaccagaaacggaataatgttactttggatgctttatttttttgttctaggtgtggctttgtacatgcagaagaatgctatatgctgcacattttgcctttaaagtcttacgactttccccattttagtctaatgggaagatacagatgtgcaagtctgcttttttgttttttgttattatttttttttttttgctctgtgttatggacattttcagacatgcacagaagtggagaggatggtccttggaccccatgtgtccatcacctagctgcatcacttatcagctatggtcaacctggtttcatctgtatctctctcttttcacctgtattgtttattgaaaatccaagacactatgccaatgcaaccgtgactactttgggagattggtagtctcttttgatggtgatagtgatggggtgcactatcataatcacatcaggtctgctttttgcttttaatgttaactaatgaagttccagagatgggccttagaaatgtgttttaagaattaacaaggagtctcaaaaagaaatgagagggatgcttcctttcccttgcatctacaaaacaagagagagactgttctgttgtaaaactctttcaaaaattctgatatggtaaggtacttgagacccttcaccagaatgtcaatctttttttctgtgtaacatggaaacttgtgtgaccattagcattgttatcagcttgtactggtctcataactctggttttggaagaataatttggaaattgttgctgtgttctgtgaaaataacctccccaaaataattagtaactggttgttctacttggtaatttgacaccctgttaataacgcaattatttctgtgttcttaaacagtataaatagttgtaagtttgcatgcatgatggaaaaataaaaacctgtatctctgttataaaaaaaaaaaaaaaa

SEQ ID NO: 5824 - DNA, 461 bp, Homo Sapiens
  NM_033520
attcctccaacgggcaggtctcagcgctcctccccctgctccgctcctctgcagggcccaggcgcccttggccttaggacccaacttctcttaccgccatggagttcgacctgggagcagccctggagcccacctcccagaagcccggtgtgggggcgggccacgggggagatcccaagctcagtccccacaaagttcagggccggtcggaggcaggggcaggtccgggtccaaagcaaggacaccacagctcttccgactccagcagcagctccagcgattcggacacggatgtgaagtcccacgctgctggctccaagcagcacgagagcatcccgggcaaggccaagaagcccaaagtgaagaagaaggagaagggcaagaaggagaagggcaagaagaaggaggctccccactgaagggccctggacagggctcattaaaccttcctctctgccttc

SEQ ID NO: 5825 - DNA, 2802 bp, Homo Sapiens
  NM_033542
cactacgcctgcgcaacctcagccccgcccctccgctgctttccccggaaacgtttctttcctacgcagccgctcctgccgccgtggtcgctggagctttgcctctctaggccggcagcgcctctcctccatggtcctgtctgtcagcgctgttttgggagcccgccggtgaggccgggccacgctcagacacttcgatcgtcgagtctgtcactgggcatggcgggtcagttccgcagctacgtgtgggacccgctgctgatcctgtcgcagatcgtcctcatgcagaccgtgtattacggctcgctgggcctgtggctggcgctggtggacgggctagtgcgaagcagcccctcgctggaccagatgttcgacgccgagatcctgggcttttccacccctccaggccggctctccatgatgtccttcatcctcaacgccctcacctgtgccctgggcttgctgtacttcatccggcgaggaaagcagtgtctggatttcactgtcactgtccatttctttcacctcctgggctgctggttctacagctcccgtttcccctcggcgctgacctggtggctggtccaagccgtgtgcattgcactcatggctgtcatcggggagtacctgtgcatgcggacggagctcaaggagatacccctcaactcagcccctaaatccaatgtctagaatcaggccctttggacatcctgctgacacttgggccccttaacaccttgggctgctcagaccctccagatgaggtccagcccagatctgagaggaaccctggaaatgtgaagtctctgttggtttgggagagatagtgagggcctgtcaaagaaggcaggtagcagtcagcatgacagctgcaagaatgacctctgtctgttgaagccttggtatctgagaggtcaggaaggggacctctttgagggtaataacagaattggaaccatgccactcttgagccacaatacctgtcaccagcctgttgttttaagagagaaaaaaaatcaaggatatctgattggagcaaaccacttctttagtcatctgtcttacccccctgggacagctgttacctttgcagtgttgccgaatcacagcagttacctttgcagtgttgccgaatcacagcagttctgttggagaaacgcttggtttccggatccagagccacagaaagaaatgtaggtgtgaagtattaggctgctgtcagggagaggatggcagatggaggcatcaagcacaaggaaaatgcacaacctgtgccctgttatacacacgttcatgtgcacccaagaacctatgactttcttccagttccttctaccaggtccccatcctgctgccagctctcaacatagcaggccataggacccagagaagaatcccagcgttgctcaaagtctaaccatcataaagacactgcctgtcttctaggaatgaccaggcacccagctcccactggactccaattttttttcctgccttatttagaattctttggcgggaagggtatgatgggttcccagagacaagaagcccaaccttctggcctgggctgtgctgatagtgctgagggagataggaatttgctgctaagatttttctttggggtggagtttcctctgtgaggggcttgcagctatccttcctgtgtatacaaatacagtattttccatggttctgcctgcacttactttgtaatgccacggttgagattgagagagatcagcgcagccaggcaagggaactttaaagaattattaggccaccttctccctttcctggaccccagagtcattcctccatttggttaaaatactcagtgcagggaactcttacatcctgtctccttcacttgcagcgtcccctgctatgcctcaggtgaaccacataattcttgggtttccgttcctacttgctagtgatttctgaacatgttcaatggagcggcacacagtctagacccacttccgcattgaaaccttcactgttcctctttggtttcttcagagctttcccaagagagctgtcagttttcagctgtcagtaacacaaatgagtttatggtaacacaaatgagttttgctatctctctgagaagctcatctgacctcctgactctcagccctacagagtagggagttgatgctgacaggatgaagatttaggaataaatatgcctgggaagagactgggaaggttctagggtgaggcacctcagtaactcatggtaccttggccaagttggaaggaagcagtttgttaatgaggcacagtaatcctggctgcagggtctaggaggtaagaccagctgggatgaccttccctgggttaatcaatttccctctagacaacacaaactgcaggcatgtgactaactttgaaagaacacccatcatgtggctgctgtcacccttgaccagccgtggtggtggttactccatctgtggttggagcgcctctttgggattcacttcaaggtcttgtgcctatttttctgcatatcttctgtgatgacaaatctctgtcccctgagtgttaatttgatttttagaaatggccaaaagtcacgtgatccaaactttttttcagtaatatggagactgagctgcatggtagttggggatcaaaaatatgtgaccttaatgagatttttatgatttctaaagtaacaataaaagcagtttttagagttgagttccagagagggcagggcaatggcagtgacatgtttgtcattttaataataaataacatctattgagtgcttaagaggtgtccagcaaaaaa

SEQ ID NO: 5826 - DNA, 1022 bp, Homo Sapiens
  NM_033546
gccttccgctccgccccttcaggcaggaagtgtcggcgccgccactgtccggccacagcctaacgctcttcgctgtcgtttgtggtctcgcgcagggcggccccggttctggtgtttggcgtcggaattaaacaaccaccatgtcgagcaaaaaggcaaagaccaagaccaccaagaagcgccctcagcgtgcaacatccaatgtgtttgccatgtttgaccagtcacagattcaggagttcaaagaggccttcaacatgattgatcagaacagagatggcttcatcgacaaggaagatttgcatgatatgcttgcttctctagggaagaatcccactgatgcataccttgatgccatgatgaatgaggccccagggcccatcaatttcaccatgttcctgaccatgtttggtgagaagttaaatggcacagatcctgaagatgtcatcagaaacgcctttgcttgctttgatgaagaagcaacaggcaccattcaggaagattacctaagagagctgctgacaaccatgggggatcggtttacagatgaggaagtggatgagctgtacagagaagcacctattgacaaaaaggggaatttcaattacatcgagttcacacgcatcctgaaacatggagccaaagacaaagatgactgaaagaactttagctaaaatcttccagttacattgtcttactctcttttacttctcagacacttcccccaccctcatagaacctgttgcatgcaacttagtttcacagctttgcctcttctttttgatgtatttattccagacctttctgccacttagcacttgtataatcagactggaaatggggatgagggtgtaaattgtattgaaaaagatcgcgaataaaaatcaacaaatgtgaaagcccagaaaaatatattcgtatttctggttttgctggatttttacatttttatataataaaaatgttattttgaaataaagattatgctgactcaaatgcaatgtaaaaaaaaaaaaaaaaaa

SEQ ID NO: 5827 - DNA, 3163 bp, Homo Sapiens
  NM_033547
cggaagctgagagggcccgcgggtaggcatggcggcgcaccttaagaagcgggtttatgaggaattcacgaaagtggttcagccacaggaggaaattgctactaagaaactccgactaacaaaaccaagtaaatctgcagcactccacatagatctgtgtaaagctacctccccagcagatgctttgcaatacttgctccagtttgccaggaagcctgtcgaggcggaaagcgtagagggagtagtcaggattctcttggaacattattacaaggagaatgatccatctgtgagactgaaaattgcatcattgttgggtttattatcaaagacagcaggattttcaccagactgcattatggatgatgccatcaacatcctgcagaatgaaaagtctcatcaagtcctagctcaactgctggatactttgcttgcaattggcactaagctaccagagaatcaagctatccaaatgcgattagttgatgtggcctgcaagcatctgacagatacgtctcatggtgtaagaaataagtgcctgcagttacttggcaatcttggctctttggagaaaagtgtcacaaaagatgcagaaggcctagctgccagagatgtccagaagattataggggattacttcagtgaccaagacccacgtgtcagaacagcagctataaaagccatgttgcagctccatgaaagaggactgaaattacaccaaacaatttataatcaggcctgtaaattactctctgatgactatgaacaagtgcgcagtgctgcagtccagcttatctgggtcgtcagtcagctctatcctgaaagcattgtcccaattccttcttctaatgaagaaatacgcttagttgatgatgcgtttggcaaaatttgtcacatggtcagtgatggctcttgggtggttcgtgttcaggcagcaaaactgttgggctctatggagcaagtcagttctcatttcttggagcagacccttgacaagaagctgatgtcagatctgaggaggaaacgtactgcacatgagcgtgccaaggaactttacagttcgggggagttttccagtggcagaaagtggggagatgatgctcccaaggaagaagtagataccggggctgtgaacttgattgagtcaggagcttgtggagcttttgttcatgggttggaagatgagatgtatgaggttcgtattgctgctgtggaggccctctgcatgttggcccagtcttcaccctcttttgctgagaagtgccttgatttcctagttgacatgttcaacgatgaaattgaggaagtacgtctgcagtctatacataccatgagaaaaatctctaacaacatcaccctccgagaagatcagcttgacactgtcctggctgtgctagaggattcatccagagatattcgagaggctcttcatgaactcttatgctgtactaatgtttcaaccaaagaagggattcatcttgcattggtggagctgctgaaaaatttaaccaagtaccctactgatagggactccatatggaagtgcttgaagtttctgggaagtcggcatccaaccctggtgcttcccttggtgccagagcttctgagcacccacccattttttgacacagctgaaccagacatggatgatccagcttatattgcagttttggtacttattttcaatgctgctaaaacctgtccaacaatgccagcattgttctcagatcacaccttcaggcactatgcctacctccgagacagtctttctcatcttgttcctgccttgaggttaccaggtagaaaactggtgtcatcagctgtttctcccagcatcatacctcaagaggatccttcccagcagttcctgcagcagagccttgaaagagtgtatagtcttcagcacttggaccctcagggagcccaggagctgctggaattcaccatcagggatctgcaaagacttggagaacttcaatctgaattggcaggagtagctgatttctctgccacctatcttcgctgtcaactacttctcatcaaggccttgcaggaaaagttgtggaatgtagctgcccctttgtatttgaagcagagtgatttggcctcagcagcagcgaaacagattatggaagagacctacaaaatggaattcatgtacagtggtgtggagaataagcaggtggtgattatacatcacatgaggctgcaggccaaagctttgcaacttatagtaacagcacgaactacacgaggacttgaccccttatttgggatgtgtgaaaaatttttacaggaagtagacttttttcagaggtatttcatcgctgatttgccccacttgcaggacagctttgtggacaaactccttgaccttatgccccgactcatgacatccaaacctgcagaagtggtcaaaattctacagaccatgctgcgacagagtgcctttctgcatctcccgcttccagagcagatccacaaagcctcagccaccatcatcgagccagcgggcgagtcagacaaccctttgcggtttacctctgggttggtggttgccctggatgttgatgcaaccctggagcatgtgcaggatcctcagaacactgttaaggtccaggtcttatatccagatggccaggctcagatgattcaccccaagcctgcagacttccggaatcctggcccagggcggcaccggctcatcactcaggtttatctctcccacaccgcttggacagaggcatgccaggtggaagtgaggctgctgctggcctacaactccagtgctcgcattccaaaatgcccctggatggagggtggtgagatgtcaccacaggtggaaaccagcatcgagggcaccattcccttcagcaagcctgtaaaagtttatataatgcccaaacctgcacggcgctaaggcaaaaacagtcttcccaaccgtggcctagagggcccttcttaggtgtcagaatgagccaagcctgaagcacttcacctggaattgatgtgtaggcttaaggagtatgtgacccttacagtctcatctggtatcaaacacaggataaattgtttcttcattaaaaaataaaaaaccttcaagtctacttacccttctcctgtccacaataaagttgagaaaacaccaaaaaaaaaaaaaaaa

SEQ ID NO: 5828 - DNA, 3384 bp, Homo Sapiens
  NM_033550
ggggccacaagagcccttcctgcagggaacctcaggcttcagagagccgaaaagttgggaggcgtaaccacttacaggccggaagtgtccggggtggacgcattcgggtagccgaagaagtcccaggattgccgaagaagtcccaggatttccgaagcgagccgaagcatcgcgacagttttcagagacagctgatcggttggagctgttgcgccgagcagtcatggcggcggccagagctactacgccggccgatggcgaggagcccgccccggaggctgaggctctggccgcagcccgggagcggagcagccgcttcttgagcggcctggagctggtgaagcagggtgccgaggcgcgcgtgttccgtggccgcttccagggccgcgcggcggtgatcaagcaccgcttccccaagggctaccggcacccggcgctggaggcgcggcttggcagacggcggacggtgcaggaggcccgggcgctcctccgctgtcgccgcgctggaatatctgccccagttgtcttttttgtggactatgcttccaactgcttatatatggaagaaattgaaggctcagtgactgttcgagattatattcagtccactatggagactgaaaaaactccccagggtctctccaacttagccaagacaattgggcaggttttggctcgaatgcacgatgaagacctcattcatggtgatctcaccacctccaacatgctcctgaaaccccccctggaacagctgaacattgtgctcatagactttgggctgagtttcatttcagcacttccagaggataagggagtagacctctatgtcctggagaaggccttcctcagtacccatcccaacactgaaactgtgtttgaagcctttctgaagagctactccacctcctccaaaaaggccaggccagtgctaaaaaaattagatgaagtgcgcctgagaggaagaaagaggtccatggttgggtagaagaatgtgtatgacaaccacacacagtgaagctcttttttcaaagtaaatttgaagaaatgctacaagtatgagatgagatctaagtaaaggtgttaagatatttttaagtggtatgtgatcgtgtcattatcatctgcacttcactcaagagcttactatgtgtctaagtcatgttctaggcagaattgggtatttaaagtaaattgaggacaggcttctcccagattgtgacatgtatatctcagatacatgggtgtggcattgaaccacataatgagaacattattctctttttagtccttgtgagacaaggatgaagtctcagttgctgatactcgctgagcttactggccctctaacccagtgtttttttttgttgttgttgtgtacatgttatatttattttgaaaccagtttaatgggatacaaccagcattttaaaaaatgaaatagaatacagcatggaaaatatcagtgtattgttttatgaaactttcacgtgtatatatagaccaaggatatgtgctgagttttgatgtcaaatatatttctctttcagggtcatgatcaaaaaatgaaaagtctgcttaactccaatttctcttttaaaaaagcagacttacagctttcaggcaactgaaattcatgttaacatgtttttatttttattgctttgtatttttgtggttaccttctaagacaagtgattgatctaaagttccttttaagtttataccgctaaacaaactgagttgatttctatcacaggcagtaagtaggtagagcaaaaatggtgaagtgacttgtgaagactgaagtttgatgaagtctggtttaaggcacaggtaaactgagtgtggatgcaaaagtaccaggagctagcttttaaccttgcccagcctcagtttcttttcttagaagaagctatgtttgggtgggaagggaagagagggataagaaaatacctttcttccttgtaaactccaatcaacaaacatattttgagtgccttttgtgttccttggcaccctgttgggtattgggtacttggcaccctgttgggtattgggtacaatggtgagccagacagacacagcgcctgtccttttgtaagaatatttatttttataaaaaagtataaagtatacagtgggatgttttgatatacattatgaaatgattgctacagctgagctaattaacacccatcacctcacatagttactgtcttgtttcttaatatggacatttgcagctatgaatttccctctgcacactgttgtcatcacacactctcagttttggtattttgtgtttttgttttcattcatctcaaagtattttctaatttcccttgtgatttcttctttgaccccttgattgtttagaaatctgttaatttccacacatttgtaaatgttccaatttttcttttgttattgccagcttcattccattgtgttcagagatgatacagtcagtgcctgttcttatgaagcaaacattctataatagtaggaccagtaccctgtctgtttcattcaccacagtcagcatgccccaagtgcccagcatggggcggatggccaggaatgagtgaaaacttcccttcctgggtagttgtgactagtagagaggaaaaataatataattgcctgcttactgcatgccaggcattgggctgggaatttttatattggatctaaaataactcttaagttaggcattatccccattttatagatggagaaactggccccaaaaggtgggaacttgtccaagacgtcacaggtagcaagaggtacttttacctggctccaaatctgtgttctttccactgacaaatgagatatgggatatggtgcatctttacagtactataataagtattggcgtataacattattttcaaggaactccaagggccacaggagctgacaggtttttcaattaatattcccaacatgaatgagatgcctcattcctcagtttcctcacgtgtactataaggctagtacctgctttgttggggtatggttggctcgtgtgcattaagtcaacaaatccctagttgatagggtttggctgtgtccccatccaaatctcatcttgaattgttcccgtaatccccacgtgacatgggagggacccagtgggaggtaatttaatcctcggggcggctacctccgtgctgttctcgtgatagcgagtgagttctcacgagatctgatggttttataaggggcttttccctcttgttcggcacttcctgctgccacgtggagaagggtgtgtttgtttccccatctgccatgattataagttttctgaggcatccccagccatgctgaactgtgagttattaaacttttcctttataaattaaaaaaaaaaaa

SEQ ID NO: 5829 - DNA, 1157 bp, Homo Sapiens
  NM_033554
gctcacagtcatcaattatagaccccacaacatgcgccctgaagacagaatgttccatatcagagctgtgatcttgagagccctctccttggctttcctgctgagtctccgaggagctggggccatcaaggcggaccatgtgtcaacttatgccgcgtttgtacagacgcatagaccaacaggggagtttatgtttgaatttgatgaagatgagatgttctatgtggatctggacaagaaggagaccgtctggcatctggaggagtttggccaagccttttcctttgaggctcagggcgggctggctaacattgctatattgaacaacaacttgaataccttgatccagcgttccaaccacactcaggccaccaacgatccccctgaggtgaccgtgtttcccaaggagcctgtggagctgggccagcccaacaccctcatctgccacattgacaagttcttcccaccagtgctcaacgtcacgtggctgtgcaacggggagctggtcactgagggtgtcgctgagagcctcttcctgcccagaacagattacagcttccacaagttccattacctgacctttgtgccctcagcagaggacttctatgactgcagggtggagcactggggcttggaccagccgctcctcaagcactgggaggcccaagagccaatccagatgcctgagacaacggagactgtgctctgtgccctgggcctggtgctgggcctagtcggcatcatcgtgggcaccgtcctcatcataaagtctctgcgttctggccatgacccccgggcccaggggaccctgtgaaatactgtaaaggtgacaaaatatctgaacagaagaggacttaggagagatctgaactccagctgccctacaaactccatctcagcttttcttctcacttcatgtgaaaactactccagtggctgactgaattgctgacccttcaagctctgtccttatccattacctcaaagcagtcattccttagtaaagtttccaacaaatagaaattaatgacactttggtagcactaatatggagattatcctttcattgagccttttatcctctgttctcctttgaagaacccctcactgtcaccttcccgagaataccctaagaccaataaatacttcagtatttc

SEQ ID NO: 5830 - DNA, 4248 bp, Homo Sapiens
  NM_033624
cgcacgcgcgcgcgcggcggccccaggtacgcggacaagatggcggcggcagcagtcgacagcgcgatggaggtggtgccggcgctggcggaggaggccgcgccggaggtagcgggcctcagctgcctcgtcaacctgccgggtgaggtgctggagtacatcctgtgctgcggctcgctgacggccgccgacatcggccgtgtctccagcacctgccggcggctgcgcgagctgtgccagagcagcgggaaggtgtggaaggagcagttccgggtgaggtggccttcccttatgaaacactacagccccaccgactacgtcaattggttggaagagtataaagttcggcaaaaagctgggttagaagcgcggaagattgtagcctcgttctcaaagaggttcttttcagagcacgttccttgtaatggcttcagtgacattgagaaccttgaaggaccagagattttttttgaggatgaactggtgtgtatcctaaatatggaaggaagaaaagctttgacctggaaatactacgcaaaaaaaattctttactacctgcggcaacagaagatcttaaataatcttaaggcctttcttcagcagccagatgactatgagtcgtatcttgaaggtgctgtatatattgaccagtactgcaatcctctctccgacatcagcctcaaagacatccaggcccaaattgacagcatcgtggagcttgtttgcaaaacccttcggggcataaacagtcgccaccccagcttggccttcaaggcaggtgaatcatccatgataatggaaatagaactccagagccaggtgctggatgccatgaactatgtcctttacgaccaactgaagttcaaggggaatcgaatggattactataatgccctcaacttatatatgcatcaggttttgattcgcagaacaggaatcccaatcagcatgtctctgctctatttgacaattgctcggcagttgggagtcccactggagcctgtcaacttcccaagtcacttcttattaaggtggtgccaaggcgcagaaggggcgaccctggacatctttgactacatctacatagatgcttttgggaaaggcaagcagctgacagtgaaagaatgcgagtacttgatcggccagcacgtgactgcagcactgtatggggtggtcaatgtcaagaaggtgttacagagaatggtgggaaacctgttaagcctggggaagcgggaaggcatcgaccagtcataccagctcctgagagactcgctggatctctatctggcaatgtacccggaccaggtgcagcttctcctcctccaagccaggctttacttccacctgggaatctggccagagaagtctttctgtcttgttttgaaggtgcttgacatcctccagcacatccaaaccctagacccggggcagcacggggcggtgggctacctggtgcagcacactctagagcacattgagcgcaaaaaggaggaggtgggcgtagaggtgaagctgcgctccgatgagaagcacagagatgtctgctactccatcgggctcattatgaagcataagaggtatggctataactgtgtgatctacggctgggaccccacctgcatgatgggacacgagtggatccggaacatgaacgtccacagcctgccgcacggccaccaccagcctttctataacgtgctggtggaggacggctcctgtcgatacgcagcccaagaaaacttggaatataacgtggagcctcaagaaatctcacaccctgacgtgggacgctatttctcagagtttactggcactcactacatcccaaacgcagagctggagatccggtatccagaagatctggagtttgtctatgaaacggtgcagaatatttacagtgcaaagaaagagaacatagatgagtaaagtctagagaggacattgcacctttgctgctgctgctatcttccaagagaacgggactccggaagaagacgtctccacggagccctcgggacctgctgcaccaggaaagccactccaccagtagtgctggttgcctcctactaagtttaaataccgtgtgctcttccccagctgcaaagacaatgttgctctccgcctacactagtgaattaatctgaaaggcactgtgtcagtggcatggcttgtatgcttgtcctgtggtgacagtttgtgacattctgtcttcatgaggtctcacagtcgacgctcctgtaatcattctttgtattcactccattcccctgtctgtctgcatttgtctcagaacatttccttggctggacagatggggttatgcatttgcaataatttccttctgatttctctgtggaacgtgttcggtcccgagtgaggactgtgtgtctttttaccctgaagttagttgcatattcagaggtaaagttgtgtgctatcttggcagcatcttagagatggagacattaacaagctaatggtaattagaatcatttgaatttatttttttctaatatgtgaaacacagatttcaagtgttttatcttttttttttaaatttaaatgggaatataacacagttttcccttccatattcctctcttgagtttatgcacatctctataaatcattagttttctattttattacataaaattcttttagaaaatgcaaatagtgaactttgtgaatggatttttccatactcatctacaattcctccattttaaatgactacttttattttttaatttaaaaaatctacttcagtatcatgagtaggtcttacatcagtgatgggttctttttgtagtgagacatacaaatctgatgttaatgtttgctcttagaagtcatactccatggtcttcaaagaccaaaaaatgaggttttgcttttgtaatcaggaaaaaaaaaaattaatgaaccttaaaaaaaaaaaaaaaggttttgaagggaaaaaaagtggtttcacacctcttgttattccttagagtcacttcaaggcctgtttgaatgtggcaggttagaaagagagagaatgtctttcatttgaagagtgttggacttgtgtgaaaggagatgtgcgtgttggaatctgcttttccaagccgccagggtcctgacggcagcaggacgaagcctgttgtggcgtcttctgggaaagcctgaccgtgtgttcggacggcactggctcctttccgaagttctcagtaactgagcccagagtaactgcacgcctttgtgcagctctggagctccaccaactctcggcctgccagttctcaagcgagctaatcttgtcattaatcgatagaagctaacttccgaagttaggacctagttactttgctctcaacatttaaaataatgcagttgctctagtgaatggggcgttaggggcctgtctctgcacctgtctgtccatctgcatgcagtattctcacccatgttgaatgcctgctgcttgtttaccctttggaaaccctggggtgaccaaggtttggaaagccacctgagaccacttcatagcaagggaaggctttaagcagttactagaaagagatggggatttggcccctggctcctccagcctgaatgagctatttaatccactgtccatgttcctcatcagtcaaatccaaagtcaaaggatttgaacctgcatctggaaacgtaaccactcacagcacctggcccgccaaggttgggaggattgtacactactttcatttaaaggggaaagtttgataatacggaattaattaatatgaatgagatgcattaataagaacctgagcatgctgagagttgcaattgttggttttctggtttgattgatttccttttttcttagacacatcaaagtcaagaaagatggttttacctttactgacccagctgtacatatgtatctagactgtttttaaatgtctttcttcatgaatgcttcatggggctccaggaagcctgtatcacctgtgtaagttggtatttgggcactttatatttttctaaaaacgtgttttggatcctgtactctaataaatcataagtttctttttaaaaattttccaaaacttttctccattttaaaaagccctgttataaacgttgaactttcacaatgttaaaatgttaaatatttggatatagcaacttcttttctcttcaaatgaatgccaagatttttttgtacaatgattaataaatggaacttatccagagaaaccaaaaaaaaaaaaaaaa

SEQ ID NO: 5831 - DNA, 1003 bp, Homo Sapiens
  NM_033625
gtctgcaggtatggatgttgttctcttttccctgtctttatttccttaccaatcggctgccatccgaggagctgaggaagcctagagctctcagaagcagtcctttgagctggtgtaggggcactcagaatggtccagcgtttgacataccgacgtaggctttcctacaatacagcctctaacaaaactaggctgtcccgaacccctggtaatagaattgtttacctttataccaagaaggttgggaaagcaccaaaatctgcatgtggtgtgtgcccaggcagacttcgaggggttcgtgctgtaagacctaaagttcttatgagattgtccaaaacaaagaaacatgtcagcagggcctatggtggttccatgtgtgctaaatgtgttcgtgacaggatcaagcgtgctttccttatcgaggagcagaaaatcgttgtgaaagtgttgaaggcacaagcacagagtcagaaagctaaataaaaaaatgaaacttttttgagtaataaaaatgaaaagacgctgtccaatagaaaaagttggtgtgctggagctacctcacctcagcttgagagagccagttgtgtgcatctctttccagttttgcatccagtgacgtctgcttggcatcttgagattgttatggtgagagtatttacacctcagcaaatgctgcaaaatcctgttttcccccagagagctggaggttaaatactaccagcacatccctagatactactcaagttacagtatatgatcactaatatagtatgctcttggtaccaggagctctgatatatatctggtacatgtttgataatgacttgattgttattataagtacttattaatacttcgattctgtaaagagtttagggtttgattttataaaatccaaaatgagccttttattgaatccagttctctatgtgaccagttctctgtatgaatggaagggaaaagaattaaaaatcttgcaaaggggaaaaaaaaaaaaaaaaaa

SEQ ID NO: 5832 - DNA, 4004 bp, Homo Sapiens
  NM_033626
ccaaggcatctgccactgctgctgactgccactaccagccggagccagggcctggtcgagacaactatttttgaggcaagactcgtggctgtgacccatgggcctctgaggaggcgttgtaagtccgcccagctccccacttgctgtgctctcactcaatgcgaagggaaccaagactttgtccagccatcagccacggcctctcgacagcaccaagatggaagtcaaaggtcagctgatcagctctcctaccttcaatgccccagctgccctgttcggagaggctgccccccaggtgaagtcagagcgtctgcgggggctgcttgaccggcagcggaccctgcaggaggccctgagcctgaaacttcaggagctccgcaaagtgtgtctccaggaggcggagctgactggccagctgccccctgagtgcccactagagcctggtgaacggccccagttggtccgccggcggccccccacagcccgcgcctaccctccaccgcaccccaaccaagcacaccactccttgtgccctgctgaggagctggctcttgaggccctggaacgcgaggtgtcagtgcaacagcagatcgcggcggccgcccgccgcctggccttggcccctgatctgagcaccgagcagcgccggcgccggcgccaggtccaggcagatgcactgaggaggctgcatgagctagaggagcagctcagggatgtccgggcccgccttggcctcccagtgctcccgctgccccagccactgccactgtccacggggtcagtgatcaccacccagggagtctgcctgggcatgcgtcttgctcagctcagccaagaggacgtagttctgcactcagagagcagctccctctcagagtctggggccagccatgacaacgaggagccccatggctgcttctctctggccgagcgcccctcaccacccaaggcttgggaccagctgcgggcagtatctggggggagccctgagcggcgaaccccatggaaaccacctccatcagatctttatggggatctgaagagccggcggaactctgtggccagccccaccagccccacacgctcgctgcccaggagtgcctccagttttgaggggcgaagtgtgcctgccacccctgtcctcacccggggcgctggcccccagctctgcaaacctgaaggccttcattctcgtcagtggtccggcagccaggactcccagatgggcttcccccgggcggaccctgcctccgatcgcgcctccctcttcgtagctcgcacccgccgcagcaacagttctgaggccctgctggtggaccgggccgctggtgggggagctggctccccgcctgcccctctggctccctctgcctctggccccccagtctgcaagagcagtgaggtgctgtatgagcgcccccaaccaacccctgccttctcctcccgcacagcaggccccccagaccctccccgggccgcccggcctagctcagctgcccctgcctcccgaggtgccccccggctcccacctgtgtgtggagacttcctcttggactattccttggaccggggcctgccccgcagtggcggtggaacaggctggggggagctgccgcctgcagctgaggtcccaggacccctctcccgccgggatgggctcctcaccatgctccccggcccaccacctgtgtatgcagctgacagcaacagccccctcctccgcaccaaggacccccacacccgtgccacccgcactaagccctgtggcctgcccccagaggctgccgaaggccctgaggtgcatccaaaccctctgctgtggatgcccccacccacccgtatcccctcggctggtgaacgcagtggccacaagaacctggctctggaggggctgcgggactggtacatccggaactcgggactggctgcggggccccagcgccggcctgtgctcccttccgtgggcccgccacacccacccttcctccatgcccgctgctatgaggtgggccaggcgctgtacggggcccccagccaggcgccactcccacactcgaggagtttcacggcgccccctgtctctggcaggtatggggggtgcttttactgatgggtaggggtctcgtaaggcagatggcgaagatatccaggccagggagtggctagtcatgatagctaatgaattggaccatgaggaaactagctgctgtgatggcacagggtcactctactgcacatgacctgcattagtccatggggtcctggtggaggggatcttgggcactggtagcagcaattctttatcaagttataggctgaagatgagccttgaagccagggtgccgggaggaagggacatctcatgccccttgctgttttcttccttttttctccatgccccagagcctgaaagtgctgtcctgtgcctgcctccacctctttaacgagcctcttttcctttctttttctgtgtcttgtctgtcttttcttcttcttgtcttccccgccctgtcctccggattcctgctaccccttctaaagatactacgcggacttcctgtatcccccggagctgagcgctcgtttaagtgacctgacgctagagggggagcagtcctccagttctgacacccagaccccggggacactggtctgaccccttctgatatgtcccttgttggcctgggcacgattccaatctggggagcacacagctgacctcgctgggccctggggtgtggttgctctcagtcctgagcagagtgcgccaacctaatcttccaaggcccctggctccccgtaggcccaggaaggtgtctgacaccctgcttcttctctcacactgtgctggggactgggggccctcagctagcttaaaagaggggggatgatgtcatggggaccccaagccccttcctccatttatgtttacagttgtgacttaggtattcactgtcttcctccaacactaggcgttttacaaaagggaaactgtgatctcatctggttgggttcattcctgttcccatgcccaaccaggttccattcaggaaccccctccataaaatggaccatatcgggtctcagggccatttagggcagccaggagactccggtgtgaacagaaatccctgccacgcatcgccagggcagttggggcagtgggctctctgcccacacttggaaggactgcagtctgggtgggatgcctgaaagagcccaaccccctctgtgcccatggcctctgccctgaccacccccagtcaggaggccccacaggaggggcacccggtagatgccagtgaaatcctcaggggaggtctgcctgaaagagcccaaccccctctgtgcccatggcctctgccctgaccacccccagtcaggaggccccacaggaggggcacccggtagatgccagtgaaatcctcaggtgaggtctgcctacgggccacgggccactcaccactcacaccttccttggctttccttccacccttttttttttctcgagacggagtcttgctctgtcaccaggctggagtgcagcggcgcaatctcagctcactgcaacctctgcctcctgggttctcctgcctcaccctcccgagtagctgggattacaggcacacgccaccatgcccggctaatttttgtattcttagtagagacaaggtttcaccatattggccaggctggtcttgaactcttgacctcgtgatctgcccgccttggcctcccaaagtgctgggattacagccgtgagccactgcacccagccccaatccaccactttttaagcaaacccacacaagttgtgttttctatgatacctgtctgtgattttcggagctgggggttcccctacccccttttcctggcgttaagcttttctttttataccagtggatctggacccaagacattacccacactggaaggggatttgtataataaatgtgtaaactgaacccaaaaaaaaaaaaaaaaaaaaaaaaaaaaaaaaa

SEQ ID NO: 5833 - DNA, 8487 bp, Homo Sapiens
  NM_033631
ttgtcagtcccgcggagccagaggaggcgccggtcgctggcagctgagcggcggaacccttcgctggcgggagcgcggttcggggccgcagaggggacattgaataaacctgagtattgtgtgcctgtattttgactgcgacctatcagatgagatcaggtcaagagacaactgcctttgaaagagagtgagtgactgtttccaaaacagcaagcatagggagagccgccggaagtattgacggaaagcttgaattacctacatgattgatgatggtctccagctgtcaaagaagattgtggttgccaagagaaaggtaaccatttctcatccccttgagtggaattggatgcctctaggagcccacattggctggcagtagacatggccgaatttacaagctacaaggagacggcctccagccgccacttgcggtttaagctacagagtctaagccgccgccttgatgagttggaggaagccacaaaaaacctccagaaagcagaggatgaactcctggatctccaggacaaggtgattcaggcagaaggtagcaactccagcatgttggcggagattgaagtgctgcgccagcgggtgctgagaattgaaggcaaagacgaggaaattaagagagcagaggatctgtgtcgtctgatgaaggagaaacttgaagaggaagaaaacctcacccgggagctgaaatctgagattgagcggcttcagaaacgaatggctgaattagagaagctagaagaggccttcagcaggagtaagaatgactgtacccagctgtgtctgagcctgaatgaggagagaaatctgaccaagaaaatctcctctgagctggaaatgctcagagtcaaagtgaaagaactagaatcttctgaggaccgcctggataaaactgagcagagtttagcgtcagagttagaaaagctgaaatcattaactctgagctttgtaagtgagagaaaatacttgaatgaaaaggagaaagaaaatgagaaattgataaaagaactcactcaaaaactagagcagaacaaaaaaatgaaccgagattatacaaggaatgcttctaatctggaaagaaatgacctacggattgaggatggcatctcttccacactgccgtccaaagaatcaagaaggaagggtggtctggactacctaaagcaggtagagaatgaaacaagaaacaaatcagaaaatgaaaagaaccgcaatcaggaagacaacaaagtcaaagaccttaaccaagagattgagaaacttaagacacaaatcaaacactttgaatcgttggaagaagagcttaagaaaatgaagtccaaaaataacgaccttcaggataattacctaagtgaacaaaataaaaacaaattattagccagccaactggaggagataaagctacaaatcaagaaacagaaagagttagaaaatggagaggtagaaggggaagatgctttcctgtccagcaaaggcagacatgagaggactaagtttagaggccacggaagtgaagcttctgtgtccaagcacacagcgcgggaactgtctcctcagcataagcgggaacgactccggaacagggagtttgctctcaacaatgaaaactattctctgagcaacaggcaggtttcttctcccagtttcaccaacaggagggcagcaaaagcttctcacatgggggtgagtacagacagtgggactcaggagacaaagaaaactgaagaccggtttgtacccggctcctcccagagcgaagggaagaagtctagggagcagccctcagtgctgagtcgctaccccccggctgctcaggagcacagtaaagcgtggaaggggacttccaagccaggcaccgagagcggactgaagggaaaagtggagaagacaacacgaacgtttagtgacaccacccatggatctgttcccagtgacccattgggtagagctgacaaggcttctgacacctcctctgagactgtctttggcaagaggggacacgtgcttggcaacggaagtcaagtaactcaggctgcaaactctggctgttctaaggccattggagccctggcctcatctcgaagatcctcctcagaagggctctctaaaggcaaaaaggctgccaatggccttgaggctgataacagttgcccgaattccaaggctcctgttctatcgaagtatccttatagctgtagaagccaagagaacatccttcagggattttcaacctcacataaagaaggggttaatcaacctgcagcagttgtgatggaagacagcagtccgcatgaagccttgaggtgtcgagtcatcaaatccagtggcagagagaagccagactcagatgatgacttggacatagcatctcttgttactgccaagttggtaaatacaaccatcactccagagccagagcccaaaccacagcctaactctagagaaaaggctaaaacccgaggggcacctagaacctccctatttgagaatgataaagatgctggaatggagaatgaatctgtgaaatctgtcagagcctccaccaataccatggagctcccagataccaatggtgctggggtaaaaagccaaaggccctttagccccagagaggcgttgcggtctagagccatcatcaaacctgttattgttgataaggatgtgaaaaaaatcatgggaggatctggaacagagactacgttggagaaacagaaacccgtctccaaaccagggccaaacaaagtgacaagtagcattactatatatccatctgacagcagcagccccagagctgctccgggtgaggccctgagggagaggcacacatccactagcaatatccaggtggggctggcagagctcacatcagttagcaaccatgtcagctccccttttgagctctccattcacaaacatgacatcaccctgcagcttgcagaagcggagagaatggcagatgggcccctgaaggacaggccagaaacagtggtctctcggagcagcattataatcaagccatcggatcctgtggagaggaatagccatgcacctccagcggagacaatcaggtggaaaagccatagtgccccttcagaagtgggcttctcagatgccagacatgttactgtgcggaatgcctggaagagtaggcgagacttgaaatctttagaagaccccccaactcgaataggtaaaaacgtggaatctaccaatagcaatgcctacacccagaggtcttccacagacttctcagaactcgaacagcccaggtcctgcctttttgagcagggcactcgaagggtaggaccaagttcaggggatgcccctgagccctcctccagaaggacccaaagtagcctcactgtgtcagaggtgcttacccgtcggaatcgggtaggagacaccatcactgtcgcagcctggaaccactcagcaagcatggaggaagaaggggaagactgtacactcagtgtctacaggcaactgcacaactccctggatccgtctgaactgcctgggaagcaggggctgccagagtctgggcgagtacgggccgaggaacgattacggccaaccaggccctgtgctgaggagaactgagcccgctgggtgtctgttgtctgccctctgctcctgcttctcagctcttccaccgtcctgccccacgaaggatccaaggccagttaaccaggcaagacacaagccttggctggaaaactgtggtagagccgggctgtggctcaggtaatttttgccatttggccagagggaatcagagactacaagctggacagtcacccaggcccaaccttccccaatgcacgagtcctctctctctccttgtccctgtccaccaagtagttggaccattctggcccccaaacaagggaagataaagtccccagcacacagcaggagtcaaaaattcttctcggctccttggtgggttgtttctggatcctagggcagcctctgtctgtgtggttaatgttctggtttctcagtctcctcactatatccacttcactcctcatttgcccaatgggctcaagtaccccataagatttaccagccatcagctctatctagggggctttcatttctttccccttggagttcttttcttcagacttaaagcagaaaggggtctgtgctgcctctaaaggattatgagactaccctttaggttgaagtttgacctggctcctggcttaccagtctcctggaagcagagcatgcagatactcatgcggatacccattggaatgacatcatccctccccaaccccagctctctctgctcaccttccaaaggcacctggaggtgcaagcctcatgcatctcctttcctgagcaccagtaatgctgctggcatcgcctgctttctctccagtggctggagacttcaagctgacttcattgtttccaccttgggaaaatccctaggctaagctgggcctgacccagcatcctctgccttctaggaagtgcccagcaagagggaaagcagacccctttagtcactccacaagcaatagctccatgagaggcatggactgtgagactactccctcctgttcctccttctccatcccccatggaggaggcatcgcactttaccaagctgatgcattcctacagaagtgggccccggatttctgcaagtcgactatcatgatgacttcgctggaggaaaggtgatacgtacatacgcattgagggcctcagctttatatagttcaaaatgcagcaaacttttcagaaagccacgtaaataaattggttaggttccttataccagtcacatggggaagttgaaaagaattgtatattcttggcagtgctttttctttagcattctgtcaattcaaagaagggatcctctttcaaaggctacctttatgaagtagacactattgccctcagaatgagagaacattaaactaccagtctggtaagctggatttttttccccatggctttacttccttgctgtgtgaccttgggtgagtcattgtcttcttggagcctcagtttccctgtctgtaaaatgagttctttgaaatggatgatctctaagggcaccaaatctggtattctaaggttctcctgttttcaccatctataatagtatgggatgatttttgcttgtggaaggtatcatccgtgtgggttcttccctcctgccctcaattgtttttctgggccttgttttttagtttctgtatgttttaatctcatggggatgagctcagagaagctccgtgggcctgtttcccaatctgcaaagtgtgaagggattagatgggatggtctctgaggctctttgtggcatcagccttgcccagtgccacacagtatctcctggcgttctaggagtctaggtattatggaaagtacccaagtctgtgtatctcctgttcctgtgcatctcctatgaatttcctggcaagaggaagactcaagacttcctccagaggaatttgtcttctctgccttcactcagcatgggaaccagtgttcatcctgaccttgtctgtatcagatttggcagtgaggaggcttggggagcacctaccttactttcagggacaggaatctattgctcatacttctgcttcccagagttttgccaatctaaaggcattgtcatgtggcctgcctttcctgtccacatccccacctctgatgctcaagatgctatttccaagatctcttactgctgcttctcctggcttactggccagaaactagctcactcaaggctgccatccttcacttgcagcctccctgccattctccttcactggttggcaaccttgagagttcaaagaaaatcaacctctgtggtggtcaactaaaggtattaggaaactaagtctgtggctcttctctgctgatggaaacagaagggcgccaagccatgcctaaaaagatctcgccaataattcttgtctttgagtgttggagccctggattctggtgctatagctcctggtgccaaagtctggatctttccacatttcagcagcaccaacatctgctgctactcaaaatgtcctgttgaagagggacagctgtgatgcccttttgctggggctgccatcttgaaatctgagtgcaataggatttgcttgtaacagttatttcaggatattttgtttctttaatctgcacactttctagatagattttatttttaagtgtcctcagcattgcagaaaataacattgtaatagcaagtaaaggctggaggctgtttctctgggcttcaaatggctggcaaggctggctctcaaatcccaaagttgggaggcatgtttctgaaaagcaactgaggtgtgactgtttggacccaggcctcatcatcaggggtcctggaggaagcctccaagtagaggggagacctggtagttgaatagttgtttaatcaagccaaatagtcccactgcccccggtcaacaaacccacttttatgacagttttcttccgcagcttggctcttaaattttactggcaggtgtatggttgttggagggttcctagtgagttgggggacctggcaatagagctgcttggttggaggaagtgaagctggcttagtaccagcagctgatctcttccacgtgctgctgctttttttgccactctgatactaaaccagagaaagctgcaggtggataaagaagctgtggctgttttttgcttttgggtggcaatgagaaagagtcacagtgtgggttaaagggatctgcagtggggccaaggatgccaccccaccctcagctgtaggcaagcttgcacataaataacccccgtcagtggagtgttcgggatgcagggggcactatagtgttcttggacttgtcgtcctggggcagttttagttctttatatttagtgggtcagtgccaagtgctaccacttcccaataaaggaatggggacccagaggctgggtccctggctaccttgttatgaggttttgttatttctctgacaagattgctttggaaagagctgcttttagggattattttttgaataccccgagtggggagcagggttctcctcaaagcctcacaaccataggatcataggaaaggggccctattttcctgctgcttcccagctcagaacatatactgaatggaatgtatttttaagagaataaagtctatttttttgtattttaaagattgagagggctaagaaagtagccctcaaataaactgttattgcattataggcccctttgttgggggcagcctgttggtccacacctacttgctcaggcaggtgctctggtctctctcacccctgccccttagagtctaggtgcagcagctccaagcatgggaccaaggaggccagaacctgtcgctggaaaccagggcaaagcagtggctcagggctccttgggtgcatgtgtatcattggagctgcctgtctgcatgtatcctctggcgcgaatgctctctgttggctctgcagtacaatatgtaaccaataaagctccctcgtttccgtatactctgtgcgagtctgtgatgccagttttgtcaatgtcatccctgtgtatcatctgtcttctatgcgttggcgcagctctagtatatttatttatttcattgtgtaatacttaaaattgggtattttacctaaccaattactgatactgcaaggactggaaacattaactgccctgatcctggtgtgcagattctttccattactgccacgaattctaagactagggggggaaaagccttctccgttttcatcttccagtcagatcaccaatatatataatgatgtcccttaactcacagtaagaaagaataaaaccacatttaagggacattacttggatttgcagtaacagtgtttatcatctatctgtcagtcagtcaggagcccctgggaaggaaccagcatgtaacatgtttttatcatcttatatggcaaaagggactttgcagataaggatgctgggatgaggcagaacatcctagatgatccaggtgggccttaaatgtaatcacaggtagtatccttttaagagagagacaaaagatttgactacaggagaaggcaatgtgatgatggaagcagaaactggagttatgtgctctgaggatggaggaaggagccacgagccttcccacacctagaagctgaaaagagcaaggaaatgaactgatcctccctgctctgagagcctctgtaatgaatgcagccctgtgtacccattttagactttaagcttccagaactttcgaatagatttctgtttttttaagagccactaagtttgtggcaatctgttaaaccagctgttacctaagcccttgatcctatgtagtgcgcttcccaaaatgtacaccaccacctttagtagaattgggaagttttagcacatacccatggagggaatcaggaataaaggcagactggtctcccaaaggctcag

SEQ ID NO: 5834 - DNA, 3896 bp, Homo Sapiens
  NM_033632
ccttccgcagctgccgcttcagtccgaaggaggaagggaaccaacccactttctcggcgccgcggctcttttctaaaagtaatgtgaaaacctttgcatcttctgatagtctagccaaggtccaagaagtagcaagctggcttttggaaatgaatcaggaactgctctctgtgggcagcaaaagacgacgaactggaggctctctgagaggtaacccttcctcaagccaggtagatgaagaacagatgaatcgtgtggtagaggaggaacagcaacagcaactcagacaacaagaggaggagcacactgcaaggaatggtgaagttgttggagtagaacctagacctggaggccaaaatgattcccagcaaggacagttggaagaaaacaataatagatttatttcggtagatgaggactcctcaggaaaccaagaagaacaagaggaagatgaagaacatgctggtgaacaagatgaggaggatgaggaggaggaggagatggaccaggagagtgacgattttgatcagtctgatgatagtagcagagaagatgaacatacacatactaacagtgtcacgaactccagtagtattgtggacctgcccgttcaccaactctcctccccattctatacaaaaacaacaaaaatgaaaagaaagttggaccatggttctgaggtccgctctttttctttgggaaagaaaccatgcaaagtctcagaatatacaagtaccactgggcttgtaccatgttcagcaacaccaacaacttttggggacctcagagcagccaatggccaagggcaacaacgacgccgaattacatctgtccagccacctacaggcctccaggaatggctaaaaatgtttcagagctggagtggaccagagaaattgcttgctttagatgaactcattgatagttgtgaaccaacacaagtaaaacatatgatgcaagtgatagaaccccagtttcaacgagacttcatttcattgctccctaaagagttggcactctatgtgctttcattcctggaacccaaagacctgctacaagcagctcagacatgtcgctactggagaattttggctgaagacaaccttctctggagagagaaatgcaaagaagaggggattgatgaaccattgcacatcaagagaagaaaagtaataaaaccaggtttcatacacagtccatggaaaagtgcatacatcagacagcacagaattgatactaactggaggcgaggagaactcaaatctcctaaggtgctgaaaggacatgatgatcatgtgatcacatgcttacagttttgtggtaaccgaatagttagtggttctgatgacaacactttaaaagtttggtcagcagtcacaggcaaatgtctgagaacattagtgggacatacaggtggagtatggtcatcacaaatgagagacaacatcatcattagtggatctacagatcggacactcaaagtgtggaatgcagagactggagaatgtatacacaccttatatgggcatacttccactgtgcgttgtatgcatcttcatgaaaaaagagttgttagcggttctcgagatgccactcttagggtttgggatattgagacaggccagtgtttacatgttttgatgggtcatgttgcagcagtccgctgtgttcaatatgatggcaggagggttgttagtggagcatatgattttatggtaaaggtgtgggatccagagactgaaacctgtctacacacgttgcaggggcatactaatagagtctattcattacagtttgatggtatccatgtggtgagtggatctcttgatacatcaatccgtgtttgggatgtggagacagggaattgcattcacacgttaacagggcaccagtcgttaacaagtggaatggaactcaaagacaatattcttgtctctgggaatgcagattctacagttaaaatctgggatatcaaaacaggacagtgtttacaaacattgcaaggtcccaacaagcatcagagtgctgtgacctgtttacagttcaacaagaactttgtaattaccagctcagatgatggaactgtaaaactatgggacttgaaaacgggtgaatttattcgaaacctagtcacattggagagtggggggagtgggggagttgtgtggcggatcagagcctcaaacacaaagctggtgtgtgcagttgggagtcggaatgggactgaagaaaccaagctgctggtgctggactttgatgtggacatgaagtgaagagcagaaaagatgaatttgtccaattgtgtagacgatatactccctgcccttccccctgcaaaaagaaaaaaagaaaagaaaaagaaaaaaatcccttgttctcagtggtgcaggatgttggcttggggcaacagattgaaaagacctacagactaagaaggaaaagaagaagagatgacaaaccataactgacaagagaggcgtctgctgtctcatcacataaaaggcttcacttttgactgagggcagctttgcaaaatgagactttctaaatcaaaccaggtgcaattatttctttattttcttctccagtggtcattgggcagtgttaatgctgaaacatcattacagattctgctagcctgttcttttaccactgacagctagacacctagaaaggaactgcaataatatcaaaacaagtactggttgactttctaattagagagcatctgcaacaaaaagtcatttttctggagtggaaaagcttaaaaaaattactgtgaattgtttttgtacagttatcatgaaaagcttttttttttttttttttgccaaccattgccaatgtcaatcaatcacagtattagcctctgttaatctatttactgttgcttccatatacattcttcaatgcatatgttgctcaaaggtggcaagttgtcctgggttctgtgagtcctgagatggatttaattcttgatgctggtgctagaagtaggtcttcaaatatgggattgttgtcccaaccctgtactgtactcccagtggccaaacttatttatgctgctaaatgaaagaaagaaaaaagcaaattatttttttttattttttttctgctgtgacgttttagtcccagactgaattccaaatttgctctagtttggttatggaaaaaagactttttgccactgaaacttgagccatctgtgcctctaagaggctgagaatggaagagtttcagataataaagagtgaagtttgcctgcaagtaaagaattgagagtgtgtgcaaagcttattttcttttatctgggcaaaaattaaaacacattccttggaacagagctattacttgcctgttctgtggagaaacttttctttttgagggctgtggtgaatggatgaacgtacatcgtaaaactgacaaaatattttaaaaatatataaaacacaaaattaaaataaagttgctggtcagtcttagtgttttacagtatttgggaaaacaactgttacagttttattgctctgagtaactgacaaagcagaaactattcagtttttgtagtaaaggcgtcacatgcaaacaaacaaaatgaatgaaacagtcaaatggtttgcctcattctccaagagccacaactcaagctgaactgtgaaagtggtttaacactgtatcctaggcgatcttttttcctccttctgtttatttttttgtttgttttatttatagtctgatttaaaacaatcagattcaagttggttaattttagttatgtaacaacctgacatgatggaggaaaacaacctttaaagggattgtgtctatggtttgattcacttagaaattttattttcttataacttaagtgcaataaaatgtgttttttcatgtta

SEQ ID NO: 5835 - DNA, 453 bp, Homo Sapiens
  NM_033643
gagtagatatcccggagttccgcgcggcgccagcccttccgccacggccgtctctggagagcagcagccatggccctacgctaccctatggccgtgggcctcaacaagggccacaaagtgaccaagaacgtgagcaagcccaggcacagccgacgccgcgggcgtctgaccaaacacaccaagttcgtgcgggacatgattcgggaggtgtgtggctttgccccgtacgagcggcgcgccatggagttactgaaggtctccaaggacaaacgggccctcaaatttatcaagaaaagggtggggacgcacatccgcgccaagaggaagcgggaggagctgagcaacgtactggccgccatgaggaaagctgctgccaagaaagactgagcccctcccctgccctctccctgaaataaagaacagcttgacagaaaaaaaaaaaaaaaaaaaaaa

SEQ ID NO: 5836 - DNA, 2134 bp, Homo Sapiens
  NM_033657
gtctcaggacgggcgctttggagccggccccaggcagcgtgtgtcggtcgcctagtctggagaactagtcctcgactcacggtgagggaatggaccgacacgggtattgtaccgctgagggaaaggagcgggactccggacctccaggagtgcaaggatgatgctgaaaggaataacaaggcttatctctaggatccataagttggaccctgggcgttttttacacatggggacccaggctcgccaaagcattgctgctcacctagataaccaggttccagttgagagtccgagagctatttcccgcaccaatgagaatgacccggccaagcatggggatcagcacgagggtcagcactacaacatctccccccaggatttggagactgtatttccccatggccttcctcctcgctttgtgatgcaggtgaagacattcagtgaagcttgcctgatggtaaggaaaccagccctagaacttctgcattacctgaaaaacaccagttttgcttatccagctatacgatatcttctgtatggagagaagggaacaggaaaaaccctaagtctttgccatgttattcatttctgtgcaaaacaggactggctgatactacatattccagatgctcatctttgggtgaaaaattgtcgggatcttctgcagtccagctacaacaaacagcgctttgatcaacctttagaggcttcaacctggctgaagaatttcaaaactacaaatgagcgcttcctgaaccagataaaagttcaagagaagtatgtctggaataagagagaaagcactgagaaagggagtcctctgggagaagtggttgaacagggcataacacgggtgaggaacgccacagatgcagttggaattgtgctgaaagagctaaagaggcaaagttctttgggtatgtttcacctcctagtggccgtggatggaatcaatgctctttggggaagaaccactctgaaaagagaagataaaagcccgattgcccccgaggaattagcacttgttcacaacttgaggaaaatgatgaaaaatgattggcatggaggcgccattgtgtcggctttgagccagactgggtctctctttaagccccggaaagcctatctgccccaggagttgctgggaaaggaaggatttgatgccctggatccctttattcccatcctggtttccaactataacccaaaggaatttgaaagttgtattcagtattatttggaaaacaattggcttcaacatgagaaagctcctacagaagaagggaaaaaagagctgctgttcctaagtaacgcgaacccctcgctgctggagcggcactgtgcctacctctaagccaagatcacagcatgtgaggaagacagtggacatctgctttatgctggacccagtaagatgaggaagtcgggcagtacacaggaagaggagccaggcccttgtacctatgggattggacaggactgcagttggctctggacctgcattaaaatgggtttcactgtgaatgcgtgacaataagatattcccttgttcctaaaactttatatcagtttattggatgtggtttttcacatttaagataattatggctcttttcctaaaaaataaaatatctttctaaagtgttgtgttagattaataatatggaaggagtctttagattggccaaattgcatttctctgatattcctcttgttgcaggtcagaagagatcaattctacagaaatttccagtggttctgttgaggctttatggaattcagcatgtcaaaattcacagctggctgggcacagtggctcatgcctgtaatcccagcactttggaagcccaaggcgggcagactgcttgagttcaggagtttgcaaccagcctgggcaacatggtgaaaacctgtctctactaaaaatacaaaaattagccgggcacggtggcatgcgcctgtaatccaagctacttgggaggctgaggcaggagaattgcttcaacttgggaggcggatgttgcagtgagccaaaattgcaccactgcactccagcctgggcagcagagcaagactccgtctcaaaataaataaataaataaataaataaataaataataaaaaaaaaaaaaaa

SEQ ID NO: 5837 - DNA, 1524 bp, Homo Sapiens
  NM_033661
gcgtcaccgaccggtgcggacaggaagaggctctgggctggcacatgtgtatggcggtgaggcgggcgggtacatggcgggctctgtgggactggcgttgtgcgggcagacgttggtggtgcggggcggcagccgattcctggccacctccatagcaagcagtgatgatgacagcctcttcatctatgactgcagtgctgcagaaaagaagtcacaagaaaataaaggggaggacgcgcccttggaccaggggagcggtgcgattctggcgtccaccttctccaagtctggcagctattttgctttaaccgatgacagtaagcgtctgattcttttccgtacaaaaccatggcaatgtctgagtgtcaggaccgtggcaaggaggtgtacagccctgactttcatagcctcggaggagaaggtcttggtggccgacaagtctggagacgtctactccttttcggtgctggagccacacgggtgtggccgtctagagctggggcacctgtctatgctgttagatgtggctgtgagtcctgatgaccgcttcatcctcactgccgaccgggacgagaagatccgagtcagctgggccgcggcgccccatagcatcgagtccttctgcttggggcacacagagtttgtgagccgtatctccgtggtgccaactcagcccgggctgcttctgtcctcctctggggacggcaccctgaggctctgggagtacaggagcggccgccagctgcactgctgtcacctggccagtctgcaggagctggtggacccccaggccccccagaagtttgccgcgtccaggattgcattctggtgccaggagaactgcgtggcgctcctgtgcgacggcactcctgtggtctacatcttccagctggacgcccgcagacagcagttggtgtacaggcagcagctggcgttccagcaccaagtgtgggacgtggctttcgaggagacccaggggctgtgggtgctccaggactgccaggaagcccccctggtgctctacaggcctgtgggcgaccagtggcagtctgttcctgagagcaccgtgttaaagaaagtctctggtgttcttcgtgggaactgggccatgctggaaggctctgccggcgcagacgccagcttcagcagtctctacaaggccacgttcgacaacgtgacctcctacctgaagaagaaagaggagagactgcagcagcagctagagaagaagcagcggcgccggagtcccccgcctgggcccgacgggcatgccaagaagatgagaccgggggaggcgacgctaagttgctgatcgtggcggtctgtttctgtcgactgtggaccacttatgtgcgatccgtggaccacttgcgtgcgatctgtcggccgacgatgagcttgttcggatgtagctccatcgtaagtcgaggagcatctgtgatttgtcctctgcttatgggatatgtttttccgctactgagtctgtgtagtaaatttttgactaggaaaaaaaaaaaaaaaaaa

SEQ ID NO: 5838 - DNA, 2329 bp, Homo Sapiens
  NM_037370
tcctcccgctgtcccccacggaggggactgctctcccccgctgcatcctttctgtgaggtaccttacccacctcagcacctgagagggtgaaatagaattctaacctcgacattcgggaagtgtttttgagaagtctcggtcggtaagggaagtcttccaagtccgtgcagcactaacgtattggcacctgcctcctcttcggccaccccccagatgaggcagctgtgactgtgtcaagggaagccacgactctgaccatagtcttctctcagcttccactgccgtctccacaggaaacccagaagttctgtgaacaagtccatgctgccatcaaggcatttattgcagtgtactatttgcttccaaaggatcaggggatcaccctgagaaagctggtacggggcgccaccctggacatcgtggatggcatggctcagctcatggaagtactttccgtcactccaactcagagccctgagaacaatgaccttatttcctacaacagtgtctgggttgcgtgccagcagatgcctcagataccaagagataacaaagctgcagctcttttgatgctgaccaagaatgtggattttgtgaaggatgcacatgaagaaatggagcaggctgtggaagaatgtgacccttactctggcctcttgaatgatactgaggagaacaactctgacaaccacaatcatgaggatgatgtgttggggtttcccagcaatcaggacttgtattggtcagaggacgatcaagagctcataatcccatgccttgcgctggtgagagcatccaaagcctgcctgaagaaaattcggatgttagtggcagagaatgggaagaaggatcaggtggcacagctggatgacattgtggatatttctgatgaaatcagccctagtgtggatgatttggctctgagcatatatccacctatgtgtcacctgaccgtgcgaatcaattctgcgaaacttgtatctgttttaaagaaggcacttgaaattacaaaagcaagtcatgtgacccctcagccagaagatagttggatccctttacttattaatgccattgatcattgcatgaatagaatcaaggagctcactcagagtgaacttgaattatgacttttcaggctcatttgtactctcttcccctctcatcgtcatggtcaggctctgatacctgcttttaaaatggagctagaatgcttgctggattgaaagggagtgcctatctatatttagcaagagacactattaccaaagattgttggttaggccagattgacacctatttataaaccatatgcgtatatttttctgtgctatatatgaaaaataattgcatgatttctcattcctgagtcatttctcagagattcctaggaaagctgccttattctctttttgcagtaaagtatgttgttttcattgtaaagatgttgatggtctcaataaaatgctaacttgccagtgattaaatgagtgcccttccaaagtttctttttaccagaaatacagtggattgagactagaacattgctttcatttgggtttgtaggtttaaaaatctgattctaatcagaagtatatttagaacaaaacactttatttataaaagatgactccaaaattcatcttagtatttcaccatgttatatattattatcagcaagtccttctgaatattatcacagattactccatgtctctaaaatatattggcattgagctcatttgttaggtttgcccaccttattgaacagatttattttccttatacatacttgtgttgtccttggttacgtgtgtccccaaatgtaaataccaaatttttataaatcaaaaattttttagtgtgtaagagattttatgtaattttaagggccttttcagttcatccttttgcaaaaccatcaccacttaattatacttttgcatcagtctagaagactgcatattggaaagcagtgtaaatctataatgatgtatattctggtgagctgaatagggcattatgcatgtcctacaggtctccgccacctctcatgcccatcatcttccttttgtaggtgtaattcataacatatgcctttctgctgtctttaggtataatcagcaacagcagtcattctttgagtgactaatgtatacttggggttggggttgaaattccttaagccaaatgagttttagcttactgttttgaagtgccattttgtattgttaacaagtgtcatgaagggaaggaactaaaatcaaactgacagagtgtcaaggcaacaaaataacataaacaaaataataacattgtaaaaaaaaaaaa

SEQ ID NO: 5839 - DNA, 2147 bp, Homo Sapiens
  NM_052813
gactgtggagttaagcagaacccatcaggaagtgcacaggcgtccggcgtgctcctccctccctgcagccccgggcagcatctcccagaggctccgcggcccaggctcctggtgtgtctgcagtgcaggtggctcctggaagaccctcagcctgcctgctgaggccatgtcggactacgagaacgatgacgagtgctggagcgtcctggagggcttccgggtgacgctcacctcggtcatcgacccctcacgcatcacaccttacctgcggcagtgcaaggtcctgaaccccgatgatgaggagcaggtgctcagcgaccccaacctggtcatccgcaaacggaaagtgggtgtgctcctggacatcctgcagcggaccggccacaagggctacgtggccttcctcgagagcctggagctctactacccgcagctgtacaagaaggtcacaggcaaggagccggcccgcgtcttctccatgatcatcgacgcgtccggggagtcaggcctgactcagctgctgatgactgaggtcatgaagctgcagaagaaggtgcaggacctgaccgcgctgctgagctccaaagatgacttcatcaaggagctgcgggtgaaggacagcctgctgcgcaagcaccaggagcgtgtgcagaggctcaaggaggagtgcgaggccggcagccgcgagctcaagcgctgcaaggaggagaactacgacctggccatgcgcctggcgcaccagagtgaggagaagggcgccgcgctcatgcggaaccgtgacctgcagctggagattgaccagctcaagcacagcctcatgaaggccgaggacgactgcaaggtggagcgcaagcacacgctgaagctcaggcacgccatggagcagcggcccagccaggagctgctgtgggagctgcagcaggagaaggccctgctccaggcccgggtgcaggagctggaggcctccgtccaggaggggaagctggacaggagcagcccctacatccaggtactggaggaggactggcggcaggcgctgcgggaccaccaggagcaggccaacaccatcttctccctgcgcaaggacctccgccagggcgaggcccgacgcctccggtgcatggaggagaaggagatgttcgagctgcagtgcctggcactacgtaaggactccaagatgtacaaggaccgcatcgaggccatcctgctgcagatggaggaggtcgccattgagcgggaccaggccatagccacgcgggaggagctgcacgcacagcacgcccggggcctgcaggagaaggacgcgctgcgcaagcaggtgcgggagctgggcgagaaggcggatgagctgcagctgcaggtgttccagtgtgaggcgcagctactggccgtggagggcaggctcaggcggcagcagctggagacgctcgtcctgagctccgacctggaagatggctcacccaggaggtcccaggagctctcactcccccaggacctggaggacacccagctctcagacaaaggctgccttgccggcggggggagcccgaaacagccctttgcagctctgcaccaggagcaggttttgcggaacccccatgacgcaggcctgagcagcggggagccgcccgagaaggagcggcggcgcctcaaagagagttttgagaactaccgcaggaagcgcgccctcaggaagatgcagaaaggatggcggcagggggaggaggaccgggagaacaccacgggcagcgacaacaccgacactgagggctcctagccgcagcagcgcaggccccgaccagggcacacccaccggcccggcctcctgccacccgggggtgccgacgccctggggcgcagacttccccgagccgtcgctgacttggcctggaacgaggaatctggtgccctgaaaggcccagccggactgccgggcattggggccgtttgttaagcggcactcattttgcggaggccatgcgggtgctcaccacccccatgcacacgccatctgtgtaacttcaggatctgttctgtttcaccatgtaacacacaatacatgcatgcattgtattagtgttagaaaacacagctgcgtaaataaacagcacgggtgacccgcaaaaaaaaaaaaaaaaaaaaaaaaa

SEQ ID NO: 5840 - DNA, 7255 bp, Homo Sapiens
  NM_052817
gtttctccggtcactcctgccaggggagaagacatgtaaacgtgcctccagaggaagggctgggggagctgggagtggcgggggcggcggaaggtgagcctgggaaggtggccgagcaccccttcttcttgggcccttcccagtgctcccttggggtgtcagccccagccccgtttgcccccactccgcctcccttttggaagggattgccttttttttcctctgcggcggcggaaatgacagtgtggtgctgccgtggtgtcatggtgctgcccctggactgaggggcgaaaactcttaagtttagctcgggaggcccagctgcggtagcatcgcggccgccgtgctgtcccctgcggggcgcgcgggctggcggatcccggctgctgcgcggcgtcggcgacggtagcggcagcggcggcgaaggcgggcggcggcctacagtggtagcggcggcggcggcgaccggggcccgggagctcgcgccggagcccgagccaacccgctgcggaggcagacgagagcccagcgccctcgagcgagcggaggagatggctggcacctgggaacgctatgggtgaaagcccagcctccgtggttcttaatgcctcaggaggactattttcactaaagatggaaacactggagtctgaattgacctgtccaatctgcctagagttgtttgaagacccccttctgctcccttgtgctcacagcctctgcttcagctgtgcccatcgcattttggtatcaagctgcagctctggtgaatccattgaacccattactgctttccagtgtcctacctgcaggtatgttatctcgctgaaccaccggggcctggatggcctcaagaggaatgtgactctgcagaacattattgatcgcttccagaaggcttcagtcagtgggcccaattcccctagtgagagccgccgggaaaggacttacaggcccaccactgccatgtctagcgagcgaattgcttgccaattctgtgagcaggacccgccaagggatgcagtaaaaacatgcatcacctgtgaggtctcctactgtgaccgttgcctgcgggccacgcaccccaacaagaaacctttcaccagccaccgcctggtggaaccagtgccagacacacatcttcgagggatcacctgcctggaccatgagaatgagaaagtgaacatgtactgtgtatctgatgaccaattgatctgtgccttatgcaaactggtgggtcgtcaccgagaccatcaggtcgcatccctgaatgatcgatttgagaaactcaagcaaactctggagatgaacctcaccaacctggttaagcgcaacagcgaactagaaaatcaaatggccaaactaatacagatctgccagcaggttgaggtgaatactgctatgcatgaggcaaaacttatggaagaatgtgacgagttggtagagatcatccagcagaggaagcaaatgatcgctgtcaaaatcaaagagacaaaggttatgaaactgagaaagttggcacagcaggttgctaattgccgccagtgtcttgaacggtcaacagtcctcatcaaccaagctgagcatatcctgaaagaaaatgaccaggcacggtttctacagtctgcaaaaaatattgctgagagggtcgctatggcaactgcatcttctcaagttctgattccagacatcaattttaatgatgcctttgaaaactttgctttagatttttccagagaaaagaaactgctagaggggttagattatttaacagccccaaacccaccatctatccgagaagaactctgtactgcctcccatgacaccattacagtccactggatctcggatgatgagttcagcatcagctcctatgagcttcagtacaccatattcactggccaggctaacttcatcagcctgtataattcagtagacagctggatgattgttcccaacattaaacagaaccattacacagtgcatggactccagagcgggactcgctacatcttcatcgttaaagccataaaccaagccggcagccggaacagtgaacctacccgactaaaaacaaacagccaaccctttaaattggatcccaaaatgactcacaagaagttgaagatctccaatgatggattgcagatggagaaggatgaaagctctctaaagaagagccacaccccagagaggtttagtggcacagggtgctatggggcagcaggaaatatattcattgacagtggctgccactattgggaggtggtcatgggttcctcaacatggtatgcaattggcattgcctacaaatcagctccaaagaatgaatggattggcaagaatgcctcctcatgggtcttctctcgctgcaatagtaacttcgtggtgagacacaacaacaaggaaatgctggtggatgtgcccccacacctgaagcgtctgggtgtcctcctggattatgacaacaatatgctgtctttctatgacccagctaactctctccatcttcatacttttgatgtgaccttcattcttccagtttgtccaacatttacaatctggaacaaatccctaatgatcctgtctggcttgcctgccccagattttattgattaccctgagcggcaggaatgcaactgcaggcctcaagaatccccttatgtttctgggatgaaaacctgtcattaagtttcaggagagtatataattcactggctctctagttcagcagttcttcccctcctacacctaagttagcgttcaatatacgagacacaaaataaagtttgtttgaagcatccaaaataactagatattgcagatttaatttttgtgcattaaagcttgtatttgaattaatttattgagtttttcagaacaaattatctgagtagtctgcgttcaagccattggagaaaaatttagaaaatgcctctgttgtcattggagaattaaaaattcccaatgatttaagaatataaattatattggaagcaattagggtaattctagttaaataatgtggaaaggtgccctgaataaggagctagcaagccagagcggggggtggtcagcctttctagtactggccagtttggccatgtagaattttgaacagtgtcaaattatcacatattatattttacttttgatgaaaacctatcatcaagggtttgttaggaaaccatgaatgtgtatatgtaatatataaagtgaacatatatgtactttatatatattcacttgtgtatgtatgtttatgcatattcactttatatattacatatacacaaaaaacttttttttccaaacaccacctcgaactagaacaaaaaactttttaatttgctaatttgagtgagaaatatactggaagggaaaataagttacaccatccatttttgtcccctaaaggaaacatcaaaatcaatcaacatttatttcctccctctatccatcattgccttcctccctcctgtcacgcacacatacacatgcaaccatgacacagataatgggaagagctttattggattagcagagatttacagacaagattgcacaagagatgctgttgctggatagaaaattgatcaggtagaagtgatgctacctacttgaggatggccatctgaattgttaaaaattctgtcatagactattaaaaaaaaagttttactactcccaagtacacacagttatgagaattaggcttttaaaaagttgcacagtgaaggctctttaggaacctactttacttaatcagtaaaaattgagtattattgatgcaccaactattcccatataaatgtacttgctttttcagataaaacacttctgaagtgctcaagaatgtctgaaaacagtttgttttcttaaataggataaataatcattccttttgcaatcttgtttacagtattcattctcttagccaatccctccacgcaaatggagacaaacttcatcccagtcctaaccagtatagttgaagggaatggagccttgtagtctatgatttttttttttaaatttccatcgaagggattggggatgtcagagagccagagctttcccctttccaggagctaagttggcttcggaagtcttctgggatttgtgaaaatattactgttgtaaaattacaaagtggtagccataacaactccctcagattggagacttgaaatgtcaaaactcccctcttcctttcccctagtttggtggatgctcatttattaattcattcaataaactattagatgccaggtaccaaactactgccatgggagtgcacatattaacaaaatgctctacctgctgccaaatggcttactattctgtggaagaaacaaagtatataatcctccccaataacagttatgtattgtttgttcacttaatgtggaaggcaagactgatgcagacacacaaggaaggctcaaaaatataaatctagcagcaatgtcatcttttttgattttaaataccatatgtgcttactgctaatcaggaaatgaacaacctcagtaaaattcatcagtgctggtaaatagtttgctgtagtggaaagctcataacctttggattcaaatgatcctagtttctgtaccatttattagcgttgtgacctaggacaagtacctcacttctctgagcctgtttcctcctctgtaaaataatgtctacttcacaaggctgtttcaaaggttaaaaaagatagcatatgtaaactgtcttagctcagcgcttgacatttcctaagtgtgccataaatattaatctctttccttactcccagctccaatacagcgtaacagtgctttaaaatgtatgtccttcatttctccttcatttctcagtcacctttgtctcttccctagggcatatccccaaattcttaaacaaaaaaaaatgatttttttccccttcatcaaacttttcactggctcccttagcacccagtagaaggtcccaactccttacagagtctgggttttcatgtccctgtttgcttacacagcttaatcttttgccactttccccctcacattgattaaggtagccaagtttaactatttacacaactattcacacaagttattctctgggcctgcagcagaaacatgattaacaattttaatgcccagagtaaacaacagaaatttttcttaaattaaaggaatagtgtgaaaatgctgtaagtacagaaaatgcaacctccattccagtagaacaatttcctttgccttgtccttggctctccaaaactgttcatttattgtggtgtcttttagattttagtgccctgggacaaagatctaatttccccaccctacttttgactctatcctggactacctttcctcacctctatctctctcaaccagactaactctttattccttagacttgatgatgcatccctctttagagatccaaagacaccccaagcatccccctctctcagcaataatcacattgtatagcagtgtttttcaaagtgtggtcctcacaccgcctgtgttagaatcacctttagtgtttgttaaaagaattgattttgggttcccactcctgacctaaccagaatatctgagaacataggcaggaatttacatttttgacaagctcctcatgattctgatgcaccaaaaattttaatgaataatcatcttccctactagactgaacaccttgagaggaaggactgtgtcttttattgttgttatattgttaatacctggcacagtgcttggaacattagcttggctaatgtttattgaatgaatgtatgaatgaaaaaatgcattatgaaagtttcctcttgtactctcatgttcgtagtgatgtttgttacttcctgggcagaaaagcttggttactactccatttgagctgtattaattctattttgcagagatatcaaggctcctacataataaatgatcattgtcctcctcaaaaactctttggcagttatcttggggaaatgtctttggagcatatggcaccattgttttcagtaacatttcagtcttgtcaaactttgttgtttgaaggtggatttacatttcggttatagccaaaaatcactcaaagctaagcctacttaaaaaagtggggaattaaactgggtttggagtaagcaatgaagtttgactctgaagtcccaaattctgagtcaaacagtgaaaaatgacttctaagatacaacatggtgacaaagtacttagtgggggtgcgatgggccccagatatttacttcagttaacttggcttttatagaatcctggcaatgccatggaccttaagagaagtaattggctacctctagctaaacccagctggacaaagagaataggacttgtatttaacattttcaaagaaggtgactgcataagcttttgttgttgttgctctactcaacctgttctccacaactgtttctaccagaagattattttatgtctgcaatttatgcttgtttccactttttatattgtcttattgaagaaagcacaaaaataatcaaaaataaagtaaaacctgttttgagagtatgaaagaaattttaatgccacattgaggttctggctacttgtaagtaagagtaactgcatctggatgtgtttttattatacaattctatgtgtatctttagatgcagtgaaattcagattgcagcaaaatcacttatctgttcttttcggctaaaacactctaggtgaattttctaaacttccatggtttacatatttatatatgactaccaagatggagcaatccacggatggacttttgaataaactcaaatatttgatactgcttcctccaaggaatggagagtgtcaggcaggtaggtaagaaccactcctacacttatttctagctcctgaagccaactgcagccttggagccaatggctgtatttggctgtgtgttacaggttggccaaactgattgccatcaggtcagacaaaactgccttttatggtgtagtctgccagcttcagacatatgctgtattgttgttattggctagactatttattagactattgttggactattttttatcaaatgctttaccccacgcctgtttgtattgggagctctggaccaatagtgtctctcctagtgacagaaatatgagcatctgtggattacacagcctcatccctctctacaatattccagcccatccaaaatgctatattatgaattaaataaatatatatgtattcatgaa

SEQ ID NO: 5841 - DNA, 5507 bp, Homo Sapiens
  NM_052820
ggctgcagggggaggcggcggcggctctgggcgccgggagtcggcgggcggcgaggagcgcggagccggagctggacgccgccgccgccaccgccacctgcgcggcagtcatcaagatgtcatggcacccccagtaccggagctccaagttccgtcatgtctttggcaaaccagccagcaaggagaactgctacgactccgtgcctatcacccgcagcgttcacgacaaccacttctgtgccgtgaacccccacttcattgcagttgtgactgagtgtgctggtggaggggccttcctcgtcatccccctgcaccagacagggaagttggacccccactacccaaaagtctgcgggcacagaggcaacgttttggatgtcaagtggaacccttttgatgattttgagatcgcctcctgttctgaagatgccacaattaagatctggagcatccccaagcagctgctgaccaggaacctcacggcctacaggaaggaactcgtgggccacgcgcgcagagtaggcctggtggagtggcaccccacggccgccaacatcctcttcagtgctggctatgactacaaggtgatgatctggaacctggatacaaaggagtctgtcatcacaagccccatgagtacgattagctgtcaccaagatgtgatcctctccatgtccttcaacaccaacggcagcctgttggccaccacctgcaaagaccgcaagattcgggttattgacccccgagcagggaccgtcctccaggaggccagctacaaagggcaccgggccagcaaagtgctgtttctggggaacctgaagaagctgatgtccacaggcacatcccgatggaacaaccggcaggtggccttgtgggaccaggataacctctctgtgcctctgatggaggaggacctggacggctcctcgggcgtgctgtttcccttctatgacgcggacaccagcatgctctacgtggtggggaagggagatggcaacatccgctactacgaggtgagcgccgacaagcctcacctgagctacctgactgagtaccgctcctataacccacagaaggggatcggtgtcatgccaaagagaggactcgacgtgtcctcctgcgagatcttccgcttctacaagctgatcacaaccaaaagcctcatcgagcccatctccatgattgtgccccggcggtcagaatcctaccaagaggacatataccctccaacagcaggggcccagccctccctgacggcccaggagtggctcagcgggatgaatcgagacccaatcctggtgtcccttaggcctggctctgagctgctgagaccccacccactgcctgcagagagacctatcttcaattccatggccccagcctcaccccggctcttgaatcagacagaaaagctggctgcagaagatggctggaggtcttcctccctgttggaggagaagatgccaaggtgggcagcagaacacaggctggaggagaagaaaacctggctgacaaatggctttgacgttttcgaatgccccccaccaaagacagagaatgagttgctgcagatgttctaccggcaacaggaggagatccgaaggctccgggagctgttgacccagcgagaggtccaggccaaacagttggaactggagatcaaaaacttgcggatgggctcagagcagctctgagcagagacctctgccctcctcaccctcagggacaccactcggctccatggggaggtttagaaccaaaccacaagtcccctcaaggacaaccactatttctatattttttaccagaaaacaaaactctccatcgctgaaagagattccagtgggacatggtgccgtttttctgtttgccttcttgcaacaacagtttctgaattgactttgttttcagatgatgccttctgttgaattctgttattaagggcccatgatgagctgtaacttctcaagaggaaagaacacagtagaaaactagagctggaaggatctaggttgacctgtctgtgattttcaaactgtggtccagagaataggggaagactgggccagacgcagtggctcatgcctgtaatcccagcactctgggaggctgaggtgggcggattgcttgaggtcgggagtttgaaaccagtctcaccaggcgcagtggctcacgcctgtaattccagcatgttgggaggccgaggctggtggatcacgaggtcagcagttcgagaccagcctgaccaacatggtgaaaccccatctctactaaaaatacaaaaaaattagctgggcgtggtggcaggcgcctgtaattccagcgacttgggaggctgaggcaggagaattgcttgaaaccggaaggcgggggttgcagtgagctgagattgtgccactgcactctaacctgggcaataagagcaaaagtctgtctcaaaaaaaaaaaaaaaagaaagaaaccagcctggccaacatggtgaaaccccgtctctactaaaaatacaaaaattaggcagggcgtggtggttcacgcctataatcccagaactttgggaggccaagctgggcggatcttctgaggtcaggagttcaagaccagcctggccaacatggtgaaaccccgtctccactaaaaataaaaaattaaccaggcatggtggtgcatgcctgtaatcccagctatttgggaggctgaggcaggagaatcgcttgagcctgggaggcggaggttgcagtgaaccaagatcatgccacttcactccagcctgggtgacagagtgagactccgtctcaaaaaaaaaaagttggccagccgtggtggtgagcgtctgtagtccctgctattcgggaggctgagataggagaattgcttgaacctgggaggtggaggttgctatgagccacgattgcggactgcactgcagcctgggtgacagagcgagactccatctccaaaaaaaaaaaaaaaaagagagagagaataggggaagactaagcaggaaggctgtgtctcccttccccacactgtattccaaccagacagctcccttctattttatatgttgggctagtatgaaaaacaattctgctaggaaaaaaaaatttttttagaagtttgaaagctagtgatttgacccaagttcctcattttacagctggggaaactaaggcctagagagaggcaagtgatatttgtttcatggcagggctgggctgagatcctgcttttctgggtctgtctttttgctcttttgggtctgatgcagttctcagcccaaagagtagaaatctgttgcttctggcctcagctgtgccccagcttactcagtgacctcttgcaagtcctgccctctctggtctcagtttcttcatctgaaccaggggtaccctggaacaagctgctctctgcaggatctgccacctgaaaccttgacctaagagaaaactacctgtggggtgatctgggtttgctacagaaactaacggacactggcaaggggtcagaggcattcaacccaattctacaacacaggcaggtggtcaaaaccaacctttccaaccagaatcagcctgatatggatagatgctgtcccttatggagggacgcagacttcagaactgtgcccatgactgctgactgccaccaccaaggccctcaggtacacagcctgcctcctgcaggatgatgtgggcagatttcagccctagttaacagaagagtcccccaggaggtagggggcccccatcactggagacatgccagcagagcctctggccacctaaccaggaggtcttctgaaatgactatacgaggtaaagaagtagtaccagatggtcccaaagttcccttttagcctgaaagcttttctttgtccctccttagtgaatctgtgttccgagccctactctaaagttcagtggtcaatacaatagtccaccaagagactgggaatgattagaagtgaaattggtccctccttaccaaggaggggcagatgatctccattgcacagggcgattagattctggagctgaggtggggactgcaggaggccacctagtctggtaggtttcaacccaagctgtgtacattagaattcccttgggagcgtgcaggaaatacagatgcccatgccacattccagaccaactgaagctgaatctccagagtagggcctgtatggtcatataagctccacaggtgatctgcagtacagtgaagatggaagactgcatgtgtacctatttgcaataaagatgaagaggacagcaagctccagacaggagctgggactcaacccagatctcttaagtcctgcctggtggctccttaaaagtccagaagtgttgccccaagccctccctcaacatctctgggaaccgcagctgcagcacgatgggggttcagtgcccctgtttgccccttacccagctgtggtttattctgcttgtatgtctgcacaggccggatgctcgtgttccttgtcttattctccatttactcagtcactggggctcactcccgtctgatgcactagccaagattgccttagtgtgctccagaaaagaaggccaaatcccaggcattgtcagggcagcagagctctacaggataggcttacctttcccacctgtgtggctagcacttcacagtttacaaattcctcccacctccactcagtgacacatgctgttctaacacaggtcaggcaggcattacagtccccatgttcagaatcaaagacctagcctcagagaagtgaagaaacatcatgccaaggtcattgactgccaagcggtagaggtggggttgcatccagagagcttcccggtatgcctctgcacaatgccattccttggccagctccctccaccccaagggacccagactgcacacttaacaaacaggacacaggtgtctttgaacaaacttttttgtattattatttttacatctagaataaattatttaaattatttcacagcaagggagagggataggtaatttttatcagatatttttttaaaccatctgttttttaaattacatttttgtttatgttcttgagctgatgtagtggaacttgcctagcacattcaggtcccagccagttggcagagcatgctctcatctccttattccataccctgggcgtcccctttctgttgactcaggaactttctgagaatgaggacagcactaggagatgagctttggcaggtatccaccttaacgctacaataattgtgcttcctgaaacaaaacttgagattgtatcatagaaggaaacaggaagtcagaaatcaaatctatgcttttaattgaaaccgtgcctgaaacagtttgaatgattgttttaatgttgtttctgaaattccttgtacctttgtgaaaaataatgataataaataaaagtgaaaataaatagatgtggaatatgcaatggaaataatgtaacaaaataataaacatctggccattttactacaaaaaaaaaaaaaaaa

SEQ ID NO: 5842 - DNA, 3033 bp, Homo Sapiens
  NM_052828
gagtgtgtgacccagcccttcccccgtggccaagcagagagagtggccttgaggaagccatagcagcaggaccagcatggcctctgctgcctctgtgaccagcctggcagatgaagtcaactgccccatctgtcagggtaccctgagggagccggtcactatcgactgcggccacaacttctgccgggcctgccttacccgctactgtgagataccaggcccagacctggaggagtcccctacttgcccactctgcaaagaacccttccgtcctgggagcttccggcccaactggcagctggctaacgtggtggagaacattgagcgcctccagctggtgtccacactgggtttgggagaggaggatgtctgccaagagcacggagagaagatctacttcttctgtgaggatgatgagatgcagttgtgcgtggtgtgccgggaggctggggagcacgctacccacaccatgcgcttcctggaggatgcagcggctccctatagggaacaaatccataagtgtcttaaatgtctaagaaaagagagagaggagattcaagaaatccagtcaagagaaaataaaaggatgcaagtcctcctgactcaggtgtccaccaagagacaacaggtgatttctgagttcgcacacctgaggaagtttctagaggaacagcagagcatcctcttagcacaattggagagccaggatggggacatcttgaggcaacgggatgaatttgatttgctggttgctggggagatctgccggtttagtgctcttattgaagaactggaggagaagaatgagaggccagcaagggagctcctgacggacatcagaagcactctaataagatgtgaaaccagaaagtgccggaaaccggtggctgtgtcgccagagctgggccagaggattcgggactttccccagcaggccctcccgctgcagagggagatgaagatgtttctggaaaaactatgctttgagttggactatgagccagctcacatttctctagaccctcagacttcccaccccaagctcctcttgtccgaggaccaccagcgagctcagttctcctacaaatggcagaactcaccagacaacccccaacgttttgaccgggccacctgtgttctggcccacactggcatcacaggggggagacacacgtgggtgtggatggccagggtacctggggactcaggctgctgccagttctgctcaccaccatccgtgcttggcacagaagtagctgcatagaaagggcactggatttgaagtcagaagacctgggttcttgaaccagcctgtcaaccagttgtatgactttaaacaaggcatctcacctcttttcatcttgttttcttccaataatgttagagttcatgtaatcacattctctagaaccatttagtttgtgttaactatgaaccaagcagtgtggtggccactggtgacttgaaaatatagagaaaaaaaaaacctgctctatatctgaaagagctcttgggaagacagagaaacataaagaggaaattacagcacagtgtggtgggtgttacgggaagtccaaccccagcattatgggagttcaggggaaggggcatagcccagcctggaaggagagggtgagtgggggatggctttctgaaaagggtggtctaaaggatgcctatggtcaatagggaaaagaggggaagaagcatcttaagaagaggaaacagcagagaactggctggatgacctgtgactctggagcactgggttgtctccattgtcattatgggcagatgtgtgccatccccagccgacgccactcactgcctccttcctcctggtgttgccacttctgggtgagattaaggtgcagggcctgggggcaggaggacataaggtatagccataaatcataacccagggaccacactcaaccctagggaaattgtcttcctgatcagttgattaccatctgaggtcaagaaatgagatagtgggagcaaatgggtcacaaatagctcagctgtgggctcagaaactgctaggtaaaagaattccagaaggaggccagggcataagttggatgacctatgaactttagtctaaagaattgagactaccgtaattgagactactgtagtgacatctgagaaatgggatggaagagtgaccatgttttattttcttgttcttgtcactattgtattttattttgcataatcatgcccttcactgacagtctccttaacatcatctgtttactctgctcagtgtaaactacaatgctctgtcatctccctactgggtctcctgggaggaggggagccatccagggtgcaaactcaaaggcagagggcacagcgtgcttaggcccaagcttagaattcaattgagaagttctgttgttcatccttacctcagcaggtagaaaagaggtggagatcagaagccagggattagagattgaattgctttccctgggagtgtgcagtatctcattaaaatgttgtatattcaaaaaaatacagacacacacaagtgcctatataatgataaaacatatccaaagcacccaaacctgtgattccagaaaagtagatcctatttttgtttatttttattggctttagctgtgtcttttgaaaggactattatcctctaaaatgtatgtgtatgaagatcctggcttgcagctcgggagctttacacaccttgtgtcactttatcttggtaacgagccaagatcatgcaaccagttcatccatgtctgacccaagagctcttaactgctatgctgcactgcctcattcagagatagatgcctgcatgggtcctggcgattattttaatgctggctacacccccacaggtgacttggattcagaaatacaatttatatttcttctttttaaattgttttattttatttttcttttaatagttatatgtcagtgagaacaatttatatgtcttacactgagaaataaaactgctcataagtgaaaaaaaaaaaaaaaaaaaaaaaaaaaaaa

SEQ ID NO: 5843 - DNA, 2684 bp, Homo Sapiens
  NM_052836
gcggcggcggcggctcgggagagagggacgcgggctgcaggcgcgatgcttggctagaggacgcgtccgacggcggccggacgctgaggtggtcggggctagtcagcccggcctgggcatggagcgcggggtggcagagcctctggacgtttggggcgcgcccagtccgagcccccggcgcgcctgaagttgcgagcggcgagcggcgagcggcgagcggcccgcggagacccaggagctgccggcacgccgcggatgagccttcgcgccggcgggaagacgcggcggtggccagggccagagcaggcggcccgcgggggccgatccggcggagagcagagcccgaggcgaggcgaggcgcggcgccgctgcacacacgcacacggagccatggggcgccatgttgccaccagctgccacgtggcctggcttttggtgctgatctctggatgctggggccaggtgaaccggctgcccttcttcaccaaccacttctttgatacatacctgctgatcagcgaggacacgcctgtgggttcttctgtgacccagttgctggcccaagacatggacaatgaccccctggtgtttggcgtgtctggggaggaggcctctcgcttctttgcagtggagcctgacactggcgtggtgtggctccggcagccactggacagagagaccaagtcagagttcaccgtggagttctctgtcagcgaccaccagggggtgatcacacggaaggtgaacatccaggttggggatgtgaatgacaacgcgcccacatttcacaatcagccctacagcgtccgcatccctgagaatacaccagtggggacgcccatcttcatcgtgaatgccacagaccccgacttgggggcagggggcagcgtcctctactccttccagcccccctcccaattcttcgccattgacagcgcccgcggtatcgtcacagtgatccgggagctggactacgagaccacacaggcctaccagctcacggtcaacgccacagatcaagacaagaccaggcctctgtccaccctggccaacttggccatcatcatcacagatgtccaggacatggaccccatcttcatcaacctgccttacagcaccaacatctacgagcattctcctccgggcacgacggtgcgcatcatcaccgccatagaccaggataaaggacgtccccggggcattggctacaccatcgtttcagggaataccaacagcatctttgccctggactacatcagcggagtgctgaccttgaatggcctgctggaccgggagaaccccctgtacagccatggcttcatcctgactgtgaagggcacggagctgaacgatgaccgcaccccatctgacgctacagtcaccacgaccttcaatatcctggttattgacatcaatgacaatgccccggagttcaacagctccgagtacagcgtggccatcactgagctggcacaggtcggctttgcccttccactcttcatccaggtggtggacaaggatgagaatttgggcctgaacagcatgtttgaggtgtacttggtggggaacaactcccaccacttcatcatctccccgacctccgtccaggggaaggcggacattcgtattcgggtggccatcccactggactacgagaccgtggaccgctacgactttgatctctttgccaatgagagtgtgcctgaccatgtgggctatgccaaggtgaagatcactctcatcaatgaaaatgacaaccggcccatcttcagccagccactgtacaacatcagcctgtacgagaacgtcaccgtggggacctctgtgctgacagtcctggtgagtccccgcttcactgcagggccactgagctctccagggccgactgtggtgaggcacccagagggattttgtccaagggacctcagcaatcagggaaggaggcacccccaaatccctgagctgtgtttgttggtgtattaaataaagtttttggactcttcaggaaggggctcccttgacctaggttgcaatatggaaaaggagccaacctgaggggtgacgagactgagctgaggacactggttttctgcctttccccgagagagactcagtgagggtgggctgggagccctggaagccccctcaaatgggtgggaaggtgccagccatccttgagaagggcaaccctctccatgtgagcacaggcaccagagaggggcaggcgcctggagggtaccggggcacccccagctgcccatggctggacttgccctttgacaaggggccctcccagtgtcatttgtatctgtcagtactcttggttgcaagggacagaaacccttaagtagttcaagcaaaaaaggattggctcatgtaactcaaaagtataagtgatttcaggccgggctcggtggctcacgcctgtcatccaacaccttgagaaagccgaggtgggcggatcacttgaggtcgggagtttgagaccagcctggccaacatggcaaaaccccgtctctactaaaaatacaaaaattagccgggtgtggtggcacacgcctgtagtcccagctactagggaggctgaggcaggagaatcgcttgaacccaggaggcggaggttgcagtgagccgagattgtgtcactgccctccagcctgggcgacagagccagattctgtctc

SEQ ID NO: 5844 - DNA, 1602 bp, Homo Sapiens
  NM_052838
ccctgctaacaaagggagccacttccttcctctctgcacataccccatgtctcaccacgatgatggagctacagtgggacttggaatccagatgtgtgaaggatggagggttgaagccgcactcagcttcctgccccaccagaggaagtggggagagacggcaggtgcagtgatggctggcggagtcatggacaaggagtacgtgggttttgctgccctccccaaccagctgcaccgcaagtctgtcaagaaggggtttgacttcacgctaatggtggcaggggagtcaggcctagggaaatccaccctcatcaacagcctcttcctcaccaacctctatgaggatcgccaggtgccagaggccagtgctcgcttgacacagaccctggccattgagcgccggggcgtagagattgaggaagggggtgtgaaagtgaagctgacccttgtggacacacctggctttggggactcagtggactgctctgactgctggcttccggtggtgaaattcatcgaggagcaatttgagcagtaccttagggatgagagtggcctgaaccggaagaacatccaggactcccgagtccactgctgcctctacttcatctcacccttcggccgggggctccggcccctagatgtggccttcctccgggcagtacacgagaaagtcaacatcatcccagtcattggcaaagcggatgctctgatgccccaggaaacccaggccctcaagcagaagatccgggatcagttgaaggaagaggagatccacatctaccagttccccgaatgtgactctgatgaagatgaagacttcaagaggcaggatgcagagatgaaggaaagcatcccttttgcagtcgtgggatcatgcgaggtggtgagggatggcgggaaccggccggtgaggggacgccgctactcctgggggaccgtggaggtggagaacccacatcactgcgatttcctgaacctgcgacggatgctggtgcagacacacctgcaggacctgaaagaggtgacgcacgatctgctctacgagggctaccgggcccgctgcctacagagcctggcccggcctggggctcgcgatcgagccagccgcagtaagctttcccgccagagcgccacagagatcccgctgcccatgctgcctctggcggacaccgagaagctgatccgcgagaaagacgaagagctgcgccgcatgcaagagatgctggagaagatgcaggcccaaatgcagcagagccaggcccagggcgagcagtcagacgccctctgaggccacgccccgcccggccttacctcggctccgccttcagtcggcctcttgtccaatccccgcgccccacactgcccagcgccccccgggacctccgcgggtgccgccctcgcgcgggctagggggaggttctcccagcctgagtccgtagccccgccccggcgctggtcccgcccacccagacaccgcccacttcccggcccggggcctgcacaatctccgaccgcatcactgtcttccggagtcccccttcttctcccagactctgtcttcaataaaaactgagcttcccgcggccaaaaaaaaaaaaa

SEQ ID NO: 5845 - DNA, 1330 bp, Homo Sapiens
  NM_052841
ggggggcgcagcaggccagggcaacccgccgcgaggcggcgtccacgccgaggagccgcgcattcccggtccacacagacgcggcggagcgccctcccaggcgggactacaactcaatgcctggcacgggggcgggctcggcggtgacttaatccgggctgagtttggtggtggtagtgagggcaggtaggggcactgcccattttggccaagggtcacacagcatctacatcacaattgcaccggagtttaaaaatgtctggccctgtccctccccaccacccgccgctgtgtccagacagagaatgttctaacgctgggggcggctgcggatgaagtccttggggagaaaaggagcaggccaagggcgatggtggagtagagctgcctctcagaggcagcatgagctgagagggtgataggaaggcggcgctagacagcatggaggactttctgctctccaatgggtaccagctgggcaagaccattggggaagggacctactcaaaagtcaaagaagcattttccaaaaaacaccaaagaaaagtggcaattaaagttatagacaagatgggagggccagaagagtttatccagagattcctccctcgggagctccaaatcgtccgtaccctggaccacaagaacatcatccaggtgtatgagatgctggagtctgccgacgggaaaatctgcctggtgatggagctcgctgagggaggggatgtctttgactgcgtgctgaatggggggccactgcctgaaagccgggccaaggccctcttccgtcagatggttgaggccatccgctactgccatggctgtggtgtggcccaccgggacctcaaatgtgagaacgccttgttgcagggcttcaacctgaagctgactgactttggctttgccaaggtgttgcccaagtcacaccgggagctgagccagaccttctgcggcagtacagcctatgctgcccccgaggtgctgcagggcattccccacgatagcaaaaaaggtgatgtctggagcatgggtgtggtcctgtatgtcatgctctgtgccagcctaccttttgacgacacagacatccccaagatgctgtggcagcagcagaagggggtgtccttccccactcatctgagcatctcggccgattgccaggacctgctcaagaggctcctggaacccgatatgatcctccggccttcaattgaagaagttagttggcatccatggctagcaagcacttgataaaagcaatggcaagtgctctccaataaagtagggggagaaagcaaacccaaaaacccgcttctaaaaaaaaaaaaaaaaa

SEQ ID NO: 5846 - DNA, 20431 bp, Homo Sapiens
  NM_052843
gctgcccagagcccccatagagagaggtccccgccgccaccctcatggatcagccacagttcagcggggcgccccgctttctcacccggcccaaggccttcgtggtgtcggtgggcaaggacgccaccctcagctgccagatcgtgggtaatcccacgccacaggtgagctgggagaaggaccagcagccggtggcggccggcgcgcgcttccgtctggcccaggacggcgacctctaccgcctcactatcctggacctggcgctgggcgacagtgggcaatacgtgtgccgcgcgcgcaatgccataggcgaggccttcgctgctgtgggcctgcaggtggacgcggaggccgcgtgcgccgagcaggcgccgcacttcctgctgcggcccacgtccatccgcgtgcgcgagggctcagaggccaccttccgctgccgcgtgggtggctccccgaggccggcagtgagctggtccaaggacgggcggcgcctgggtgagcccgacggcccccgcgtgcgcgtggaggagctcggcgaggcaagtgcgctgcgcattcgggcggcgcggccgcgcgacggcggcacttacgaggtccgcgccgagaacccgctgggcgctgccagcgccgccgcggcgctagtggtggactcggacgccgcggacacggccagccggcccgggacctccacggccgcgctcctggcgcacctgcagcggcggcgcgaggctatgcgcgccgagggcgcccccgcctcaccgcccagcaccggcacgcgcacctgcacggtgactgaaggcaagcacgcgcgcctcagctgctacgtgaccggcgagcccaagcccgagacggtgtggaagaaggacggccagctggtgaccgagggccggcgccacgtggtgtacgaggacgcgcaggagaacttcgtgctcaagatcctcttctgcaagcagtcggaccgcggcctctacacctgcacggcgtccaacctcgtgggccagacctacagctctgtgctggtcgtagtgcgcgagcccgcggttcccttcaaaaagcggctgcaagatctggaggtgcgggagaaggagtcggccacgttcctatgtgaggtgccccagccgtccactgaggccgcgtggttcaaggaggagacgcggttgtgggcgagcgccaagtacggcatcgaggaggagggcaccgagcgccgcctgaccgtgcgcaatgtctcggccgacgacgacgcggtgtacatctgcgagacgccagagggcagccgcacggtggcggagctcgcagtccaaggaaacctcctccgaaagctccctcggaagacggcggtgcgcgtgggcgacacggctatgttttgcgtggagctggcggtcccggtgggccccgtccactggctgcggaaccaggaggaagtggtggcggggggccgcgtggccatctccgcggagggcacgcgccacacactaaccatctcccagtgctgcctggaggatgtgggccaggtggcctttatggctggcgactgccagacgtccacccagttctgcgtgtcggcccccaggaagcctcccctgcaaccccctgtggatcctgtggtaaaggccaggatggagagttccgtgattctcagctggtccccaccaccccatggggaacgccctgtcactatcgacggctacctggtagagaagaagaagcttggcacctacacctggatcaggtgccacgaggctgaatgggtggctacacctgagctgaccgtggctgatgtggcggaggaggggaacttccagttccgagtgtccgctctcaacagctttggtcagagtccctacctcgagttcccggggactgtccacctggcccccaagctggccgtgaggacaccgctgaaggcggtgcaggcggtagagggtggcgaggtcactttctccgtggacctcacggtggcctcagcgggtgagtggttcctggatgggcaggccctgaaggccagcagtgtgtatgagatccactgtgatcgcacccggcacacgctcaccatccgggaggtgcccgccagcctgcacggggcgcagctgaagttcgtggccaacggcattgagagcagcatccggatggaggtccgggcggccccagggctgactgccaacaagccgccagccgcagctgcccgggaggtgctggctcggctgcacgaggaggcgcagctgctggctgagctgtcagatcaggctgcggctgtgacgtggctgaaggatggtcgcacactgtccccaggccccaagtatgaggtgcaggcatcggccgggcggcgggtgctccttgtgcgagatgtggcccgggacgatgcaggcctctacgagtgcgtcagccgcgggggccgcatcgcctaccagctctccgtgcaaggcctcgcgcgctttctgcacaaggacatggcgggcagctgtgtggatgccgtggctgggggcccggcgcagtttgagtgtgagacctccgaagcccacgtccacgtgcactggtacaaggatggcatggagctgggccactccggtgagcgcttcttgcaggaggatgtggggacgcggcaccggctggtggcagccacagtcaccaggcaggatgaaggcacctactcctgccgcgtgggcgaggactctgtggacttccggctccgcgtctctgagcccaaggtggtgtttgctaaggagcagctggcacgcaggaagctgcaggcagaggcaggagccagtgccacactgagctgcgaggtggcccaggcccagacggaggtgacgtggtacaaggatgggaagaagctgagctccagctcgaaagtgtgcatggaggccacaggctgcacgcgcaggctggttgtgcagcaggcaggccaggcggatgccggggagtatagctgcgaggctgggggccagcggctctccttccatctggatgtcaaagagcccaaggtggtgtttgccaaggaccaggtggcacacagtgaggtgcaggctgaggcaggggccagtgccacgctgagctgcgaggtggcccaggcccagacggaggtgatgtggtacaaagatgggaagaagctgagctccagcttgaaagtgcatgtagaggccaagggctgcagacggaggctggtggtgcagcaggcaggcaagacagatgccggggactacagctgcgaggccaggggccagagggtctccttccgcctgcacatcacagagcccaagatgatgtttgcaaaggagcagtcagtgcataatgaggtgcaggctgaggcgggggccagtgccatgctgagctgtgaggtggcccaggcccagacggaggtgacgtggtacaaggatgggaagaagctgagctccagctcaaaagtgggcatggaggtcaaagggtgcacacggaggctggtgctgccacaggcgggcaaagcagatgctggggagtacagctgtgaggctgggggccagagagtctccttccacctgcacatcacagagcccaagggggtgtttgcgaaggagcagtcagtgcataatgaggtgcaggctgaggcggggaccactgccatgctgagctgtgaggtggcccagccccagacagaggtgacgtggtacaaggacgggaagaagctgagctccagctcaaaagtacgcatggaggtcaagggctgcacacgaaggctggtagtgcagcaggtgggcaaagcagatgctggggagtacagctgcgaggctgggggccagagagtctcctttcaactgcacatcacagagcccaaggcagtgtttgccaaggagcagttggtgcataatgaggtgcggactgaggcaggggccagtgccacactgagctgtgaggtggcccaggcccagacagaggtgacgtggtacaaggatgggaagaagctgagctccagttcgaaagtgcgcatagaggctgcgggctgcatgcggcagctggtggtgcagcaggcaggccaggcagatgctggggagtacacctgtgaggctgggggccagcggctctccttccacctggatgtttcagagcccaaggcggtgtttgcaaaggagcagctggcacacaggaaggtgcaggccgaggcgggggccattgccacgctgagctgcgaggtggcccaggcccagacagaggtgacgtggtacaaggacgggaagaagctgagctccagctcgaaagttcgaatggaggctgtgggctgcacacggaggctggtggtgcagcaggcatgccaggcggacaccggggagtatagctgcgaggccgggggccagcggctctccttcagcctggacgtggcagagcccaaggtggtgtttgccaaggagcagccagtgcacagggaggtgcaggcccaggcgggggccagcaccacactcagctgcgaggtggctcaggcccagacggaggtgatgtggtacaaggacgggaagaagctgagcttcagctcgaaagtgcgcatggaggctgtgggctgcacacggaggctggtggtgcagcaggcgggccaggcggtcgccggggagtacagctgcgaggcggggagccagcggctctccttccacctgcacgtggcagagcccaaggcggtgtttgccaaggagcagccagcgagcagggaggtgcaggctgaggcggggaccagtgccacgctgagctgcgaggtggcccaggcccagacagaggtgacgtggtacaaggacgggaagaaactgagctccagctcgaaagtgcgaatggaggccgtgggctgcacacggaggctggtggtgcaggaggcaggccaggcggacgccggggagtacagctgcaaggccggggatcagcggctgtccttccacctgcacgtggcagagcccaaggtggtgtttgccaaggagcagccagcacacagggaggtgcaggctgaggcgggggccagtgccacgctgagctgcgaggtggcccaggcccagacagaggtgacgtggtacaaggatgggaagaagctgagttccagctcgaaagtgcgcgtggaggccgtgggctgcacacggaggctggtggtgcagcaggcgggccaggcggatgctggggagtacagctgtgaggcggggggccaacggctgtccttccgcctgcacgtggcagagctggagccccaaatttcagagagaccctgccgcagggagcctctggtggtcaaggagcatgaagacatcatcctgaccgccacactggccacaccctctgcggccacggtgacctggctcaaggatggtgtggagattcgccgcagcaagcggcatgagacagccagccagggggacacccacaccctgaccgtgcatggcgcccaggttctggacagcgccatctacagctgccgtgtgggcgcagaggggcaggacttcccagtgcaggtggaagaggtggccgccaagttctgccggctgctggagcctgtgtgcggcgagctgggtggcacggtgacactggcctgcgagctaagcccagcgtgtgcagaggtggtgtggcgctgcggcaacacgcagcttcgggtgggcaagcgcttccagatggtggccgaggggcccgtgcgctcactcactgtgttggggctgcgcgcagaggacgcaggggagtacgtgtgtgagagccgtgatgaccacaccagtgcgcagctcaccgtcagtgtgccccgagtggtgaagtttatgtctgggctgagcaccgtggtcgcagaggagggcggcgaggccaccttccagtgcgtggtgtcccccagtgatgtggcagtcgtgtggttccgggacggtgccctgcttcagcccagcgagaagtttgccatatcacagagtggcgccagccacagcctgaccatctcagacctggtgctggaggacgcgggccagatcaccgtggaggctgagggcgcctcatcctctgctgccctgagggtccgagaggcgcctgtgctgttcaaaaagaagctggagccgcagacggtggaggagcggagctcggtgaccctggaggtggagctgacgcggccgtggccggagctgaggtggacacggaacgcgacggccctggcgccgggaaagaacgtggagatccacgccgagggcgcccgccaccgcctggttctgcacaacgtaggttttgccgaccgtggcttctttggctgcgagacgccggatgacaagacacaggccaaactcaccgtggagatgcgccaggtacggctcgtacggggcctgcaggcagtggaggcacgggagcagggcacggctaccatggaggtgcagctgtcgcatgcggacgtggatggcagctggactcgtgacggtctgcggttccagcaggggcccacgtgccacctggctgtgcggggccccatgcacaccctcacactctcggggctgcggccagaggatagtggccttatggtcttcaaggccgaaggagtgcacacgtcggcgcggctcgtggtcaccgagcttcccgtgagcttcagccgcccgctgcaggacgtggtgaccactgagaaggagaaggttaccctggagtgcgagctgtcgcgtcctaatgtggatgtgcgctggctgaaggacggtgtggagctgcgggcaggcaagacgatggccatcgcagcccagggcgcctgcaggagcctcaccatttaccggtgcgagttcgcggatcagggagtgtatgtgtgtgatgcccatgatgcccagagctctgcctccgtgaaggtacaaggaaggacatacactctcatctaccggagagtcctggcggaagatgcaggagagatccaatttgtagccgaaaatgcagaatcgcgagcccagctccgagtgaaggagctgccagtgaccctcgtgcgcccgctgcgggacaagattgccatggagaagcaccgcggtgtgctggagtgtcaggtgtcccgggccagcgcccaggtgcggtggttcaagggcagtcaggagctgcagcccgggcccaagtacgagctggtcagtgatggcctctaccgcaagctgatcatcagtgatgtccacgcagaggacgaggacacctacacctgtgacgccggtgatgtcaagaccagtgcacagttcttcgtggaagagcaatccatcaccattgtgcggggtctgcaggacgtgacagtgatggagcccgctcctgcctggtttgagtgtgagacctccatcccctcagtgcggccacctaagtggctcctggggaagacggtgttgcaggctggggggaacgtgggcctggagcaggagggcacggtgcaccggctgatgctgcggcggacctgctccaccatgaccgggcccgtgcacttcaccgttggcaagtcgcgctcctctgcccgcctggtggtctcagacatccccgtagtcctcacacggccgttggagcccaagacagggcgtgagctgcagtcagtggtcctgtcctgcgacttccggccagcccccaaggctgtgcagtggtacaaggatgacacgcccctgtctccctctgagaagtttaagatgagcctggagggtcagatggctgagctgcgcatcctccggctcatgcctgctgatgctggtgtctaccggtgccaggcgggcagtgcccacagcagcactgaggtcactgtggaagcgcgggaggtgacagtgacagggccgctacaggatgcagaggccacggaggagggctgggccagcttctcctgtgagctgtcccacgaggatgaggaggtcgagtggtcgctcaacgggatgcccctgtacaacgacagcttccatgagatctcacacaagggccggcgccacacgctggtactgaagagcatccagcgggctgatgcgggcatagtacgcgcctcctccctgaaggtgtcgacctctgcccgcctggaggtccgagtgaagccggtggtgttcctgaaggcgctggatgacctgtccgcagaggagcgcggcaccctggccctgcagtgtgaagtctctgaccccgaggcccatgtggtgtggcgcaaagatggcgtgcagctgggccccagtgacaagtatgacttcctgcacacggcgggcacgcgggggctcgtggtgcatgacgtgagccctgaagacgccggcctgtacacctgccacgtgggctccgaggagacccgggcccgggtccgcgtgcacgatctgcacgtgggcatcaccaagaggctgaagacaatggaggtgctggaaggggaaagctgcagctttgagtgcgtcctgtcccacgagagtgccagcgacccggccatgtggacagtcggtgggaagacagtgggcagctccagccgcttccaggccacacgtcagggccgaaaatacatcctggtggtccgggaggctgcaccaagtgatgccggggaggtggtcttctctgtgcggggcctcacctccaaggcctcactcattgtcagagagaggccggccgccatcatcaagcccctggaagaccagtgggtggcgccaggggaggacgtggagctgcgctgtgagctgtcacgggcgggaacgcccgtgcactggctgaaggacaggaaggccatccgcaagagccagaagtatgatgtggtctgcgagggcacgatggccatgctggtcatccgcggggcctcgctcaaggacgcgggcgagtacacgtgtgaggtggaggcttccaagagcacagccagcctccatgtggaagaaaaagcaaactgcttcacagaggagctgaccaatctgcaggtggaggagaaaggcacagctgtgttcacgtgcaagacggagcaccccgcggccacagtgacctggcgcaagggcctcttggagctacgggcctcagggaagcaccagcccagccaggagggcctgaccctgcggctcaccatcagtgccctggagaaggcagacagcgacacctatacctgcgacattggccaggcccagtcccgggcccagctcctagtgcaaggccggagagtgcacatcatcgaggacctggaggatgtggatgtgcaggagggctcctcggccaccttccgttgccggatctccccggccaactacgagcctgtgcactggttcctggacaagacacccctgcatgccaacgagctcaatgagatcgatgcccagcccgggggctaccacgtgctgaccctgcggcagctggcgctcaaggactcgggcaccatctactttgaggcgggtgaccagcgggcctcggccgccctgcgggtcactgagaagccaagcgtcttctcccgggagctcacagatgccaccatcacagagggtgaggacttgaccctggtgtgcgagaccagcacctgcgacattcctgtgtgctggaccaaggatgggaagaccctgcgggggtctgcccggtgccagctgagccatgagggccaccgggcccagctgctcatcactggggccaccctgcaggacagtggacgctacaagtgtgaggctgggggcgcctgcagcagctccattgtcagggtgcatgcgcggccagtgcggttccaggaggccctgaaggacctggaggtgctggagggtggtgctgccacactgcgctgtgtgctgtcatctgtggctgcgcccgtgaagtggtgctatggaaacaacgtcctgaggccaggtgacaaatacagcctacgccaggagggtgccatgctggagctggtggtccggaacctccggccgcaggacagcgggcggtactcatgctccttcggggaccagactacttctgccaccctcacagtgactgccctgcctgcccagttcatcgggaaactgagaaacaaggaggccacagaaggggccacggccacgctgcggtgtgagctgagcaaggcagcccctgtggagtggagaaaggggtccgagaccctcagagatggggacagatactgtctgaggcaggacggggccatgtgtgagctgcagatccgtggcctggccatggtggatgccgcggagtactcgtgtgtgtgtggagaggagaggacctcagcctcactcaccatcaggcccatgcctgcccacttcataggaagactgagacaccaagagagcatagaaggggccacagccacgctgcggtgtgagctgagcaaggcggcccccgtggagtggaggaaggggcgtgagagcctcagagatggggacagacatagcctgaggcaggacggggctgtgtgcgagctgcagatctgtggcctggctgtggcagatgctggggagtactcctgtgtgtgtggggaggagaggacctctgccactctcaccgtgaaggccctgccagccaagttcacagagggtctgaggaatgaagaggccgtggaaggggccacagccatgttgtggtgtgaactgagcaaggtggcccctgtggagtggaggaaggggcccgagaacctcagagatggggacagatacatcctgaggcaggaggggaccaggtgtgagctgcagatctgtggcctggccatggcggacgccggggagtacttgtgtgtgtgcgggcaggagaggacctcagccacgctcaccatcagggctctgcctgccaggttcatagaagatgtgaaaaaccaggaggccagagaaggggccacagctgtgctgcagtgtgagctgaacagtgcagcccctgtggagtggagaaaggggtctgagacccttagagatggggacagatacagcctgaggcaggacgggactaaatgtgagctgcagattcgtggcctggccatggcagacactggggagtactcgtgcgtgtgcgggcaggagaggacctcggctatgctcaccgtcagggctctacccatcaagttcacagagggtctgaggaacgaagaggccacagaaggggcaacagccgtgctgcggtgtgagctgagcaagatggcccccgtggagtggtggaaggggcatgagaccctcagagatggagacagacacagcctgaggcaggacggggccaggtgtgagctgcagatccgcggcctcgtggcagaggacgctggggagtacctgtgcatgtgcgggaaggagaggacctcagccatgctcaccgtcagggccatgccttccaagttcatagagggtctgaggaatgaagaggccacagaaggggacacggccacgctgtggtgtgagctgagcaaggcggcaccggtggagtggaggaaggggcatgagaccctcagagatggggacagacacagcctgaggcaggacgggtccaggtgtgagctgcagatccgtggcctggctgtggtggatgccggggagtactcgtgtgtgtgcgggcaggagaggacctcagccacactcactgtcagggccctgcctgccagattcatagaagatgtgaaaaaccaggaggccagagaaggggccacggccgtgctgcaatgtgagctgagcaaggcggcccccgtggagtggaggaaggggtctgagaccctcagaggtggggacagatacagcctgaggcaggatgggaccagatgtgagctgcagattcatggcctgtctgtggcagacactggggagtactcgtgtgtgtgcgggcaggagaggacctcggccacactcaccgtcagggccccacagccagtgttccgggagccgctgcagagtctgcaggcggaggagggctccacggccaccctgcagtgtgagctgtctgagcccactgctacagtggtctggagcaagggtggcctgcagctgcaggccaatgggcgccgggagccacggcttcagggctgcaccgcggagctggtgttacaggacctacaacgtgaagacactggcgaatacacttgcacctgtggctcccaggccaccagtgccaccctcactgtcacagctgcgcctgtgcggttcctccgagagctgcagcaccaggaggtggatgagggaggcaccgcacacttatgctgcgagctgagccgggcgggtgcgagcgtggagtggcgcaagggctccctacagctcttcccttgtgccaagtaccagatggtgcaggatggtgcagctgcagagctgctggtacgcggagtggagcaggaggatgcgggtgactacacgtgtgacacgggccacacgcagagcatggccagcctctctgtccgtgtccccaggcccaagttcaagacccggcttcagagtctggagcaggagacaggtgacatagcccggctgtgctgtcagctgagtgatgcagagtcgggggccgtggtgcaatggctcaaggagggcgtggagctgcatgcgggccccaagtacgagatgcggagccagggggccacgcgggagctgctgatccaccaactggaggccaaggacacgggcgagtatgcctgtgtgacaggcggccagaaaaccgctgcctccctcagggtcacagagcctgaggtgaccattgtacgggggctggttgatgcggaggtgacggccgatgaggatgttgagttcagctgtgaggtgtccagggctggagccacaggcgtgcagtggtgcctacagggcctgccactgcaaagcaatgaggtgacagaggtggctgtgcgggatggccgcatccacaccctgcggctgaagggcgtgacgcccgaggacgctggcactgtctccttccatttgggaaaccatgcttcctctgcccagctcaccgtcagagctcctgaggtgaccatcctggagcccctgcaggacgtgcagctcagtgagggccaggatgccagcttccagtgccggctatccagagcttcaggccaggaggcccgctgggctttaggaggggtgcccctgcaggccaacgagatgaatgacatcactgtggagcagggcacactccacctgctcaccctgcacaaggtgacccttgaggatgctggaactgtcagtttccacgtgggcacgtgtagctctgaggcccagctgaaagtcacagccaagaacacggtggtgcgggggctggagaatgtggaggcgctggagggcggcgaggcgctgttcgagtgccagctgtcccagcccgaggtggccgcccacacctggctgctggacgacgaacccgtgcacacctcggagaacgccgaggtggtcttcttcgagaacggcctgcgccacctgctgctgctcaaaaacttgcggccacaagacagctgccgggtgaccttcctggctggggatatggtgacgtccgcattcctcacggtccgaggctggcgcctggagatcctggagcctctgaaaaacgcggcggtccgggccggcgcacaggcatgcttcacctgcacgctcagcgaggcggtgcccgtgggagaggcgtcctggtacatcaatggcgcggcagtgcagccggatgacagcgactggactgtcaccgccgacggcagtcaccacgccctactgctgcgcagcgcccagccccaccacgccggggaggtcaccttcgcttgccgcgacgccgtggcctctgcgcggctcaccgtgctgggcctccctgatcccccagaggatgctgaggtggtggctcgcagcagccacactgtgacactgtcttgggcagctcccatgagtgatggaggcggtggtctctgtggctaccgcgtggaggtgaaggagggggccacaggccagtggcggctgtgccacgagctggtgcctggacccgagtgtgtggtggatggcctggcccccggggagacctaccgcttccgtgtggcagctgtgggccctgtgggtgctggggaaccggttcacctgccccagacagtgcggcttgcagagccaccgaagcctgtgcctccccagccctcagcccctgagagccggcaggtggcagctggtgaagatgtctctctggagcttgaggtggtggctgaggctggtgaggtcatctggcacaagggaatggagcgcatccagcccggtgggcggttcgaggtggtctcccagggtcggcaacagatgctggtgatcaagggcttcacggcagaagaccagggcgagtaccactgtggcctggctcagggctccatctgccctgcggctgccaccttccaggtggcactgagcccagcctctgtggatgaggcccctcagcccagcttgccccccgaggcagcccaggagggtgacctgcacctactgtgggaggccctggctcggaaacgtcgcatgagccgtgagcccacgctggactccattagcgagctgccagaggaggacggccgctcgcagcgcctgccacaggaggcagaggaggtggcacctgatctctctgaaggctactccacggccgatgagctggcccgcactggagatgctgacctctcacacaccagctctgatgatgagtcccgggcaggcaccccttccctggtcacctacctcaagaaggctgggaggccaggcacctcaccactggccagcaaggttggggccccagcagccccctctgtgaagccacagcagcagcaggagccactggctgctgtgcgcccaccactgggagacctgagcaccaaagacctgggtgatccctcaatggacaaggcagctgtgaagatccaggctgcctttaagggctacaaggtccggaaggagatgaagcagcaggaagggcccatgttctcccacacatttggggacaccgaggcacaggtgggggatgccctgcggctggagtgtgtcgtggccagcaaggcagatgtgcgagcccgctggctgaaggatggtgtggagctgaccgatgggcggcaccatcacatcgaccagcttggggatggcacctgctctctgctgatcactggcctggaccgtgctgatgctggctgctacacctgtcaggtgagcaacaagtttggccaggtgacccacagtgcctgtgtggtggtcagtgggtcagagagtgaagccgagagctcctctgggggtgagctggacgatgccttccgccgggctgcccgtcggctgcaccggctcttccgcaccaaaagtccggctgaagtttcagatgaggagctcttcctgagtgcagacgagggccctgcagagccagaggagcccgcggactggcagacataccgcgaagatgagcatttcatctgcatccgttttgaggcgctcactgaggcccgccaggcggtaactcgcttccaggagatgtttgccacactgggcattggggtggagatcaagctggtggaacaggggcctcggagggtagagatgtgcatcagcaaagagactcctgcccctgtggtgcctccagagccattgcccagcctactgacttctgacgctgccccagtgttcctgactgagttgcagaaccaagaagtgcaggatgggtatcctgtgagctttgactgcgtggtgacaggtcagcccatgcccagtgtgcgctggttcaaggatgggaagttgttggaggaggatgatcactacatgattaatgaagaccaacagggtggccatcagctcatcatcacagccgtggtgccagcagacatgggcgtctaccgctgcctggccgagaacagcatgggtgtctcctccaccaaggctgagctccgtgtggacttgacaagcacagactatgacactgcagcagatgccacggagtcctcatcctacttcagtgcccaaggctacctgtccagccgggagcaggagggaacagagtccaccactgatgagggccagctgccccaggtggtggaggagctgagagacctccaggtggcccctggcacacgcctggccaagttccagctcaaggtgaaaggctaccctgctcccagattatactggttcaaagatggccagcccctgaccgcatctgcccacatccgcatgactgacaagaagatcctgcacaccctggagatcatctccgtcacccgggaggactctggccagtatgcagcctatatcagcaatgccatgggtgctgcctactcgtctgcccggctgctggttcgaggccctgatgagccagaagagaagcctgcatcagatgtgcatgagcagctggtgccgccccgaatgctggagaggttcacccccaagaaagtgaagaaaggctccagcatcaccttctctgtgaaggtagaaggacgcccggtgcccaccgtgcactggctcagggaggaggctgagagaggcgtgctgtggattggccctgacacaccgggctacaccgtggccagctctgcgcagcagcacagcctggtcctgctggacgtgggccggcagcaccagggcacctacacatgcattgccagcaacgctgccggccaggccctctgctccgccagcctgcacgtctcgggcctgcctaaggtggaggagcaggagaaagtgaaggaagcgctgatttccactttcctgcaggggaccacacaagccatctcagcacaggggttggaaactgcgagttttgctgaccttggtgggcagaggaaagaagagcctctggctgccaaggaggccctcggccacctgtccctcgctgaggtgggcacagaggagttcctgcagaaactgacctcccagatcactgagatggtatcggccaagatcacgcaggccaagctgcaggtgcccggaggtgacagtgatgaggactccaagacaccatctgcatccccccgccatggccgatcacggccatcctccagcatccaggagtcttcctcagagtcagaggacggcgatgcccgaggcgagatctttgacatctacgtggtcaccgctgactacctgcccctaggggctgagcaggatgccatcacgctgcgggaaggccagtatgtggaggtcctggatgcagcccacccactgcgctggcttgtccgcaccaagcccaccaagtccagcccctcacggcagggctgggtgtcaccagcctacctggacaggaggctcaagctgtcacctgagtggggggccgctgaggcccctgagttccctggggaggctgtgtctgaagacgaatacaaggcaaggctgagctctgtgatccaggagctgctgagttctgagcaggccttcgtggaggagctgcagttcctgcagagccaccacctgcagcacctggagcgctgcccccacgtgcccatagctgtggccggccagaaggcagtcatcttccgcaatgtgcgggacatcggccgcttccacagcagcttcctgcaggagttgcagcagtgcgacacggacgacgacgtggccatgtgcttcatcaagaaccaggcggcctttgagcagtacctggagttcctggtggggcgtgtgcaggctgagtcggtggtcgtcagcacggccatccaggagttctacaagaaatacgcggaggaggccctgttggcaggggacccctctcagcccccgccaccacctctgcagcactacctggagcagccagtggagcgggtgcagcgctaccaggccttgctgaaggagctgatccgcaacaaggcgcggaacagacagaactgcgcgctgctggagcaggcctatgccgtggtgtctgccctgccacagcgcgctgagaacaagctgcacgtgtccctcatggagaactacccaggcaccctgcaggccctgggcgagcccatccgccagggccacttcatcgtgtgggagggtgcaccgggggcccgcatgccctggaagggccacaaccgtcacgtgttcctcttccgcaaccacctggtaatctgcaagccccggcgagactcccgcaccgataccgtcagctacgtgttccggaacatgatgaagctgagcagcatcgacctgaacgaccaggtggagggggatgaccgcgccttcgaggtgtggcaggagcgggaggactcggtgcgcaagtacctgctgcaggcacggacagccattatcaagagctcgtgggtgaaggagatctgtggcatccagcagcgtctggccctgcctgtgtggcggcccccggactttgaagaggagctggccgactgcacagccgagctgggtgagacagtcaagctggcctgccgcgtgacgggcacacccaagcctgtcatcagctggtacaaagatgggaaagcagtgcaggtggacccccaccacatcctcattgaagaccctgatggctcgtgtgcactcatcctggacagcctgaccggtgtggactctggccagtacatgtgcttcgcggccagcgccgctggcaactgcagtaccctgggcaagatcctggtgcaagtcccaccacggttcgtgaacaaggtccgggcctcaccctttgtggagggagaggacgcccagttcacctgcaccatcgaaggcgccccgtacccgcagatcaggtggtacaaggacggggccctgctgaccactggcaacaagttccagacactgagtgagcctcgcagcggcctgctagtgctggtgatccgggcggccagcaaggaggacctggggctctacgagtgtgagctggtgaaccggctgggctccgcgcgggctagtgcggagctgcgcattcagagccccatgctgcaggcccaggagcagtgtcacagggagcagctcgtggctgcagtggaagtcactgagcaagagactaaagtccccaagaaaaccgtcatcatagaagagaccatcaccactgtggtgaagagcccacgtggccaacgacggtcccccagcaagtccccctcccgctcaccttcccgctgctctgccagcccgctgaggccaggcctactggcccccgacctgctgtacctgccaggtgctggccagccccgcaggccggaggcagaaccaggccagaagcccgtggtgcccacactgtatgtgacggaggccgaggcccactctccagctctgcccggactctcggggccccagcccaagtgggtggaggtggaggagaccattgaagtccgggtgaagaagatgggcccgcagggtgtgtctcccaccacagaggtgcccaggagctcatcggggcatctcttcacactgcccggtgcgacccccggaggggaccccaattccaacaactccaacaacaagctgctggcccaggaggcctgggcccagggcacagccatggtcggcgtcagagagccccttgtcttccgcgtggatgccagaggcagtgtggactgggctgcttctggcatgggcagcctggaggaggagggcaccatggaggaggcgggagaggaagagggggaagacggagacgcctttgtgacggaggagtcccaggacacacacagccttggggatcgtgaccccaagatcctcacgcacaacggccgcatgctgacactggctgacctggaagattacgtgcctggggaaggggagaccttccactgtggtggccctgggcctggcgcccctgatgaccctccctgcgaggtctcggtgatccagagagagatcggggagcccacggtggggcagcctgtgctgctcagcgtggggcatgcactgggtccccgaggccctctcggcctctttaggcctgagccccgtggggcgtcaccaccgggaccccaggtccgtagccttgagggcacctccttcctcttgcgggaggccccggctcggcctgtgggcagtgctccctggacgcagtctttctgcacccgcatccggcgttctgcggacagtggccagagcagcttcaccacagagctttccacccagaccgtcaacttcgggacagtgggggagacggtcacccttcacatctgcccagacagggatggggatgaggcggcacagccctgatgctgctgccatggtggcttggggcagcggggagaaaggagtgtccttgaggcctaggacgctgcccggcctcagcagcagccctgggagcctcctgagggccctccctgtccctggccacgggcccttcttacctcactcaacttcagccaggaggactgggtggtgcttgcaatgttggaatgaccggctcaaagacctcagctctgggctgtttcctgtcagcctggcaggagcctcaggactgtggacgaaggatgtggccttgggcatttgtcctgttcccacatgggcctggtccctccctcctggccccagccacagctgccaggcctgacatggccttgcctctcctgcagtcttggtgactgagacccttgggtggcgcttcccagctctgcaggccctcctggccttttctgcagggtggacacagggtctgtgtgtgggcagcagcccctgtctctcagcaagaataaagcagcttcctgtgcaaaaaaaaaaaaaaaaaaaaaaaaaaaaaa

SEQ ID NO: 5847 - DNA, 4154 bp, Homo Sapiens
  NM_052845
agctgtgggtggagtcaccccgcggactggacgggaacctggcggggtcaggtcccgtcaagcagcctggctcatggctgtgtgcggcctggggagccgtcttggcctggggagccgtcttggcctgcgcgggtgcttcggcgccgccaggctcctgtatccccgtttccagagccgcggccctcagggcgtggaagacggggacaggccacagccttcctcgaagacacccaggatccccaagatttacaccaaaacgggagacaaagggttttctagtaccttcacaggagaaaggagacccaaagatgaccaagtgtttgaagccgtgggaactacagatgaattaagttcagctattgggtttgctctggaattagtcacagaaaagggccatacatttgccgaagagcttcagaaaatccagtgcacattgcaggacgtcggctcggccctggcgacaccatgctcctcggcccgggaggctcacttaaagtataccacgttcaaggcggggcccatcctggagctggagcagtggatcgacaagtacaccagccagctcccaccactcacggccttcatcctgccttcgggaggcaagatcagctcggcgctgcatttctgccgggccgtgtgccgccgggccgagagacgtgtggtgcctcttgtccagatgggagagaccgatgcgaacgtggccaagttcttaaacagactcagtgactatctcttcacgctagccagatatgcagccatgaaggaggggaatcaagagaaaatatacatgaaaaatgacccatcggccgagtctgagggactctgaaatcacagaaagtgggagcttggaggatccctccatggcgatggccgtggagagaggagcttgcccttctggggtcctggttcctgaagagctcacccagagaggctcaaagcagccttttgtcccagctcagctttgatctacacctcttgccaccttcctcaagggactgtgaccctttggggattctgtccctgaccctgcttccccaagctctcctgggtcttggagggatgtgggaatgaattggcattgcaggaaagacaggtaaagtgattgctgcaatgagaaggagctgtgcggaaaaggaataaaagttggaaaggctggagccgtgtgtgtgtgtgtgtgtgtgtgtgtgtgtgtgtgtgtgtgtgtgagagagagccctcccactgccagctcaggttgttcacagatttggaatgggaccagaggcccttgaaaatgtaattgtgatttacctgtgccaaaggtgctttaaatgtcacatttgtaaaggggaaggcggacaagatttggaagtttagtcacctctgagccacccatcaccgccaaagtgtgggggaaggatagctgcagattgacaggcgaggctcagaaactcctggcttagattgaagtgtgtgtgatgggggtgcagcttagaggaccccctctgaaagggatggagatgctgatgagaacaacactaccacttgaaggtgaacattccctgtctggttggactgagtcaagggtctgcggtgcagcatcttcagcttgagaaaatgaggttgtcagtttccagcaaggctgacatccaccagactgatttctccgatgttgcacttggctggcttatgcctctgagatcggtgccacggctgtatttatttcagttgtcactgctgctccctcctgctatgaaacgacactgccagtgccagcagtgtccttgggaaaggcaatatttatgaagggcagaagaggcagccccaagaacctaaagactgcaggctgctaattgcaggaaatgactttggaagggcaggctcttgtccagtttcagggctgaaatgcctggcgaactccattcagccatcacatattgactgagtggctgcttagcatgggccaccgcgctaggctcgggacagctggtctttccggccatctttcttgctggcaagtcagcaaacattaccttcttagtcacgtgcatatttttgccttcattcttaccacctggcctgcaaagtttgcaggagggccaggtatattcacttgtgtcttctgggtcctttcattgctgacaggctgtgatggccctcttgagccttgggcagggtgggtgaggtgcagatgaccaggagtgtgtgaatgccttccaggaggtggctttgttccgtgcctccctgcccccatcgtcactaccaggtctggtacggagtcggtgctcagtgtttgcaaaacagagctgaaaacggactttgggaggccgaggcaggcagatcacctgaggtcaggagtttgagaccagcctggtcaacatggtaaaaccccatttctgctaaaaaaaaaaaaaaaaaaaaaaaattagctgggcatggtggcgggtgcctgtaatcccagctattcaggaggctgaggcaggagaatcacttgaacctacgaggcagaggctgcagtgagccaagatcgtgacacgacactccagcctggctgatagagtgagactccgtcacaaaaaaaaaaaaaaaaaaaaaaaaaccctgaaaacgcaatcactaaggctcggtcagggagtatgttcaaagagcttgcagcgaatcactcaattctgtctacacctcaaaatctcaaaatcttcctggaatatatatatatatataaaataacacagcagccctgcatgcctagccatgggaaagcacagcctccaaaggataaggaaagctttttgagtaaatacaacatcctaaagtgacaatctttgaaacaaggccgttcacctgttgccaagtcctgtccttccaggaccgggtgtcacagcctggatgttaacagtcgcgttctcagacccccgcctctgtatctgtctcccggttcaccagcaaacacttctctgagaaaccacctgggtgcagggcagatgccaccactcagcaggtgtttctctcctgtgctaccaacctgggaaaaatggagaaagcttgctttgggggctggaaggatggggtgtttaaaacatttgctcttctgcagtgcctttcaaaagctctatcaagagcccgaggcaaaagaaaagatgtgtacccctctgtacactgagcaaatgtcctcccatattttgaaccaggtgggaaaagttaatgaaagccctacagtcaggaaatgtgactgcgaagcccccgctgccccagtgtttgcacaccactggcaactctcagaaacaatcagtcccattgcacgggaacacggggttttgaaacaaacagcagcctgtttttatttaaagtcgtgatcccttgcttatcgtagatttttttcataatttgattttggaaaatattgcacacaaatactactcgatccctgagtttgtgggcacttccttacattttgcacccatgaaaatgcctcctccgcctccaggtcaggctccctggaatggggtgtttagtgtcatttccagagacaagctggcagttggctcttgtgtcagagagaagcccacagtcacagtgacaccagcccgcactgtggaagggcttgctatgtgcagtgccctgagccaagtgttccacagacattatctcatttgaaccccatagcagccctggaaggaggcattgggtggggaaccaagttgtcctggggagtcagtgccaagatgtgagccccggacgcggcctcgtcactcacagccccgtgctcctcagctcccacccactgccgcttgacagtcgttttaatcactacctgggctgtggcgaacaatgccaggctctgatagatcctgctgtctcatttctcaacctagtttcccttaactaatatttcatggctatcgttaatgtgcgtttttcatcgagtaatttccacagcccgaacttgtaacacatcccaatgacaaacgtccccagttcggaagcccccgtcagtggcaatgtcacccttgctgctgcctcgacaccttccgacagcccattcagttttatgatcgccctgtcccagtgatcactactgaacctttaagaatccagatgcatttcaagtttaattgaataaaattctttgtataataaattccgcatgaatgctacataaaaaaaaaaaaaaaaaa

SEQ ID NO: 5848 - DNA, 4264 bp, Homo Sapiens
  NM_052847
gagtgtcggccccgcccccgcagaggggagcgagcgctcgcgggccggggcggagggttcggctgcgcggcggggctgaggcggccgcggggcccgagcgcagggagtggagcttggtttcgggatctcggtgctgcagacggcgagacctcctgcacagggtgtacagcaagctgtgattcctgggaaaactaaaaaagctctctgaacaacggggcccagagctgatggcagacaatgtcagccactaacaacatagcccaggcccggaagctggtggaacagctacgcatagaagccgggattgagcgcatcaaggtctccaaagcggcgtctgacctcatgagctactgtgagcaacatgcccggaacgaccccctgctggtcggagtccctgcctcggagaacccctttaaggacaagaaaccttgtattattttataactgtgttctcatatgttctctctctctctctctctttctctctctctctctctgtctctgtctctgtctcaggcagggcatcattcagtaattagctcaaacaaaacatctcaagtccccaaaacctttaattccaaaagaaatcccccctctccccgccaaaaaaggcgttcccaccgcccggatggggtagaatggaccttgtaggtggagatgaattttcaggtccgaccccatggccctctcagtttgggccaaaagggatggaggctttacggccacttcccgttcggaataactgaaatcccccagcgatggggtaacaattttttaaaactctcgattgccgtttcaattgtggaccggcgccgagggggaaagggaggtgacttcgcccggtggcaatagttccgggagaattggccattggtaaaaagacttcatagggtcactggaatgctttgtgttgtttttaagtagaggtaaaattgagatggggggcgggaggtgacatcatgaagttttttggaaatatctctttatttaaaaaattgttactccatacggctaaactcggattgtgatggttgaacccgtcgctaaactgcacgatcctgcaatgaatgcacgatggagtgtgggggtctggagggggcttcgtctatgaaaagttgccaagtgtgactcccctgcatgatgttagccatgggtcctttctgcagggtcccctctgtgccagaaatgggttttcgggacttgccccagggaagccgtcaccggcccggcccatcatgtttttggattttttttttttttctttttttgagatggagtttcattcttgttacccaggctggagtgcagctgcatgatttcagctcaccgcaacctctgcctccccggttcaagcgattctcctgcctcagcctcccgagtagctgagactacaggcgtgtgccactacgcccggctaattgttgtatttttagtagagacggggtttcaccgtattggccaggccgctctcaaactcctgacctcgggatccgcccacctcggcctcccaaagtgctgggattacaggcatgagccaccgcgcccagtgtgttttaagcatgaggcatccgcgtggctgggagaggctttgaccatccttggctcttccaggttgtcctaccctctggcatccaccatagacgtttttcaaacagaaaatgcaggctggggagccgcggcagggcgggtggggctaccctgtgctgctgtgtgtacaaaattgttccatgatcttggagtgactctgaaggactctgggaggtgagacgttgtcccggagatcaaaacgtccgctcaaaacgttaccctgtcgctcgaacccgatctttttgcttttccacccccgtgcaacccaggacggctgtctgaggccgggagatgccttagacgcaggatgggccactcctcccagcggcaagtggaaatcgaagatgtcatggggtcggggggaggcttctgaaagatgactgcgtcctcctctgcggcacggacgggagcaggtgcagccacatcttccagggcctgccggcatcacctgcggccacacctgagatggaccccacgcagccctgatcgcaggaggcctggccgccccgaccccctccacggggctggcctagaagcaagtagtagaataaaactagcctagtcctgtccctccggccccagtggagacaggcgtctaagaacccgtgccgagagggttcctggacggccgcccaggtcctccgtgcaggcccgtgaggcggggatccctgcttggctcacttcctgagctggtgactgccagggttcccacctcgccaaggctagagggctccgggtgtgtgtgcaggtgtcgggggagtgacctccactcctcaacctcgggcagctcccacaggccacagccgggctccccacccccggcacccagctctctacggcaggtccgggagggctggggcttcggggagccctacccgccaaacctgctgttggcccgggagagccccagaggctcccggagactgcagcctcctgtggttgggctgggagccggcagggtttggggtgtgggcgtccccaccacgcatagcaggaatggcaggaagggacaaaagcctgttccagagaccctgggaggaccccaggcagggagagcccgcctgcctccaccctttccaacaagccatcttggtaactgggaacaaacacaccccaccccgtttttccttaaaagaggccttaatccccgagcccccgctgccagggcagagggaggagggggcacagctgtgccaagcccggccccactggtgtgtcctcacaatgtgaccccagaaatgccagcagggaacggaggctgctgcagagacgcagccccaggcagccggggctcctaggctggtgcagatggtggggttaaacgggctgagcgttccaggtaaactgaggctcggggaggggaaggacaggctggcctctccttcactgtccacagggccttgggttccctgagctgtccagaccccaccatctcccggaccccagggaggtggccattgccagaagcctgtgggtttctttctagcttgggggattaaaaaaaaaattctccacttttttttttcttgagtagacttcagtgaccacactgtggaaaatacctttgcagacgtggcacccgagtgcacacaccgaccgccacatgtgcttttctgccgggaatccctggggtgaacgcatgttttatgggcgtttccaggagcgcgcgtgcacctccagacggggagctggcgggcgggggtggcagcagcagctctagccttggggggacaagcctctctcagctacgccaggggaaaagagagttaaggacactcacccccacccacgcacacacacaaggcagcgtcgggtgggagagagaaggccgtttctccttctgtagcctgggtctcccacgggccttccccgctgctgagcgagacaccagtagccaggtgaagggccacagcgggccaggccccgaccctgttgtgacccacctgggcaccttcccggaccagctccgcctcccctgccctcctctctccaggaaggagccagaaccctcacccctctcccaccctccccaggggtaaccccaggccaagcacagatagctcagctgcgacctctggcctctggggacataaacggggcggctgggccagggcggaaggtgctcctgtttccctccttctgcgtggtccctttgacgggccggccaccgtgtccgaggcgcaacgctaggcctccaggccacgcatccatctccaagttaacagcccgtcctgcccaagttctggggcaggtaggagagggccgtcacacacctgtccgcccgtgagtgacccgggggggcttccgggtggaggtggagccaccacgcccttcctcaaggggtcacttattaaaaagtccacggcctgaggccaggccctctgcacagaagccatatgccggccagccgcgcctcctcctctgtccacggaaccgctgcccatctaaccttcgtaaagacctgtctcctgtttccagccgccgcctgtggttctagcaggttctatgccatctgcattgggatgtctggttgtttttatttctgacttttttaaaattccaggtgtgccgcacccactttctcgcagtgttttaatattgtgtggagttgtcgataccacgtgaattcatacacaataaaaagcctcactctccctttaaaaaaaaaaaaaaaaaa

SEQ ID NO: 5849 - DNA, 3344 bp, Homo Sapiens
  NM_052848
gcctgggcgcagcggtgcacccggacccggaacattctcaggcgaaagtgtctcttgcgtgcgtgggccggaggttagtgtgcggggcccgccgggcggttgaaaagtccgagagaatcaggatggaggccgtggcgacggcgacggcggcgaaggaacccgataagggctgcatagagcctggacctgggcactggggtgagctgagccggacaccagtcccatctaaaccccaggacaaagtggaagcagctgaggcaacaccagtggccctggacagtgacacctccggggctgaaaatgcagcagtgagtgctatgctgcacgctgtagccgccagccgcctgcctgtttgcagccagcagcagggtgaacccgacttgacagagcatgagaaagtggccatcctggcccagctgtaccacgagaagccactggtgttcctggagcgcttccgcacaggcctccgtgaggagcatctggcctgctttggccacgtgcgtggcgaccaccgtgcagacttctactgtgctgaggtggcccggcagggcactgcccggccccgcaccctgcgtacccgcctgcgtaaccggcgctatgctgccctgcgagagctgatccaagggggcgagtacttcagtgatgagcagatgcggttccgggcccccctgctatatgagcagtacatcgggcagtatctcacccaggaggagctcagtgcccgcaccccaacccaccagccccccaagcccgggtcccccgggagacctgcttgcccgctctccaacttgctgctccagtcctacgaggagcgggagctacagcagcgtctgctccaacagcaggaggaggaggaggcctgcttggaggaagaggaagaggaggaggacagtgacgaggaagaccagaggtcaggcaaggactcggaggcctgggttcccgactcggaggagaggctgatcctgcgagaggagttcaccagccgcatgcaccagcgcttcctagatggcaaggacggggactttgactacagcacagtagacgacaaccccgacttcgacaacctcgacatcgtggcacgggatgaggaggagaggtactttgatgaggaagaacctgaggatgcgcccagcccagagctggatggggactgatggccgccacccttcccaccgcctgccccatccccatccccaacaaggcagctgattccaggcctgctcagtgaccctttctctagggggacatcagggcagtgccccacaacccacacacaccaccatctcactgggtctagtctcatctcagacaacccccacccccactgtttctggggttccctttctcatctctcccaccctgtctcctgcctctgtctttcttggtgtctgtctgggcttctttctgtctctttctgtctttctgtctctctccctacccccgctccctctttccagtgctctggctggctgtctctccctttctccccctctctctctgccttaggctctgtctccaccgcagggcccaaggtgaaagtcctccccttgccggaggccagctggcagggcctttcgtggctggaagtggccagtttggttccggtgctgacccctaggccccagcgcagctgcctcccgtgctgtctgtctccccctctctgtttatgtctgcgctgtgtctcacactcagagcctccttgcttctgttaggttcccatctctccttctgcctcactctgggcctcttctttctacttgtacatttccacctctctaggcctctgctctcactgtccctctctgtctgtctctcagcctttatctctgggttttgatcccccactccaggctctgggccccttcttcccccttccctcaaacctggctgctataggcagcagaaccctgaccactgagtaatacagccccaggggagggaggagaccccaggcagggaggatgggggcagctctcttctctccccaggacccaggctgtggatcacggggcctgccagcttgagtgtagagggaggggggactctacccttctcagccccaccagcccccctctgcccaaccacaattttcccttcctccgccttcctctccctctcctgtttacactccccaaatgcgcacaggctgttatcatgggtcctgagtcatcccacacacagcctgccccagcgtccctgcccccagctggccgcagggcccgccccatggagccccctgccgccctgggctaatgggagccagatggccgcctggtgactcagccaccgggcctgtgggaacccaggcgtcccgccttcccatgcccccacacccggctcctgctcccccagcagacacacacaggagggcctggccactgttgagggggcacacagggcaagggtcaccaagtcggggcctagggactcctcatgcctctgagatggaatggtggtatcctgccgtggccaagcctgaaggaccctcaaaactgcctcctggagtccacggttcctgacctccgagcctcagctatgccctctgggtcaaccagaattagagccagacagggaaagtgagagctggatggaggcagacaagatgctcagagcgactattaaagaacgaaagcctctgctacggagcgcttctgtcctctgtcaggcccgagcgaagtgcctgacaccgggttggatcctcagatggccccatgaactagtgaagtgggtcaaaggaggcctggaaagatgttgcttcctcaaggccactcggccatcagaggcagaaatgaaacaggaacccaggcctagaatcacaaaggtcctagaaaccacttggctgtctggcctctcaggtgtcagggccatccagagtgagacagcattggagggacaagtgtgcatgcagatgtcctcagacgggaaggtttgagaagggtcagatggtaggcgggcctaacaagggctccgtgctagccactgtcccgcacacagacaggatcaggtcatcttgatatggagatcagtccccaaatcactgaattgtcccagcagtgctatgccctaggtactaccaatatcactcctctatttcccagaggaggaagcagcagctagactccaggaccttggggtcatatctctcagaaagccaagagtgcaggatgagagctgtctgtctcttacctgcctgtatttgtgccccatttttaaagagcagagggcctgggccacaggaaaggtatcagcccttggtgataggcacattttttaccagtctatcatttggtcattaaatttgtttacaatatactttgctataaaaaaaaaaaaaaaaaaaaaaa

SEQ ID NO: 5850 - DNA, 2376 bp, Homo Sapiens
  NM_052853
ggcgcgggcctccggcctgaggcccggcgaggtgctggagggagcggggcgcggatccggcccagatgggcagctccgtccgcggggtcagggccgggcttcggcttcaccgcagcctcgcctgagcgggcgcctctgaagtggagggcgggccgcctgggccgcgggcctcgggaggatggtggcgccctggcgcgtctccgtcagggtttgcctgtcgcacctgaggtgcttcgagctcagacagggactcagcctcctgaggccctccgagtgccctcgcgatgccaggctctgctggcttctgctgggcactttgcccaaggtcgtctccctgtgcggggacgtgggtgagggggcccctgacgttctgagtcggcgaagggtccgctgcagcggggcggctggcgcggggcccgcggagagcctcccccgagcgggacctctgggcggcgtcttcctgcatctccgcctctggcttcgcgccggcgctctgttggtgaaattcttccccctcctactcctctaccccctcacctacctggctcccagcgtctccaccctctggctccacctgcttctgaaagccaccgagacctcaggcccaacctacatcaaactgggccagtgggccagcacccggcgcgatctgttttcggaggctttctgtgcccaattttccaagctgcatgtccgagtgacgccccacccgtggactcacactgagcgcttccttcggcaggcttttggggatgactgggggagcatcctctcttttgagaaccgggaacctgtgggctcaggctgcgtggcccaggtgtacaaagcatacgccaacactgccttcctggagactgacagcgtccagagacttggcagggcctcctgtctgccgcccttctcacatactggggcagtcggtgggctgagagagctctttggataccttggaaatggccggaaacctccagaaaatctcgcagaccagtcgtttctagaaaggctgctcctccctaaagctgacctggttggatcaaatgcaggggtgtctcgggctcaggtccctggccaccaacctgaggccaccaacctcatctccgtggcagtgaaagtgttgcaccctggcctgctcgctcaggtgcatatggacctgctgctgatgaagattggcagccgagtcctgggagttttgccaggcatcaagtggcttagcttgcctgagattgtggaggaatttgagaagctgatggtccaacagattgacctgcgttacgaagctcagaatctagaacacttccaggtcaacttccggaatgtgaaagccgtcaagttccccacccctctgcgcccctttgtcaccagagaagtcttggtggaaacgtatgaagagagtgtgcctgtgtccagttaccagcaggcaggaattcccgtggacttgaaaaggaagattgcacggctggggatcaacatgctcctgaagatgatatttgtggataactttgtccatgcagaccttcaccctggaaacatcctggttcagggtgccaacggcctgtcctcgagtcaggaggcgcagctgcagcaggcggacatctgtgacactctggtggtggccgtgccatcttccctctgcccgctgcgactggtgctgctggatgctggcattgtggcggagctgcaggcccctgacctgaggaatttccgggcagttttcatggctgtggtgatggggcagggccagagagtggctgagctgatcctgcatcatgcccgggccagcgagtgcagggacgtggaggggttcaaaaccgagatggccatgctggtgacccaggccaggaagaacaccatcaccctggagaagcttcatgtgtccagccttctctctagtgtctttaagttgctgatgactcacaaggtaaagcttgagagcaactttgcctccattgtgtttgccatcatggtgttggaggggcttggccgctcactggaccccaaactggacatcctggaggcagcgaggcccttcctcctcacgggcccagtgtgccccccgtgatggggcagtggcctctgtgggcccttgtcaagagctggaggccactcccaagagcctctcctatggcagctgggacgttttaaaattgggacaccaatttcaaatgtaaccctccagtggtggaaggcacaccatggcttcctctgcttggtttgagggtctgttcaaaagctttgggccaattagggagtaaaaggagggaaggggcctatccattccattgtggaagctgggccaggtgccagggacactctccttcagggaaaatgttatgtggaggaggacgaataaatttattttgttttaaaaaaaaaaaa

SEQ ID NO: 5851 - DNA, 1657 bp, Homo Sapiens
  NM_052857
gacggaaaccagaatcgttttgggtctggtcgccaagatggcgtcctccgcctccgcccggactccggcagggaagcgagtgataaatcaggaagaattgcggcggttaatgaaggagaagcagcgtctgagcaccagtcggaaacggatagaatctccattcgcgaagtacaaccgtttggggcagctgagttgtgccctgtgtaacactccggttaagagcgagctcctgtggcagactcacgtcctgggaaagcagcaccgagagaaagtggccgagctgaaaggcgcgaaggaagccagccagggttcgtccgccagttcagcgcctcattccgtcaagaggaaagcgccggacgcagacgaccaagatgtcaagagagcgaaggccaccttggtgcctcaggtacagccctccacatctgcgtggaccaccaactttgacaaaataggaaaggagttcattagagcgactcccagtaagccttcaggactcagtttactccccgattatgaagatgaggaggaggaggaagaggaggaggaaggagatggagaaagaaaaaggggggacgccagcaagccgctctccgacgcacagggcaaggagcactcagtttcctcttcacgggaggtaacaagtagtgtgctgccaaacgatttctttagtactaatcctcccaaggcccccataattcctcattcagggtcaattgagaaagcagaaatacatgaaaaagtggtggaaaggagagaaaacaccgcggaagcgttaccggaaggtttttttgacgaccctgaggtagatgcaagagtacgaaaggttgatgctccaaaagatcagatggacaaagagtgggacgaattccaaaaagccatgaggcaggtcaacactatttccgaagccatagttgccgaagaggatgaggagggacggttggaccgccagattggggagatcgatgagcagatagagtgttaccgacgggtggaaaagctacggaatcgccaggatgaaataaaaaataaacttaaagaaatcctgaccataaaagaactgcagaaaaaggaagaagagaatgctgacagcgatgatgagggggaactacaggatttgttgtctcaggattggagggtgaaaggggcattgttatagggttttaaagacccaaggtttctaacagcctctgctgttgtataaaaagtgctgtctctcagtagtatagcggttacttcatgcctcaagatttgggtacctggattgctaaactggattgttgagataaaatgagccagtgagctacagcactttggaaaatttgtgtaacatgtttttgaggtaaagttgtttttgaaatttctgaagtgttatataccaaaatgccaacatttccacgacagacttaactgtataatttcgttgtaaaatctgtaagttgtaaatattgtacatagttaaatctgtattctgttttgaatttttttaattaatagaaagaccaaccggcaaactttcagatgaatgcttactgtggtatttggaatgtatgtatcttctgaaccctacatcaagttgaaaaggtttgttttcttgtttctttggtttttgtatggttttttagaacacttcataaacacataagtcattgtaggttaa

SEQ ID NO: 5852 - DNA, 3090 bp, Homo Sapiens
  NM_052864
tttacaaaggccccgggcgcgagaggacgtgctctgccagccagtgggaaggcaggccgcgcgcgcgggagcgcgggaggatcggcggctcgcggtcactggtccctggctcggttccccgcaccccggggctcacacttacccgcgcggaggagcagcggccgggtgtccacccccatcctgcgcccagtctcctcgattcccctcgctctgagccgggagagccgaacagctgaagagagttcactgactccccagccccaggtgggccttgtgcacatcatgaccagttttgaagatgctgacacagaagagacagtaacttgtctccagatgacggtttaccatcctggccagttgcagtgtggaatatttcagtcaataagttttaacagagagaaactcccttccagcgaagtggtgaaatttggccgaaattccaacatctgtcattatacttttcaggacaaacaggtttcccgagttcagttttctctgcagctgtttaaaaaattcaacagctcagttctctcctttgaaataaaaaatatgagtaaaaagaccaatctgatcgtggacagcagagagctgggctacctaaataaaatggacctgccatacaggtgcatggtcagattcggagagtatcagtttctgatggagaaggaagatggcgagtcattggaattttttgagactcaatttattttatctccaagatcactcttgcaagaaaacaactggccaccacacaggcccataccggagtatggcacttattcgctctgctcctcccaaagcagttctccgacagaaatggatgaaaatgagtcatgaacacagaaagtctaagaggagaaatatgatggatgaagagctctgtagatgctgtatagacactaaataagagttgattagggtagtatattatagtcatctgttatgctgtgaaatttggaattcagtattatcattttgaagtctgtaaattgtgttagtcattaacttagtcacctgttgtattctggatctacacaaaattattttaactgctcttattaatctgtgaggattaatatacaaaaagtatcctttgagatgaagtcgtgttctcaaaataaggttatattattttctttttctgcttgattttcatcttgtgttttgctttgtttttgtaaggaaccatctcttggtttggtcacatcagttcacaacagccatttgttttcaaggtcaaggctccaggcaggttgttactggtgtttgcagcctgtcagtacttgcagtactggaataggttctaggctagtgtctgcgcgtcactgtggttttagcatgggaggacttatttgagaaatactaccttacttttctatgatttctttttacagagttatagtgtgtttactcctaagatgacagttctctttgtctatattcagcatctaagacaaatatttaaacattttaaagaaccactgtgttaagtttaggattatttacttaccaaattagaagtttgacttttatgtgttatacacaatcttaaaatttcacgaattcacctttttaatagtatccatgtacataataaaatcaaagtttaattagccattttctttgaatttttttctaaataagggaaataactgttcttgggccactttacagagataaatgtatgtgaatgtttatgataaacgcttaaatatttctaaaatattaacttcaaaaaagtctttttcagttcttaaataaaaatttatttatttaagatacttattcgacttatcttaactaaggtagctatgaatgttaagtagatgaggtaaccattcagttaagttaaattgtagcattgccaggtagtgaggctcactgtacaattttccaggtaaatgaaatttcctgtagtaagaggtccgtatttttgtaacagccttttaaaaatgcttttgggaaccctccagcctcttaccaaaagaggctttaaacctcatcttgattcagactgtcagtctattcctgggcagtagtatgtgatgtccagcaccctaaccccgactccccagccctgggactattccagtagagtgaaatatttgtccctgtacaaagtggcctgaatgactgttggagttcctgtgtctggttttcctgtttattccctgtgatgcccagagtaatggcccatccaaagatgtccagatgtccatgtgctagtctccagaacttgtaactgtgttgttatgtggcaaaggggaatgaaggctgcagatggaagtaaaatagattatgctggattatctgggtgtgcccaattgatcaccggatccgtaaaagtggaagagaggcagatcaggatgtcagcgtgatgaggtgtgagacagacttgacttgctgttgctgggaggaaggggaggtcatgagccaaggaatgtggacagtctcttgaagctggaaagtgtgcattggacatctggaagccagaaaagacaaagaaatatccagaaaggaacaaagtcttgtggacaccttgattttggtccagtgagaatatgtttgacttgttaacctacaaaactttatgatgataaatttgtgttggtcgtaagccactaaatcacagtaatttgttatagcagcagatagaaaactaatatactccctttaatataaggttatctactattgattctttctaggattttagcttctggtctgatgtgggtttacagccagatcacccggcttgaattgcttacagtgtgtagtctcatggtaaaggcgttctatgagtgaagtgtatatactttaatgtgtgtatactgtcacattttgactattttggaagactttcacctctgtttcttgtctttgaggctgatgaatgtgtttctaagttataaatttaatattaagggattcatgtattattgttattgaatccaaacaatgtgttaagtaatatttagggccagaaaaatcttgtacagaataatgatttctcctaatgtaaatcttggaaagggttttgttcaacttgagaaatattaaattttttattctaaaaaaaaaaaaaaaaaa

SEQ ID NO: 5853 - DNA, 2294 bp, Homo Sapiens
  NM_052868
cgcgtccgttcggcagctccagttcagctcgctcggcgcacccacgcctcgctgccccgcttcctgccctcaacctgggcatgcgccccccacccttccggccccccagaacccgcgccatcccccggagcctccccagagctggccgcgcaggatgggcgccctcaggcccacgctgctgccgccttcgctgccgctgctgctgctgctaatgctaggaatgggatgctgggcccgggaggtgctggtccccgaggggcccttgtaccgcgtggctggcacagctgtctccatctcctgcaatgtgaccggctatgagggccctgcccagcagaacttcgagtggttcctgtataggcccgaggccccagatactgcactgggcattgtcagtaccaaggatacccagttctcctatgctgtcttcaagtcccgagtggtggcgggtgaggtgcaggtgcagcgcctacaaggtgatgccgtggtgctcaagattgcccgcctgcaggcccaggatgccggcatttatgagtgccacaccccctccactgatacccgctacctgggcagctacagcggcaaggtggagctgagagttcttccagatgtcctccaggtgtctgctgcccccccagggccccgaggccgccaggccccaacctcacccccacgcatgacggtgcatgaagggcaggagctggcactgggctgcctggcgaggacaagcacacagaagcacacacacctggcagtgtcctttgggcgatctgtgcccgaggcaccagttgggcggtcaactctgcaggaagtggtgggaatccggtcagacttggccgtggaggctggagctccctatgctgagcgattggctgcaggggagcttcgtctgggcaaggaagggaccgatcggtaccgcatggtagtagggggtgcccaggcaggggacgcaggcacctaccactgcactgccgctgagtggattcaggatcctgatggcagctgggcccagattgcagagaaaagggccgtcctggcccacgtggatgtgcagacgctgtccagccagctggcagtgacagtggggcctggtgaacgtcggatcggcccaggggagcccttggaactgctgtgcaatgtgtcaggggcacttcccccagcaggccgtcatgctgcatactctgtaggttgggagatggcacctgcgggggcacctgggcccggccgcctggtagcccagctggacacagagggtgtgggcagcctgggccctggctatgagggccgacacattgccatggagaaggtggcatccagaacataccggctacggctagaggctgccaggcctggtgatgcgggcacctaccgctgcctcgccaaagcctatgttcgagggtctgggacccggcttcgtgaagcagccagtgcccgttcccggcctctccctgtacatgtgcgggaggaaggtgtggtgctggaggctgtggcatggctagcaggaggcacagtgtaccgcggggagactgcctccctgctgtgcaacatctctgtgcggggtggccccccaggactgcggctggccgccagctggtgggtggagcgaccagaggacggagagctcagctctgtccctgcccagctggtgggtggcgtaggccaggatggtgtggcagagctgggagtccggcctggaggaggccctgtcagcgtagagctggtggggccccgaagccatcggctgagactacacagcttggggcccgaggatgaaggcgtgtaccactgtgcccccagcgcctgggtgcagcatgccgactacagctggtaccaggcgggcagtgcccgctcagggcctgttacagtctacccctacatgcatgccctggacaccctatttgtgcctctgctggtgggtacaggggtggccctagtcactggtgccactgtccttggtaccatcacttgctgcttcatgaagaggcttcgaaaacggtgatcccttactcctcaggtcttgcaggtgtcgactgtcttccggcccagctccaagccctcctctggttgcctggacaccctctccctctgtccactcttcctttaatttatttgacctcccactacccagaatgggagacgtgcctccccttccccactccttccctcccaagcccctccctctggccttctgttcttgatctcttagggatcctatagggaggccatttcctgtcctggaattagtttttctaaaatgtgaataaacttgttttataaaaagcaaaaaaaaaaaaaaa

SEQ ID NO: 5854 - DNA, 511 bp, Homo Sapiens
  NM_052871
tttttttttttttccttcttagtcgtgtgtacatcattgggaatggagggaaataaatgactggatggtcgctgctttttaagtttcaaattgacattccagacaagcggtgcctgagcccgtgcctgtcttcagatcttcacagcacagttcctgggaaggtggagccaccagcctctccttgaataactgggagatgaaacaggaagctctatgacacacttgatcgaatatgacagacaccgaaaatcacgactcagccccctccagcacctctacctgttgcccgccgatcacagccggaatgcagctgaaagattccctggggcctggttccaaccgcccactgtggactctgaggcctctgcatttgcgggtggtctgcctgtgatattttggtcatgggctggtctggtcggtttcccatttgtctggccagtctctatgtgtcttaatcccttgtccttcattaaaagcaaaactaaagaaaaaaaaaaaaaaaaaaaaaaaa

SEQ ID NO: 5855 - DNA, 865 bp, Homo Sapiens
  NM_052873
ggtttccaggaagtgacgtcaggcggccgcggagatggaggatttgctcgacttggacgaggagcttcgctacagcttggctacctccagggccaagatgggtcgccgagctcaacaggagtcagcgcaggccgagaatcacctcaatggcaagaattcctctttgactctgactggagagacttcctctgctaaattacctcgctgccgacagggaggctgggcaggtgattccgtgaaggcttcgaacggtacccaaacaggcaaacaacagctggatctgaacgcatgctatcacaaaacgcatcacagagatttggggctggcttcattggaagaggcagatattcctatcattccggatctggaggaagtacaggaagaagactttgttttgcaggtggcagcccctcccagcatccagataaagcgggtgatgacctaccgtgacctggacaatgacctcatgaagtactcagccattcagacactggatggggagatcgacctgaaactcctcaccaaagtgctcgcgccggagcacgaagtccgggaggatgatgtcggctgggactgggaccatctgttcactgaggtgtcctcagaggtcctcactgagtgggacccactgcagacggagaaggaggaccctgcggggcaggccaggcacacctgagcccgtcacccatgctctagacatgaagaaatgcaatgagcttaaagctaaagaagcttgtaagcagctccgaatttttacctggaatattttgtaataaaaatatttatattcagtcaaccacattggataattcaattgcaataaattgcttattctgtgccatctcctcaaaaaaaaaaaaaaaaa

SEQ ID NO: 5856 - DNA, 2478 bp, Homo Sapiens
  NM_052880
agctgaaaaacagctcgcgctgcagcaagctagctgggaagctcccagttctaaagagaggctgtttaccagaacagcataacaagggcaggtctgactgcaaggctgggactgggaggcagagccgccgccaagggggcctcggttaaacactggtcgttcaatcacctgcaagacgaaggaggcaaggatgctgttggcctgggtacaagcattcctcgtcagcaacatgctcctagcagaagcctatggatctggaggctgtttctgggacaacggccacctgtaccgggaggaccagacctcccccgcgccgggcctccgctgcctcaactggctggacgcgcagagcgggctggcctcggcccccgtgtcgggggccggcaatcacagttactgccgaaacccggacgaggacccgcgcgggccctggtgctacgtcagtggcgaggccggcgtccctgagaaacggccttgcgaggacctgcgctgtccagagaccacctcccaggccctgccagccttcacgacagaaatccaggaagcgtctgaagggccaggtgcagatgaggtgcaggtgttcgctcctgccaacgccctgcccgctcggagtgaggcggcagctgtgcagccagtgattgggatcagccagcgggtgcggatgaactccaaggagaaaaaggacctgggaactctgggctacgtgctgggcattaccatgatggtgatcatcattgccatcggagctggcatcatcttgggctactcctacaagagggggaaggatttgaaagaacagcatgatcagaaagtatgtgagagggagatgcagcgaatcactctgcccttgtctgccttcaccaaccccacctgtgagattgtggatgagaagactgtcgtggtccacaccagccagactccagttgaccctcaggagggcaccaccccccttatgggccaggccgggactcctggggcctgagcccccccagtgggcaggagcccatgcagacactggtgcaggacagcccaccctcctacagctaggaggaactaccactttgtgttctggttaaaaccctaccactcccccgcttttttggcgaatcctagtaagagtgacagaagcaggtggccctgtgggctgagggtaaggctgggtagggtcctaacagtgctccttgtccatcccttggagcagattttgtctgtggatggagacagtggcagctcccacagtgatgctgctgctaagggcttccaaacattgcctgcacccctggaactgaaccagggatagacggggagctcccccaggctcctctgtgctttactaagatggcctcagtctccactgtgggcttgagtggcatacactgttattcatggttaaggtaaagcaggtcaagggatggcattgaaaaaatatatttagtttttaaaatatttgggatggaactccctactgacctctgagaactggaaacgagtttgtacagaagtcagaactttgggttgggaatgagatctaggttgtggctgctggtatgcttcagcttgctggcaatgatgtgccttgacaaccgtgggccaggcctgggcccagggactcttcctgtttcataaggaaaggaagaattgcactgagcattccacttaggaagaggatagagaaggatctgctccgcctttggccacaggagcagaggcagacctgggatgccccagtttctcttcagggatggatagtgacctgtcttcattttgcacaggtaagagagtagttagctaacctatgggaattatactgtggggccttgtgagctgcttctaagaggctaacctggaaactaagctcagaggcaaggtaataaagcacttcagggcttgctccccaagtgggcctgatttagcaggtggtcctgcgggcgtccaggtcagcaccttcctgtagggcactggggctagggtcacagcccctaactcataaagcaatcaaagaaccattagaaagggctcattaagccttttggacacaggaccccagagaggaaaaagtgacttgcccaaggtcgtaagcaagctactggcatggcaagagcccagcttcctgacggagcgcaacatttctccactgcactgtgctagcagctcagcagggcctctaacctgtgatgtcacactcaagaggccttggcagctcctagccatagagcttcctttccagaacccttccactgcccaatgtggagacgggttagtggggctttctatggagccatctgctttggggacctagacctcaggtggtctcttggtgttagtgatgctggagaagagaatattactggtttctacttttctataaaggcatttctctatatacatgttttatatacctcattctgacacctgcatatagtgtgggaaattgctctgcatttgacttaattaaaaaaaaaaaaagactccaaaaaa

SEQ ID NO: 5857 - DNA, 758 bp, Homo Sapiens
  NM_052889
acacaagaagggtaggagagaaaagccatggccgacaaggtcctgaaggagaagagaaagctgtttatccattccatgggtgaaggtacaataaatggcttactggatgaattattacagacaagggtgctgaaccaggaagagatggagaaagtaaaacgtgaaaatgctacagttatggataagacccgagctttgattgactccgttattccgaaaggggcacaggcatgccaaatttgcatcacatacatttgtgaagaagacagttacctggcagagacgctgggactctcagcaggtccgatacctggaaattagcttagtacacaagactcccaattactattttcttccttcccagctcttcaggcagtgcaggacaacccagctatgcccacatgctcaagcccagaaggcagaatcaagctttgctttctagaagacgctcaaaggatatggaaacaaaagttgcagaggtgccatgttcagaatacaataataaagtggagtgaaagatatacttcaggcagttttgaaatgcagtggctttttcttagaaccaattttattgagcggttctggaggaacatacttctgctccccttgcataaaggatctctatatcctagaatcccaggtttaggtaaagagttgcaaactggaactcataaattatcatagtcttcacccagtctgtctcttagaatttatttcccactgacacaaacaagccattttgtctgcttgtataaccc

SEQ ID NO: 5858 - DNA, 3240 bp, Homo Sapiens
  NM_052901
ggcagtggagcacccagcaggccgccaacatgctctgtctgtgcctgtacgtgccggtcatcggggaagcccagaccgagttccagtactttgagtcgaaggggctccctgccgagctgaagtccattttcaagctcagtgtcttcatcccctcccaggaattctccacctaccgccagtggaagcagaaaattgtacaagctggagataaggaccttgatgggcagctagactttgaagaatttgtccattatctccaagatcatgagaagaagctgaggctggtgtttaagagtttggacaaaaagaatgatggacgcattgacgcgcaggagatcatgcagtccctgcgggacttgggagtcaagatatctgaacagcaggcagaaaaaattctcaagagcatggataaaaacggcacgatgaccatcgactggaacgagtggagagactaccacctcctccaccccgtggaaaacatccccgagatcatcctctactggaagcattccacgatctttgatgtgggtgagaatctaacggtcccggatgagttcacagtggaggagaggcagacggggatgtggtggagacacctggtggcaggaggtggggcaggggccgtatccagaacctgcacggcccccctggacaggctcaaggtgctcatgcaggtccatgcctcccgcagcaacaacatgggcatcgttggtggcttcactcagatgattcgagaaggaggggccaggtcactctggcggggcaatggcatcaacgtcctcaaaattgcccccgaatcagccatcaaattcatggcctatgagcagatcaagcgccttgttggtagtgaccaggagactctgaggattcacgagaggcttgtggcagggtccttggcaggggccatcgcccagagcagcatctacccaatggaggtcctgaagacccggatggcgctgcggaagacaggccagtactcaggaatgctggactgcgccaggaggatcctggccagagagggggtggccgccttctacaaaggctatgtccccaacatgctgggcatcatcccctatgccggcatcgaccttgcagtctacgagacgctcaagaatgcctggctgcagcactatgcagtgaacagcgcggaccccggcgtgtttgtgctcctggcctgtggcaccatgtccagtacctgtggccagctggccagctaccccctggccctagtcaggacccggatgcaggcgcaagcctctattgagggcgctccggaggtgaccatgagcagcctcttcaaacatatcctgcggaccgagggggccttcgggctgtacagggggctggcccccaacttcatgaaggtcatcccagctgtgagcatcagctacgtggtctacgagaacctgaagatcaccctgggcgtgcagtcgcggtgacggggggagggccgcccggcagtggactcgctgatcctgggccgcagcctggggtgtgcagccatctcattctgtgaatgtgccaacactaagctgtctcgagccaagctgtgaaaaccctagacgcacccgcagggagggtggggagagctggcaggcccagggcttgtcctgctgaccccagcagaccctcctgttggttccagcgaagaccacaggcattccttagggtccagggtcagcaggctccgggctcacatgtgtaaggacaggacattttctgcagtgcctgccaatagcgagcttggagcctggaggccggcttagttcttccatttcacccttgcagccagctgttggccacggcccctgccctctggtctgccgtgcatctccctgtgccctcttgctgcctgcctgtctgctgaggtaaggtgggaggagggctacagcccacatcccaccccctcgtccaatcccataatccatgatgaaaggtgaggtcacgtggcctcccaggcctgacttcccaacctacagcattgacgccaacttggctgtgaaggaagaggaaaggatctggccttgtggtcactggcatctgagccctgctgatggctggggctctcgggcatgcttgggagtgcagggggctcgggctgcctggcctggctgcacagaaggcaagtgctggggctcatggtgctctgagctggcctggaccctgtcaggatgggccccacctcagaaccaaactcactgtccccactgtggcatgagggcagtggagcaccatgtttgagggcgaagggcagagcgtttgtgtgttctggggagggaaggaaaaggtgttggaggccttaattatggactgttgggaaaagggttttgtccagaaggacaagccggacaaatgagcgacttctgtgcttccagaggaagacgagggagcaggagcttggctgactgctcagagtctgttctgacgccctgggggttcctgtccaaccccagcaggggcgcagcgggaccagccccacattccacttgtgtcactgcttggaacctatttattttgtatttatttgaacagagttatgtcctaactatttttatagatttgtttaattaatagcttgtcattttcaagttcattttttattcatatttatgttcatggttgattgtaccttcccaagcccgcccagtgggatgggaggaggaggagaaggggggccttgggccgctgcagtcacatctgtccagagaaattccttttgggactggaggcagaaaagcggccagaaggcagcagccctggctcctttcctttggcaggttggggaagggcttgcccccagccttaggatttcagggtttgactgggggcgtggagagagagggaggaacctcaataaccttgaaggtggaatccagttatttcctgcgctgcgagggtttctttatttcactcttttctgaatgtcaaggcagtgaggtgcctctcactgtgaatttgtggtgggcgggggctggaggagagggtgggggactggctccgtccctcccagccttctgctgcccttgcttaacaatgccggccaactggcgacctcacggttgcacttccattccaccagaatgacctgatgaggaaatcttcaataggatgcaaagatcaatgcaaaaattgttatatatgaacatataactggagtcgtcaaaaagcaaattaagaaagaattggacgttagaagttgtcatttaaagcagccttctaataaagttgtttcaaagctga

SEQ ID NO: 5859 - DNA, 3934 bp, Homo Sapiens
  NM_052903
gaagtcgcccggcgcgggagcgcgaactctcgcgagaatgccgccagctccggaggcgactgcggcaggagcccgagctctcgcgcgacaggcaccaattcgttagacgcgcgctgcaggagcgcggaacatggcgcggcacgggccaccgtggagtcggttggacgcgcagcaggagcgcgacgtgcgggagctcgtccggggtgtcgccggcctccaggacgaggcagaccccaacttccagctcgccctaaacttcgcctggtccaacttcagatttcatcgtttcttggatgtcaacagccacaaaatagaaaaaacaatcgaaggaatttatgaaaaatttgtcattcattctgatctaagcaaagctgctagttggaagagattaacggaggaatttctaaatgcaccacttcccagtataaaggaaataaagacagatgcacattattccatactgtcacttcttctgtgtctgtcagactctccttcaaacagcagttatgtggagacaccaagaaataaagaagtggaaaagaaagatgatttcgactggggaaaatacttgatggaagatgaagaaatggacattggtccgtacatggacacaccaaattggtctgaagaaagtgaagaggaaaatgatcaacagcccttaagcagagaggactctggaattcaggtagacaggacaccgttagaagaacaagatcaaaacagaaaactggatccttgtatcagttggaaagatgagccagatgaccgaagctggctggaacatcatgtggtccatcagtactggacagccaggccctcccagtttcctcatagtttacatttgcactctaatttagctgctgtctgggaccaacacttgtacagcagtgatccattgtatgttccagatgacagggttttggttactgagactcaggttattcgggaaaccctatggttactttcaggagtgaaaaagctctttatatttcagttgatagatgggaaggtaactgtgagaaacaatattatagtaactcatttaacacatagctgtttacgatctgtgctggaacaaatagcagcatatggccaggttgtgtttcgactccaggagttcattgatgaagtcatgggacacagttctgagagcatgctgcctggaagtgggtctgttcctaagaagtcaactgaagctccctttagaacctaccaggctttcatgtgggccctgtacaaatatttcattagtttcaaagaggaacttgcagaaattgagaagtgcatcatcaataatgatactacaataactcttgcaatagtggtggacaagttggcacctcgattgtctcagctcaaggttctgcacaaagtgtttagtactggagtagcagaagttccacctgatactcgaaatgtcgtccgggcctctcacctgcttaacaccctgtacaaggccattcttgaatatgacaatgttggagaagcctctgagcaaaccgtctccctccttttctctctctgggtggaaacggtgcggccttacctgcagacggtggacgagtggatcgtgcacgggcacctgtgggatggcgccagggagttcatcatccagagaaacaaaaatgttccagttaatcacagagacttctggtatgcaacttacacgttatatagcgtatcagaaaagacagaaaatgaagaaaaaatgagtgataacgctagtgcgagttccggcagtgaccaggggccctccagcaggcagcacaccatggtgtccttcctcaaacctgtcctgaagcagatcataatggctggcaagtcgatgcagctgctgaagaacctgcagtgtgcggagagcaccacctgccaggcaggagccagagatgcagaaagaaaaagtttatacactctctttctggaatctgtacagtcccgtcttcgacatggagaagattccactccacaggttcttactgagcaacaggcaaccaaggagaacctgatgaagatgcagtccattgctgaaagccatcttgaactggatgatgttcatgatccactgcttgccattaactttgcaaggatgtatttggagcagagtgactttcacgagaagtttgctggtggtgatgtatgtgtggatagatcatcggaatctgtgacatgccagacttttgaattaacgctgagatcctgcctctatcctcatattgacaagcagtatctagattgctgtggaaatctcatgcaaactctaaaaaaagattacaggttggtagaatacttgcaagctatgaggaattttttcttaatggaaggaggagataccatgtatgacttctacacgtcaatttttgataaaataagagaaaaggaaacatggcagaatgtgtcttttcttaatgtccaactccaagaagcagtaggacagcgttatcctgaagatagttcacgtctatctatatcttttgaaaatgttgacacagctaagaagaagctgcctgttcatatcttagatggtctgaccctcagctacaaggtcccatggcccgtggacattgttataagtttggaatgtcaaaaaatttataatcaagtgtttcttctcttattgcaaataaagtgggcaaaatatagtctggatgttttactttttggtgaactggttagtactgcagaaaaaccacgacttaaagaaggccttatacatgaacaagacacagttgctcagttcggaccacaaaaagaaccagtaagacagcagattcatcgcatgttcctcttaagagtgaagctcatgcatttcgtgaacagcttgcacaactacatcatgaccaggattctacacagtacagggctggagtttcaacatcaagtcgaggaagccaaggatttagatcaattgattaaaattcactataggtatctgtcaaccatccatgaccggtgtctgctgagagaaaaggtcagctttgtgaaagaagctatcatgaaggtgttgaacttggctctcatgtttgcagacggttggcaggcaggcctgggcacttggcgaatggaatctatagagaaaatggaatctgattttaaaaactgccatatgtttcttgtaaccattttaaacaaagccgtctgtagaggatcctttccccatttggaatctctagcgttgtcactcatggctggcatggaacaaagttaaatgtcttcagcgtaataaatatctccgactttgtcatcatacatgtacatttccaccatgtgcagctgaaaagtgaaaatatttttattttggtttatttgtaaaacttgtccacagtcagcctggcacagtcgctcatgcctctaatcccagcacgatgggaggccaagacaggcagatcacttgagcccaggagtttgaggccagcctgggcaacatggtgaaacccggtgtctaccaaaaatacaaaatgtatccagacatggtggtgtgtacctgtagtcccagctactcaggaggcaaagatgggaggattacttgagcccaggaggtcaaggctacagtgagccatgattgcactactgcagtgcaacctgggtgacagagtgagaccctgactcagaaagaaccacttgcccacagtccagacagatggattgtaggtgggttttctggagattagtagatactgtatagagttgtatacataaaattgtgtcagtagtacaaagtgtatataggctgtttactcttacatttcctactgtaagatacagatttatggtactgatacctttaaattatatcatattttgaaaatgtaattactgatattcaaaataaattaaaggacttaaaatcaaaaaaaaaaaaaaaaaaaaaaaaaaaaaaaaaaaaaaaaaaaaaaaaaaaaaaaaaaaaaaaaaaaaaaaaaaaaaaaaaaaaaaa

SEQ ID NO: 5860 - DNA, 4915 bp, Homo Sapiens
  NM_052916
gcggccgcggtgaagcgcggagggcggcgcgggcaccggggccgggccggggctgcagccgcagcggccatgggggccctgacgagccggcagcacgcgggcgtggaggaggtggacatcccgtctaattccgtgtaccgctacccgcccaagtccggaagctattttgccagccacttcattatgggaggagagaagtttgactcaactcatcctgaaggttacctgtttggagagaacagcgatctgaactttctggggaacagaccagttgtgtttccttacgccgccccacctccccaagaacccgtgaagactctgagaagcctggtcaatatccgaaaggacacactgaggctcgtcaaatgtgctgaggaagtgaagagccctggagaagaggccagtaaagctaaagtccactacaatgttgagttcacctttgacacagatgctcgggtagccatcaccatctattaccaggccacggaagagttccagaatggtattgccagctacattcccaaagacaacagcctccagtcggagactgtgcagtacaagcgaggagtgtgtcagcagttctgcctgccctcccacaccgtggatccctccgagtgggccgaagaggagcttggctttgatttagaccgagaagtttaccctctagtggtacatgccgtggtggatgaaggagacgagtattttggccattgccatgtactgctgggtacttttgagaagcacacagatggaactttctgtgtcaagcccctcaaacagaaacaagtagtagacggggtcagctacctccttcaggagatctatggaattgaaaacaagtacaacacacaagattctaaggtggctgaagacgaagtgagtgataacagtgccgagtgtgtggtgtgtctctcggatgtccgggacaccttgattctgccctgtcgccacctctgcctctgtaacacctgtgcagacacgctgcgctaccaggccaacaactgccccatctgccgactgcccttccgggcactgcttcagatccgagccatgaggaaaaaattgggccccttgtccccaaccagctttaaccccatcatctcatcccagacatctgactctgaagagcatccatcctcagagaatattccaccaggctatgaagtagtatctcttctggaggccctcaacgggcccctcaccccgtccccagcagttcctccacttcacgtgcttggagatggccacctctcaggaatgctcccttcatatggcagtgatggccacctgccccccgtcaggacgatctcgcctcttgaccgcctgtctgacagcagcagtcagggactcaaactcaaaaagagtctctccaaatccacttcccaaaactcttccgtgctgcatgaagaggaagatgagcattcctgcagcgagtcggagacacagctctctcagagaccgtcggttcagcatctcggagaggaatgtggtgtgactccagaaagtgagaatctcaccttgtcgtcatctggagctattgaccagtcgtcttgcacagggacgcctctgtcatccactatttcctccccagaaggccctgccagcagcagcttggcccagtctgtcatgtccatggcatcctcccagatcagcactgacaccgtctcctccatgtctggctcctacatcgcccctggcactgaagaggagggagaggctctctcttccccccagcctgccagcagggccccctcagaagaaggagaggggctgccagcggagtctccagacagcaactttgctggcctcccagctggagagcaggatgcagagggaaatgatgttatagaggaagaggatggatcacccacgcaggaaggccagaggacgtgcgcatttctaggtatggagtgtgacaataacaatgactttgacatcgcaagcgtgaaagcactggacaataagctgtgctctgaggtctgcttacctggtgcctggcaggctgatgacaatgccgtcagtcggaatgcccagcgccggcgcttgtcatccagcagcctggaggactctgagacgaggccctgtgtgtggggccctttggctgtctgagccccagcctctgcacttgggctcccctcctgccctgcattccatccatcctcactcagctgctgcctactgggcatcctcagcaagatgctggagactttttaccctcctgtgacagctgttacaacctgtaaccacaatccctcacctctcagagggaactggaaccctcctttctccgtgtgacctaaagccactcaatgaactgcagctcacgagaccttttgcagggactctggaatgtcctcacggtatattgatgttcaggtggagctggggtccatgggctaatttcttacacatcttttttctccttagggggtagaacaagaaggcttagagtttggcagctttgttacaaacatccctctggcatttcctggtctctggcacatcataaccaattggaaacctgcagtttggggtagggctggaggatcgctcctgtggaaagggagagccatactgcacggacgtagcgtttccctctacaagcactaggagcacctttctcaaggacaagaaatggtagcaaccaaaaggttggttgaaggaaacaatccttccttctggtggcagagccagtcttctgggcctcacatgcctgtgcggttaagaaggagctcttggccgggcgcggtggctcacgcctgtaatcccagcactttgggaggccgaggcgggtggatcatgagatcaggagatcgagaccatcctggctaacacggcgaaaccccgtctctactaaaaatacaaaaaattagctgggcatggttgcaggcgcctgtagtcccagctacttgggaggctgaggcaggagaatggcctgaacccgggaggcggagcttgcagtgagccgagatcgcgccaatgcactccagcctgggcgacagagaaaaaaaaaaaaaaagaaggagcccttgaatctgagaatcccccagttaagatgatttcccttaaggagcatttctcctgatcaggtgcattcagggaggcctgcaactccatcctaaggtgacatttcaagaaacacatgtgttgaccacctctgtgtgccaagcactgggtgaggagtggtcgtatattaccataattcatcctcactcaattgggaggtggcattcttgtccctgttgcccccatctctacccccttttgttaatggttgagagaaatgtggaccagtgattctcagtttggtgcccaggtccccaaaggaagtgatggagagccttgagctaagttcaggcagcagcatgtggccagcagcagtgtgctgggagcagaggttggaatcagggctcagggccttcacttcaagggccctccccagctactcgggaggctgaggcaggagaatcgcttgaactcaggaggtggaggttgcggtgagccaagatcgtgccactgcactccagcctgggctacaagattgaaaagatcgaaactctgtctcaaacaaaaaaaaaaaaattcaaggctgtttccaaggcagcctcaaaaagagcctggtgcccagggggtccttcgtttctgtgtggctgcagaggccaggagtgcagtgactgtctcactgcctagtggttgtggctcacatcctgccctgatggagaggggggcctgtcgtccaaccctctctgaaaaactgcagtagactttaccatttcaggccccacctaatgttctttccttccttccccctacattcttcccgcccctttcatagttaagatgcataagctgagcaataaccccacttcctgatttccctgaaatatgagcccagaagcagcaggtgacagggagcttcccttaccctggggtggtggcacacagaccacctcctgtcctgtcccctgcaggtagtattcacagtgtggtgttacctgggaggagggaggaaggagctgagatgaaggagattcaggtaaacagtagccacagtggccaggacccccttcctgaggatccctgtccttcctcgcagcaggtgcttagtcctctcctagggagaagcacggaaagattcctcaaggcctcagtcccatgtccaaggcatacctaggttagaaatgtcctttacttgtttctcagttactatttctcctcttcctccctccccctgccttctcttggctgtcatttagctctctggcccacagaaatactccatccaaggagctggtcctcagtcagcctgatgaggacaggtcagtggccaacccttttgccccagtccttcatctggagacagtcacatagtcacgtcaacagttcacccaaagagaagaggtggggcctggcttctcccacagggcacagcctaactatggagacccagggctccttcctgctgcactaggcctgtgctctccctattgccttcaggtggtgtgatcccggcttcctcacagagcccttttttccttctgcccagctccatcccaccagagtttctacccccgctgaggcatctcctgggcacagaccaccacactctaagccggctggcctgggagttagggtcctgcccacctcacctgggagttggggtcctgcccacctggagtttagcacgctggtcgctcactttgctttggtctgcacacctggtgtgtgcatgtgtatactgcttgtgccatctgtgtacccctctccctggagtacacttgtggtcacactacagtggggacatcaagaatgcaatatttatggattgctgcatgattcttaaaaatgaataaaactgtttacaagggaaggagagctaactgcaaagtgaaaaaaaaaaaaaaaaaaaaaaaaa

SEQ ID NO: 5861 - DNA, 3970 bp, Homo Sapiens
  NM_052925
ccactgtactctatcgtgggcgacgacagagcaagagcaagactccgtctccgagaacaacaacaacagcaacaagaaaacaacaataaaaaaaataaggctgcgtgggaggcagaaagagctaatgcggccacgcttgtcccctcggggccaccgtccccacccagacttccggtctgccttaaaatgttcatgcgtaagtgcgtgggcaggaaggcgggctcaagcgcagctcgtggcgttcattggctgtgcagggccgagggaggcggtgcaaggccgccgcgtgacgtcaggacgccgcggtcaggacgtcgaagccaaagaagaccagagccagccgggtggcacagcggtgtcgtggccgtgttgctgatcgcctgggtggttgttggcgtgtccctgcagcgaaggatcctggttggcagtgaaaaagcagtctggctcccgaggtccaccccttataccccaaggtccagatggcggccaacgtgggtgatcaacgtagcacagattggtcttctcagtacagcatggtggctggggcaggccgagagaatggcatggagacgccgatgcacgagaacccggagtgggagaaggcccgtcaggccctggccagcatcagcaagtcaggagctgccggcggctctgccaagtccagcagcaatgggcctgtggccagtgcacagtacgtgtcccaggcagaagcctcagctttgcagcagcagcagtactaccagtggtaccagcagtacaactatgcctacccctacagctactactatcccatgagcatgtaccagagctatggctccccttcccagtatgggatggccggctcctatggctcagccacaccccagcagccatccgcaccccaacaccaagggactctgaaccagcccccagtccccggcatggatgagagcatgtcctaccaggctccccctcagcagctgccgtcggctcagccccctcagccctcaaatcccccacatggggctcacacgctgaacagtggccctcagcctgggacagctccagccacacagcacagccaggcggggcccgccacgggccaggcctatgggccacacacctacaccgaacctgccaagcccaagaagggccaacagctgtggaaccgcatgaagcccgcccctgggactggaggtctcaagttcaacatccagaagcgaccctttgctgttaccacccagagctttggctccaacgcagagggccagcacagtggttttggcccccagcccaaccctgagaaagttcagaaccacagcgggtcctctgcccgggggaacctgtctgggaagcccgatgactggccccaggacatgaaagagtatgtggagcgctgcttcaccgcctgtgagtcggaggaggacaaggaccgcacggaaaagctgctcaaggaggtgctgcaggcgcggctgcaggacggctcggcctataccattgactggagccgggagcccttgccggggctgacccgggagcctgtggctgagagccctaagaagaagcggtgggaggccgctagcagccttcaccctcctagaggggcaggctcggcgacaaggggcgggggtgccccgtcccagcgagggacgcccggggctgggggtgccggtcgagcccggggcaacagcttcaccaagtttggcaaccgcaacgtcttcatgaaggacaacagctcttcttccagcacagactcccgctcccgctcctcctccaggtccccgacgcgccacttccgcagaagtgactcccactcagactccgacagctcctactcagggaatgagtgtcaccctgtgggccgcaggaacccgccccctaagggccggggcggtcgaggggcccatatggatcggggccgaggcagggcgcagcgtgggaagaggcacgatctggcgcccaccaagcgcagtcgaaagaagatggcggcgctggagtgtgaggacccggagcgagagctgaagaagcagaagcgggcagcccgcttccagcacggacactcccgccgcctgcgcctcgagcccctggtgctgcagatgagcagcctggagagcagtggggctgaccctgactggcaggagctgcagatcgtgggcacctgccctgacatcaccaagcactacctgcgcctcacctgtgcccccgacccgtccaccgtgcgccctgtggcagttttgaaaaagtcgctgtgcatggtcaagtgccactggaaagagaagcaggactacgcgtttgcctgcgagcagatgaagtcgatccggcaggatctgacggtgcagggcatccgcaccgagttcacggtggaggtgtacgagacccatgcccggatcgccttggagaagggtgaccatgaagagtttaaccagtgccagacgcagctcaagtcgctgtacgccgagaacttgcctggcaatgtgggcgagtttactgcctaccgaatcctctactacatcttcaccaagaactcgggagacatcaccacggagctggcatacctcacacgagaactgaaggcagatccttgcgtggcccacgccttggcattaaggacagcctgggccctgggcaactaccaccgctttttccggctctactgccatgcaccctgcatgtctggctacctcgtggacaagtttgcagatcgggagcgcaaggtcgccctcaaggccatgatcaaaaccttccgccctgcgctgccagtctcctacctgcaggccgagctggccttcgagggcgaggccgcctgccgggccttcctagagcccctgggcctggcctacacgggcccggacaactccagcatcgactgccgcctcagcctggcgcagctgtcagccttctgagcacccagcgaggaggggcgggggcaggggctgcagcccccagcgctgcctttgcggattctgtttttgagccgtggacttgggttgtaaatttatttgtggggagtgcgctccaggaagagccaccatccctgcccccgttttcccaccggggagtctgtacagagatttttctacgtttttattttttgcctcagagggatgggattggggaggaggggatgggcagcggagggttgggggcatggtctgcaggctcatctgtgtccgcctttcactccactaatgctgtctcagtgttttctctctctctctttcgagcttgcactccggtacccgacccggcgccctggcccatcccatgccggggggccagtggaaagaagacaggccgtccagcccgtgcccgcctgcggcgggggcacccagcaagcccgcccaccgcccgctgcctcacctgcttcgccacagactcttgttcccagccccttggggcctccgtgtttggggtgggggagctgcttagagactgtgcccgtcctcggccccccaccctgaagtgccagcaccaccagcaccagatcctccgccgccacaccgcactgaggacacgccggccgggccgcctcgtctcaagttgtataaagttgtctccgtgtcccctcctccctctgcccccagtgtttcttctgatttttttttcccctttccctccctccctctccgcattcttcccttggttcagcacaggtaaaacggttcccctccctccctgccttcatggatcaccagctcacgtcatgttgccttctcttttctttgtgtgtgtgtttatttaagttatttttcttcctcctctcccttttctttttggccctccctccctccctcttctgccatgtaactggaggatgtgctatgagtttgcaaacagctggactgtcaggctgctttttttccagatgttcctcctctgcctccccttcccctcctctcccctccttttccttccttccttcctttccttggagcactgagcaccatttggaagcttgagagaaaccaaaattaaagagagaaagagagag

SEQ ID NO: 5862 - DNA, 4016 bp, Homo Sapiens
  NM_052927
gcgctgtcgccgccgccgctgcagccggagttggaggagggagaagctaggaagaaaatggcggccgtggctgcagaggcggcagcgactgcagcgtcccccggggaggggggcgccggcgaggccgagccggagatggagcccatccccggcagtgaggccggcactgaccccctcccggtcacggccactgaagcgtctgtgccggatggcgagactgacgggcagcaatccgctcctcaggccgacgagccgccgctcccgccgccaccgccgccgccgggggagctcgcccgcagcccagaggcggtggggccggagctggaggctgaggagaaactgtccgttcgggtggcggagtcggcggcagccgcgcctcagggagggccggaacttccaccttctcctgcatcgccgccggagcagcccccggctcccgaggagcgcgaggagccgccgctgcctcagcccgtagccccggcgctcgtgccgccggcgggcggggactccacggtgtcgcaactgatcccgggctcggaggtgcgggtcacgctggaccacatcattgaggacgcgcttgtcgtgtcgttccgcttcggggagaagctcttctccggggtcctcatggatctgtccaaaaggtttgggccccatggtatccctgtgacagtatttcccaaaagggaatataaggataaaccagaagccatgccgctccaaagtaatacattccaagaagggacagaagtcaagtgtgaagcaaatggtgctgttcccgatgacccttctcctgtcccgcatcccgagctgagcttggctgaaagcctgtggacttccaaaccaccacctctcttccatgaaggagcaccttatcctccccctttgtttatcagggacacatataaccaatcaatacctcagccacctcctcggaaaattaagcgacccaaacgaaaaatgtacagggaagaacccacttcaataatgaatgctattaaactacgacccaggcaagttctgtgtgataaatgtaaaaacagtgttgttgctgaaaaaaaggaaattagaaaaggtagtagtgcaactgactcttctaaatatgaagataaaaaacggagaaatgaaagtgtaactactgtgaacaaaaaactgaaaactgaccataaagtggatgggaaaaaccaaaatgaaagccagaaaagaaatgctgtggttaaggtttcaaatattgctcacagcagaggcagagtagtaaaagtttctgctcaggcaaatacatcaaaagctcagttaagtactaaaaaagttctccagagtaagaacatggatcatgcgaaagctcgggaagtgttaaaaattgccaaagaaaaggcacaaaagaagcaaaatgaaacctctacttccaaaaatgcacattcaaaagtccatttcacacgtcgatatcagaatcctagctcaggttcccttccaccccgggttcgtttaaaaccacagaggtacaggaatgaagaaaatgactcttctctgaagacaggacttgagaaaatgcggagtggcaagatggcacccaagccccagtctcgctgcacctctacccgctcagcaggtctcaacaaatggcagctattacatcagacagtgacgagtcctgctgctcccttacagtgtctgacagaccactgtggattcagactgggagcattgaagttaacagtgaaacgggcagcacaaagacattagcaggctgctggtttcatggacctgtaccacaatgacacagagaacaccagagcatcaggactgaatgaaattggagtttttaaagctgcactaagaagtaaatgttaaggcagtggttaaaaacaacagtctataaaggggcacttgcaaattgtgctgtcttaaaccgaagaaaaggtattagggaatattttataaaaaataaacttgcaataaattatgcatgagatgaggagaaaaatgatgtgaattacacacgtaagaactcacttgaattttatatatgaagaaacactgacagtaacttctttggaatgtgaagttcttatcagtacagtttggacaggcctaaaaggcatgggatgatgcagaaatgctgaattatttttcatacttaaactttgtgctttctccaaggtttaggttaatcagttcagatatgagcaaaggtatttctaaaatggctcttctatgaaaagcaatagtcacatatgccaaggccaatgtttccttcaaggtgccagtagaaacaacagaaaataacatcctgctgaaaggatggcaaagtgccccgccccaccccacaaacacaatttggatcttttccttctttaataaagcagggctgtattatcttgaatatatgtttgcttgttagaacatattaagatatatttatttgccactagtatttaacattttgtgcacattttcataattacattcttacctttcaaattttgactcaaagtggataggctagtgttgatattggagtgcaaatgtatatactccaagagctagttcttaattctgctgagttggaaagccttttattattgtctgtatccttactggttttatctagttcaaaaaaggtgacaacgtctaaattttgatgtggacctctctccatagagagccgctcctaagtgcaagaaattccaacaggtgtcagtaggacttggccctgggggacaacaagtggcaggaacaggatcctttaaaacagtgtcaaacttctcatgcatggagcatgaattcttactaatagagactgtagtttttttcttgtctttggtaaatatataaaagaccttaatttttcttttttaatgaatggagaaaacatgagaaaaccagatggacctgttagtactacatttttaaggcattttatatttgatggtgccgtacttttaataataataaaactgaagttttttagtggcaatactgatttattttttaaaccagaaagataatccatattgattacttactacaaaaaagggaaaatatgccaaaaaataaaaaaccttaaaattcatatgaagcaacgtaacagataactgagcacttggctcaagtggtcagacttttcataatgttactgtgtaagtttggaattacctaataaccccaggctcaggattaacagaaggttctgggtgagttttaaaacatttaatatacctatgatttgttttacaacttgaagaaaaggcaggcagtcttgtgtctaatgagcttaatgcaaattctaattatactgcaaataatttaaagttttgattgcattctacaattgtctgtttggaaaattacatattatgaagtcattatatattttatcaaatcagaaaaagtcagctcaggaactgtagcagcagggagttctaaagatgacatgaactatactataggggtgccctactctatatggcctagggctttggtttgggtcagtcttgttctttcagatacataacaccagcagtactttcgggctcacttcaagaaccagataactctcccaaaccatgatacatgaagtgtataatcaagatttttaattaagctttagaattctttatttgtgtagagtgatggaaatgaccaagaagtaataatataaagcaaaagaattgggagagatcaggttttaagtatataaatattttttttttctcatggcatattctcaaaggtgttttgttacaaaccagattttcattttttaaaaaatgagacttggtggtatttaaaacctacacctaccatgttgctatttcactttcattgctttagttgcttaatatttaagctttgcttcatgctaccttttgtctgtatttcaatcttcataagcctattttgttttgtagacttgaatgataaaaattgtttctcatcttaagtatgctcagagttttaaatgttaaagaatgttgtgtaacctttatccaataaagtctttgattttttaaaaaaaa

SEQ ID NO: 5863 - DNA, 4349 bp, Homo Sapiens
  NM_052928
ctggcgcgggacgccggacgcggtgcggggcggagcggggcgccaaggggcgcgccaggagctgcgcgggcgctgggagggagaccagggcgcagttccgggcgcgtctgagcggttctcgaggcgttctcgcctcggtctctggcgagtgcacggatcaaaagcagcatggatctgcctgtggatgaatggaaatcatatctgcttcaaaagtgggcttcactcccgacgtctgttcaggtcacaatttctacagcagagaccttgagggatatctttcttcactcctcttcacttcttcaacctgaggatgagctgtttctaaaaagactttctaaaggttacttggtgggaaaggactcggacgctcctcttttctacagagaagaaggaaacaaaaaatttcaggagaaagattacacaggagctgcagtgctgtactctaagggagtgtcacattcaaggcctaacactgaggacatgtcactgtgtcatgctaaccgctcggcagccctcttccacctgggtcagtatgagacgtgtcttaaagacattaacagagcacagacacatgggtatccagaaaggttgcaacccaagattatgttacgtaaagcagaatgtctggtggccctggggagactgcaggaggcaagccagaccatcagtgatcttgaaaggaacttcacagccacaccagccctagcagatgtcctccctcagactctgcagagaaacctccatcgtctgaaaatgaagatgcaagaaaaggacagtctcacagaaagcttcccagcagctctggccaaaacccttgaggatgcagcgctgagggaggagaatgaacaactttccaatgcctcatcatccatcggcttatgcgtagatcctttaaaaggtcgctgtctcgttgccacaaaagatattctcccaggagagctcctggtgcaggaggatgcttttgtgagtgttctcaacccaggagaactgccaccaccgcatcacggcctagacagcaaatgggacaccagagtcaccaatggggacctctattgtcaccgatgtttgaagcacactttggccacagttccgtgtgacggatgcagttatgccaagtattgcagccaggagtgtttgcagcaggcctgggagctctaccacaggacagaatgtcctctgggagggctgcttctcacactgggtgtcttttgccacattgccctgaggttgactcttttggtgggatttgaggatgttcgcaaaatcataacgaagctttgtgataagattagtaacaaggacatctgtttacctgaaagcaacaatcaggtcaagacacttaattatggcctaggggagagtgagaaaaatggcaacatcgttgagaccccaattcctggatgcgatattaatgggaagtatgaaaataattataatgctgtcttcaaccttttgccccacactgaaaaccatagcccagagcacaaattcctctgtgctctctgtgtttctgcactgtgcagacagctagaagcagccagtttacaggccatcccaactgagaggattgtgaactcctctcagcttaaagcagcagtgacacctgaattgtgtcctgacgtgactatttggggagtggcgatgctgagacacatgttacagcttcagtgtaacgctcaggcgatgaccaccatacaacacacaggacctaaagggagcatcgttaccgacagcaggcaggtgcgccttgccacaggcatcttccctgttatcagcctcctgaaccactcctgtagccccaacaccagcgtgtccttcattagcactgtcgccaccatccgggcgtcacagcggattagaaaggggcaagagattctccactgctatgggcctcacaagagccggatgggggttgccgaaaggcagcagaagctgaggtctcagtatttctttgactgcgcctgtccagcttgtcaaactgaggcacacaggatggctgcagggcccaggtgggaagcattctgttgcaacagttgcggagcgcccatgcagggagatgacgtgctgcgctgtggcagcagatcttgtgcagaatccgccgtcagcagggaccacctggtctctcggttacaggacctacagcagcaggtcagagtggcccagaagcttctcagagatggtgaactagagcgagctgttcagcggctgtcggggtgccagcgtgacgccgagagcttcctgtgggcagagcacgccgtggtgggagagatcgcggatggcctggcccgggcctgtgctgccttaggagactggcaaaagtcagccacccatctacagaggagtctctacgtggtggaggttcgccacgggccgtccagtgttgaaatgggccatgagctcttcaaattggcccagatctttttcaacgggtttgcagtacccgaagccctgagcacaatacagaaagctgaggaggttctgtcgctgcactgtggcccatgggacgatgaaatccaggagctccagaagatgaaatcctgtttgttggacttaccacccacccctgtagggcctgcattgtagggttccaggaggattttgacccacagaaaaggagcccatggaacacaagttaaagaggttttgctggccaggtatggtggctcacgcctgtaatcccagcactttgggaggctaaggtgggcggatcacctgatgtcaggagttcaagaccagcctggccaacatggtgaaaccccatctttactaaaaatacaaaaaactagccaggcgtggtggtgggcacctgtaatcccagctacttgggaggctgaggcaggagaatctcttgaacccaggaggcggaggttgcagtgagccgagatcgctccactgcactccagcccaggtgacagtgtgagactccatctcaaaaaaaaaaataagaggccgggtgcggtggctcaagcctgtaatcccagcactttgggaggccgaggcaggcagatcacgaggtcaggagatccagaccatcctggctaacacggtgaaaccccgtctctactaaaaatacaaaaaaattagtcgggcgtggtggcggacgcctgtattcacagctactcgggaggttgaggcaggagaatggggtgaacccgggaggaagagcttgcagtgagccgagatcgcgccactgcactccagcctgggtgacagagccagactccatctcaaagaaaaaaaaaaaatattaagaggttctgctgccagatgtgggttctgtgggtcgggtgtgggttctgtgggtcgggtgtgggttctgcagaccaggtgcggattctgtgtaggttctgcaggcccagtgtagaggctcacacctgtaatcccagtactttgagacgctgaggtgggaggatcacttgagcccaggagttcaaaaccagcctgggcaatatagtgagaccgtatcactacaaaaaagtttttttagttcaccgagcatggtggcacatgcctgtagtcccacctactcgagaagctgagatagggtcacctgagcctggtaggctgaggctgcagtgagccaagatcgcactactgcactccagcctgggtgacagagtaagaccctgtctcaacaaaaaaataacaggttctgttgctgctgagctttcgtcaggaagataagactttcccaacagtccgaagcctaggatatgagggctgaggaggactcaaaccgttgcagtcagagagacacctattttggtgaatattttttgaaatagttaagtggcctccagtacaaactcccagttcccagaaaagacttaaaactagtatctggagattccaagtcctttaaaaggattttagctgatctgcaggcatctggatgttagcctggggttttggctggattccacctcgctcagtgatgatagtctgtttccctggaacattcctgtggttttagtagtaatgagatgtgtgcaccactccagtgggaactgaagctcttagtagttacattgtaattaaaaaagaattataaaacaagaaatcagcaagcctgcttacctccagagacacaccgttccacttacagtatctagcttcctcgactcctttgttaaaatcgtggagtatgaaccgtgaccagagaagtaaatatggagccgttttattgagcagtttcctccagggatgacggctgtcagtgtgtttcctgccagttttccagtccttactctctgcccttcattctgtactcttggcagagtcagtaaccaaccactaataaaatcaaagttgtagtaaagactttataacacataaaaaaaaaaaaaaaa

SEQ ID NO: 5864 - DNA, 2751 bp, Homo Sapiens
  NM_052931
agtttatgacagaagggcaaaaacattgactgcctcaaggtctcaagcaccagtcttcaccgcggaaagcatgttgtggctgttccaatcgctcctgtttgtcttctgctttggcccagggaatgtagtttcacaaagcagcttaaccccattgatggtgaacgggattctgggggagtcagtaactcttcccctggagtttcctgcaggagagaaggtcaacttcatcacttggcttttcaatgaaacatctcttgccttcatagtaccccatgaaaccaaaagtccagaaatccacgtgactaatccgaaacagggaaagcgactgaacttcacccagtcctactccctgcaactcagcaacctgaagatggaagacacaggctcttacagagcccagatatccacaaagacctctgcaaagctgtccagttacactctgaggatattaagacaactgaggaacatacaagttaccaatcacagtcagctatttcagaatatgacctgtgagctccatctgacttgctctgtggaggatgcagatgacaatgtctcattcagatgggaggccttgggaaacacactttcaagtcagccaaacctcactgtctcctgggaccccaggatttccagtgaacaggactacacctgcatagcagagaatgctgtcagtaatttatccttctctgtctctgcccagaagctttgcgaagatgttaaaattcaatatacagataccaaaatgattctgtttatggtttctgggatatgcatagtcttcggtttcatcatactgctgttacttgttttgaggaaaagaagagattccctatctttgtctactcagcgaacacagggccccgagtccgcaaggaacctagagtatgtttcagtgtctccaacgaacaacactgtgtatgcttcagtcactcattcaaacagggaaacagaaatctggacacctagagaaaatgatactatcacaatttactccacaattaatcattccaaagagagtaaacccactttttccagggcaactgcccttgacaatgtcgtgtaagttgctgaaaggcctcagaggaattcgggaatgacacgtcttctgatcccatgagacagaacaaagaacaggaagcttggttcctgttgttcctggcaacagaatttgaatatctaggataggatgatcacctccagtccttcggacttaaacctgcctacctgagtcaaacacctaaggataacatcatttccagcatgtggttcaaataatattttccaatccacttcaggccaaaacatgctaaagataacacaccagcacattgactctctctttgataactaagcaaatggaattatggttgacagagagtttatgatccagaagacaaccacttctctccttttagaaagcagcaggattgacttattgagaaataatgcagtgtgttggttacatgtgtagtctctggagttggatgggcccatcctgatacaagttgagcatcccttgtctgaaatgcttgggattagaaatgtttcagatttcaattttttttcagattttggaatatttgcattatatttagcggttgagtatccaaatccaaaaatccaaaattcaaaatgctccaataagcatttcccttgagtttcattgatgtcgatgcagtgctcaaaatctcagattttggagcattttggatattggatttttggatttgggatgctcaacttgtacaatgtttattagacacatctcctgggacatactgcctaaccttttggagccttagtctcccagactgaaaaaggaagaggatggtattacatcagctccattgtttgagccaagaatctaagtcatccctgactccagtgtctttgtcaccaggccctttggactctacctcagaaatatttcttggaccttccacttctcctccaactccttgaccaccatcctgtatccaaccatcaccacctctaacctgaatcctaccttaagatcagaacagttgtcctcacttttgttcttgtccctctccaacccactctccacaagatggccagagtaatgtttttaatataaattggatccttcagtttcctgcttaaaaccctgcaggtttcccaatgcactcagaaagaaatccagtttccatggccctggatggtctggcccacctccagcctcagctagcattacccttctgacactctctatgtagcctccctgatcttctttcagctcctctattaaaggaaaagttctttatgttaattatttacatcttcctgcaggcccttcctctgcctgctggggtcctcctattctttaggtttaattttaaatatgtcacctcctaagagaaaccttcccagaccactctttctaaaatgaatcttctaggctgggcatggtggctcacacctgtaatccctgtactttgggaggccaaggggggagatcacttgaggtcaggagttcaagaccagcctggccaacttggtgaaaccccgtctttactaaaaatacaaaaaaattagccaggcgtggtggtgcacccctaaaatcccagctacttgagagactgaggcaggagaatcgcttgaacccaggaggtggaggttccagtgagccaaaatcatgccaatgtattccagtctgggtgacagagtgagactctgtctcaaaaaataaataaataaaataaaatgaaatagatcttataaaaaaaa

SEQ ID NO: 5865 - DNA, 3605 bp, Homo Sapiens
  NM_052932
aaaggcttccttccgggcaccgcgaagccagcgtgctcagcattcagggaggcagcggcgctcgccttcatccaggacaacaaaactgccatttccgaagagaaaggaaacggctcgcggtttctggggttcccaagcgcgcgcctgcgagggaggccgcgagccgagtcgccacgcccagaaccccgagcccgcccccgcgccacccagcccggccccgccgccccggctgcgcacgcgacgccccctccaggccccgctcctgcgccctatttggtcattcggggggcaagcggcgggaggggaaacgtgcgcggccgaaggggaagcggagccggcgccggctgcgcagaggagccgctctcgccgccgccacctcggctgggagcccacgaggctgccgcatcctgccctcggaacaatgggactcggcgcgcgaggtgcttgggccgcgctgctcctggggacgctgcaggtgctagcgctgctgggggccgcccatgaaagcgcagccatggcggcatctgcaaacatagagaattctgggcttccacacaactccagtgctaactcaacagagactctccaacatgtgccttctgaccatacaaatgaaacttccaacagtactgtgaaaccaccaacttcagttgcctcagactccagtaatacaacggtcaccaccatgaaacctacagcggcatctaatacaacaacaccagggatggtctcaacaaatatgacttctaccaccttaaagtctacacccaaaacaacaagtgtttcacagaacacatctcagatatcaacatccacaatgaccgtaacccacaatagttcagtgacatctgctgcttcatcagtaacaatcacaacaactatgcattctgaagcaaagaaaggatcaaaatttgatactgggagctttgttggtggtattgtattaacgctgggagttttatctattctttacattggatgcaaaatgtattactcaagaagaggcattcggtatcgaaccatagatgaacatgatgccatcatttaaggaaatccatggaccaaggatggaatacagattgatgctgccctatcaattaattttggtttattaatagtttaaaacaatattctctttttgaaaatagtataaacaggccatgcatataatgtacagtgtattacgtaaatatgtaaagattcttcaaggtaacaagggtttgggttttgaaataaacatctggatccttatagaccgttcatacaatggttttagcaagttcatagtaagacaaacaagtcctatctttttttttttggctggggtgggggcattggtcacatatgaccagtaattgaaagacgtcatcactgaaagacagaatgccatctgggcatacaaataagaagtttgtcacagcactcaggattttgggtatcttttgtagctcacataaagaacttcagtgcttttcagagctggatatatcttaattactaatgccacacagaaattatacaatcaaactagatctgaagcataatttaagaaaaacatcaacattttttgtgctttaaactgtagtagttggtctagaaacaaaatactccaagaaaaagaaaattttcaaataaaacccaaaataatagctttgcttagccctgttagggatccattggagcattaaggagcacatatttttattaacttcttttgagctttcaatgttgatgtaatttttgttctctgtgtaatttaggtaaactgcagtgtttaacataataatgttttaaagacttagttgtcagtattaaataatcctggcattatagggaaaaaacctcctagaagttagattatttgctactgtgagaatattgtcaccactggaagttactttagttcatttaattttaattttatattttgtgaatattttaagaactgtagagctgctttcaatatctagaaatttttaattgagtgtaaacacacctaactttaagaaaaagaaccgcttgtatgattttcaaaagaacatttagaattctatagagtcaaaactatagcgtaatgctgtgtttattaagccagggattgtgggacttcccccaggcaactaaacctgcaggatgaaaatgctatattttctttcatgcactgtcgatattactcagatttggggaaatgacatttttatactaaaacaaacaccaaaatattttagaataaattcttagaaagttttgagaggaatttttagagaggacatttcctccttcctgatttggatattccctcaaatccctcctcttactccatgctgaaggagaagtactctcagatgcattatgttaatggagagaaaaagcacagtattgtagagacaccaatattagctaatgtattttggagtgttttccattttacagtttatattccagcactcaaaactcagggtcaagttttaacaaaagaggtatgtagtcacagtaaatactaagatggcatttctatctcagagggccaaagtgaatcacaccagtttctgaaggtcctaaaaatagctcagatgtcctaatgaacatgcacctacatttaataggagtacaataaaactgttgtcagcttttgttttacagagaacgctagatattaagaattttgaaatggatcatttctacttgctgtgcattttaaccaataatctgatgaatatagaaaaaaatgatccaaaatatggatatgattggatgtatgtaacacatacatggagtatggaggaaattttctgaaaaatacatttagattagtttagtttgaaggagaggtgggctgatggctgagttgtatgttactaacttggccctgactggttgtgcaaccattgcttcatttctttgcaaaatgtagttaagatatactttattctaatgaaggccttttaaatttgtccactgcattcttggtatttcactacttcaagtcagtcagaacttcgtagaccgacctgaagtttctttttgaatacttgtttctttagcactttgaagatagaaaaaccactttttaagtactaagtcatcatttgccttgaaagtttcctctgcattgggtttgaagtagtttagttatgtctttttctctgtatgtaagtagtataatttgttactttcaaatacccgtactttgaatgtaggtttttttgttgttgttatctataaaaattgagggaaatggttatgcaaaaaaatattttgctttggaccatatttcttaagcataaaaaaaatgctcagttttgcttgcattccttgagaatgtatttatctgaagatcaaaacaaacaatccagatgtataagtactaggcagaagccaattttaaaatttccttgaataatccatgaaaggaataattcaaatacagataaacagagttggcagtatattatagtgataattttgtattttcacaaaaaaaaagttaaactcttcttttctttttattataatgaccagcttttggtatttcattgttaccaagttctatttttagaataaaattgttctccttctaaaagttttaaaaaaaaaaaaaaaaa

SEQ ID NO: 5866 - DNA, 3019 bp, Homo Sapiens
  NM_052939
agtgaaggggtttcccatatgaaaaatacagaaagaattatttgaatactagcaaatacacaacttgatatttctagagaacccaggcacagtcttggagacattactcctgagagactgcagctgatggaagatgagccccaacttctaaaaatgtatcactaccgggattgagatacaaacagcatttaggaaggtctcatctgagtagcagcttcctgccctccttcttggagataagtcgggcttttggtgagacagactttcccaaccctctgcccggccggtgcccatgcttctgtggctgctgctgctgatcctgactcctggaagagaacaatcaggggtggccccaaaagctgtacttctcctcaatcctccatggtccacagccttcaaaggagaaaaagtggctctcatatgcagcagcatatcacattccctagcccagggagacacatattggtatcacgatgagaagttgttgaaaataaaacatgacaagatccaaattacagagcctggaaattaccaatgtaagacccgaggatcctccctcagtgatgccgtgcatgtggaattttcacctgactggctgatcctgcaggctttacatcctgtctttgaaggagacaatgtcattctgagatgtcaggggaaagacaacaaaaacactcatcaaaaggtttactacaaggatggaaaacagcttcctaatagttataatttagagaagatcacagtgaattcagtctccagggataatagcaaatatcattgtactgcttataggaagttttacatacttgacattgaagtaacttcaaaacccctaaatatccaagttcaagagctgtttctacatcctgtgctgagagccagctcttccacgcccatagaggggagtcccatgaccctgacctgtgagacccagctctctccacagaggccagatgtccagctgcaattctccctcttcagagatagccagaccctcggattgggctggagcaggtcccccagactccagatccctgccatgtggactgaagactcagggtcttactggtgtgaggtggagacagtgactcacagcatcaaaaaaaggagcctgagatctcagatacgtgtacagagagtccctgtgtctaatgtgaatctagagatccggcccaccggagggcagctgattgaaggagaaaatatggtccttatttgctcagtagcccagggttcagggactgtcacattctcctggcacaaagaaggaagagtaagaagcctgggtagaaagacccagcgttccctgttggcagagctgcatgttctcaccgtgaaggagagtgatgcagggagatactactgtgcagctgataacgttcacagccccatcctcagcacgtggattcgagtcaccgtgagaattccggtatctcaccctgtcctcaccttcagggctcccagggcccacactgtggtgggggacctgctggagcttcactgtgagtccctgagaggctctcccccgatcctgtaccgattttatcatgaggatgtcaccctggggaacagctcagccccctctggaggaggagcctccttcaacctctctctgactgcagaacattctggaaactactcctgtgatgcagacaatggcctgggggcccagcacagtcatggagtgagtctcagggtcacagttccggtgtctcgccccgtcctcaccctcagggctcccggggcccaggctgtggtgggggacctgctggagcttcactgtgagtccctgagaggctccttcccgatcctgtactggttttatcacgaggatgacaccttggggaacatctcggcccactctggaggaggggcatccttcaacctctctctgactacagaacattctggaaactactcatgtgaggctgacaatggcctgggggcccagcacagtaaagtggtgacactcaatgttacaggaacttccaggaacagaacaggccttaccgctgcgggaatcacggggctggtgctcagcatcctcgtccttgctgctgctgctgctctgctgcattacgccagggcccgaaggaaaccaggaggactttctgccactggaacatctagtcacagtcctagtgagtgtcaggagccttcctcgtccaggccttccaggatagaccctcaagagcccactcactctaaaccactagccccaatggagctggagccaatgtacagcaatgtaaatcctggagatagcaacccgatttattcccagatctggagcatccagcatacaaaagaaaactcagctaattgtccaatgatgcatcaagagcatgaggaacttacagtcctctattcagaactgaagaagacacacccagacgactctgcaggggaggctagcagcagaggcagggcccatgaagaagatgatgaagaaaactatgagaatgtaccacgtgtattactggcctcagaccactagccccttacccagagtggcccacaggaaacagcctgcaccatttttttttctgttctctccaaccacacatcatccatctctccagactctgcctcctacgaggctgggctgcagggtatgtgaggctgagcaaaaggtctgcaaatctcccctgtgcctgatctgtgtgttccccaggaagagagcaggcagcctctgagcaagcactgtgttattttcacagtggagacacgtggcaaggcaggagggccctcagctcctagggctgtcgaatagaggaggagagagaaatggtctagccagggttacaagggcacaatcatgaccatttgatccaagtgtgatcgaaagctgttaatgtgctctctgtataaacaatttgctccaaatattttgtttcccttttttgtgtggctggtagtggcattgctgatgttttggtgtatatgctgtatccttgctaccatattgggaacagccaaaagaagttatagaacaagaatttaaggtgactctatctga

SEQ ID NO: 5867 - DNA, 6160 bp, Homo Sapiens
  NM_052941
gtcctttcaatttcggttctcacagactcttacttggatgtctgtaaatccggctggactttcagcttctaagaacagtccgtttctcgaggatccaggcgcaggaggacagagcaatgggtgagagaactcttcacgctgcagtgcccacaccaggttatccagaatctgaatccatcatgatggcccccatttgtctagtggaaaaccaggaagagcagctgacagtgaattcaaaggcattagagattcttgacaagatttctcagcccgtggtggtggtggccattgtagggctataccgcacaggaaaatcctatctcatgaatcgtcttgcaggaaagcgcaatggcttccctctgggctccacggtgcagtctgaaactaagggcatctggatgtggtgtgtgccccacctctctaagccaaaccacaccctggtccttctggacaccgagggcctgggcgatgtagaaaagagtaaccctaagaatgactcgtggatctttgccctggctgtgcttctaagcagcagctttgtctataacagcgtgagcaccatcaaccaccaggccctggagcagctgcactatgtgactgagctagcagagctaatcagggcaaaatcctgccccagacctgatgaagctgaggactccagcgagtttgcgagtttctttccagactttatttggactgttcgggattttaccctggagctaaagttagatggaaaccccatcacagaagatgagtacctggagaatgccttgaagctgattccaggcaagaatcccaaaattcaaaattcaaacatgcctagagagtgtatcaggcatttcttccgaaaacggaagtgctttgtctttgaccggcctacaaatgacaagcaatatttaaatcatatggacgaagtgccagaagaaaatctggaaaggcatttccttatgcaatcagacaacttctgttcttatatcttcacccatgcaaagaccaagaccctgagagagggaatcattgtcactggaaagcggctggggactctggtggtgacttatgtagatgccatcaacagtggagcagtaccttgtctggagaatgcagtgacagcactggcccagcttgagaacccagcggctgtgcagagggcagccgaccactatagccagcagatggcccagcaactgaggctccccacagacacgctccaggagctgctggacgtgcatgcagcctgtgagagggaagccattgcagtcttcatggagcactccttcaaggatgaaaaccatgaattccagaagaagcttgtggacaccatagagaaaaagaagggagactttgtgctgcagaatgaagaggcatctgccaaatattgccaggctgagcttaagcggctttcagagcacctgacagaaagcattttgagaggaattttctctgttcctggaggacacaatctctacttagaagaaaagaaacaggttgagtgggactataagctagtgcccagaaaaggagttaaggcaaacgaggtcctccagaacttcctgcagtcacaggtggttgtagaggaatccatcctgcagtcagacaaagccctcactgctggagagaaggccatagcagcggagcgggccatgaaggaagcagctgagaaggaacaggagctgctaagagaaaaacagaaggagcagcagcaaatgatggaggctcaagagagaagcttccaggaatacatggcccaaatggagaagaagttggaggaggaaagggaaaaccttctcagagagcatgaaaggctgctaaaacacaagctgaaggtacaagaagaaatgcttaaggaagaatttcaaaagaaatctgagcagttaaataaagagattaatcaactgaaagaaaaaattgaaagcactaaaaatgaacagttaaggctcttaaagatccttgacatggctagcaacataatgattgtcactctacctggggcttccaagctacttggagtagggacaaaatatcttggctcacgtatttaagagcctgaatattccaggtaagaaaatataaaatgaggtttattttattttaataacataacactgttgctcattttgtaagtatatgtgttatagcagtttcattcaagaaaagtttaaaattaaaaagtgattatcaaagaatatcagggcctgacatccacaaaaaacaaacttaattttgattgaactaataatttataaacatgggaaacaagtcagaagtagtgacattattcctagaaaagatttaaggaaagcaaaaagacaactggtaagattaagaagccattaaccatttgcaatttatattatagtcacagaaataatttcagttatgactagctcttgccgattaatgagaagagagcagctccacaatttttaatttttttaacttttattttagattcaggggtatatgtgcaggtttgttacataggtaaactgcatgtcatgggggtttggtgtgcagataattttatcacacaattattaatcataatacccaataggtttttttctgatcttctccctcctcccaacctacaccctcaagtagaccccagtgtctcttgttctcctctgagtatccatgtgttctctttgtttggcccccatttataagtgagaacatgtggtatttgggtttctgttcctgtgttagtttgcttatgataatggcttccagctccatccatattgctacagaggacatgatcttgttgttttttatggctgcatagtattccatggtgtttgtatataccacattttcattatccagcctattattaatgcacatttaggttgattccttatctttgctattgtgaacagtgctgcaatggacatacacgtgcatgtgcctttatggtacaatgatttatatttccttgggatatgcattcctttgggaataatgggattgctgagttgaatggtaattctgagttctttgaggaatcaccaacctgctttccacagtggctaaactaatttacactcccaccaacagtgtatgtgttccattttctccacaaccttgccagcatctgttatttattgactttctagtaacagccattctgactggtgtgagatggtatgcatttctgtagtgattagtgatgatgagtgatttttatatgctttttaaatgcatatatgtcttcttttgaaatgtgttcatgttctttgcccactttctttttaatggggttgcttgtttttcgcttgtaaattttttgaagcttcttatagattctggatattagatctttgttggatgcatagttggcaaatattttctaccattctgtaggttgtctgttactttgttaattgtttcattttgttttgtttttgttttttgaaacagggtctcactttgacacccaggctggagtgcagtagcacaaacatgggtcattgtagcctcaacctcccaggctcaagcagtcctttcacctcaaccccccacatagctgggactacaggtgcttacacccaagaccagttaattttttgtatttgtttgtagagatgtgtttttccatgttgcccaagctggtcttgaactactgagctcaagcaatctgcctgcttcagcctcccaaagtactgggatttaggcatgagccaccacatctggccaatagtttcttttgatgtgcagaagctctttaatttaattagatctcctttgtcagtttttgtttttgctgcaattgcttatgttatcttcatcatgaaattttagccaagtcttatgtccagaatggtatttcttaggttatttttcagagtttttatagtttaatgttttatatttaagtctttaatccttcttaagttgatttttgtatgcagagtaagctgggggcccagtttcaatcttctgcatatggctagccagtaatcccagcaccatttattaaatggggacttctttccccattgcttgtttttgtcagctttgtccaagatcagatgattgtaggtgtacagcattatttctggactctctgttatgttccatttatctgtgtgtctgtttttctactaataccatgctgttttggttactgtagctctgtagtatggtttgaggtttggtaacttgatgcctccccttttgttctttatgtttaggattgccttggctaggctcttttttggttccatatgaattttaaagtagtttctaattctgtgaagaatgtcattggtagtttgatagggatagcattgaactatttgctcaactcaacattttaggaatttatttctgctgtctagtgctcaaaacttgcagctagaattgagggaagagagagaccttcttatattgttttatattgtttgatactcagtacctgttttaagaaaaaacaacaaggaagtaaaaccaaagacaggcagcccagcgccaggcccaaaaccaggcctgggcctgcctggcctaaacccagtagttaaaaatcaactcattgcctgtaatcccagcactttgggaggccgagacgggtggatcacgaggtcaggagatcgagaccatcctggctaacacggtgaaaccccgtctctactaaaaatacaaaaattagccgggcatggtggcacgcgcctgtagtcccagctacacgggaggctgaggcaggagaatggcgtgaacccaggaggcggagcttgcagtgagtcgagatcgcgccactgcactccagcctgggcgacagagcgaaactccgtctcaaaaaaaaaaaaaaaaaatcaactcataacttagaaaccgatgttattcatagattccagacattgtatagaagaacatttggaaactcactgccttgttctgtttctctctgaccaccagtgcatgcagcccctgtcatgtaccgcctgtttgctcaaatcaatcatgaccctttcatgtgaaatctttagtgttgtgagcccttaaaagggacagaaattgtgcattcaaggagcttggattttaaggcagcagcttgctgatgccaccagctgaaaaaagcccttccttctccaactcggtgtctgagaagttttgtctgcagctcatcctgctacagaatgaactccttgtaattctacaagatatgccatgggccttttcacaggggacacaggcttcttaaaacaacccggcttcctcaccctatgtcctttatttacaaagctgtgctcctattcatgagcatggaatgtttttccatttgtttgtgacatctcttatttctttcaggggtatcttgtaattctcattatatatatcttttgcttccttggttagctgtatttttaggtattttagtcttcttgtggcaattgtgaatgggattgcattcctgatttggctcttggcttaatgttattaacgccacattttttaaatagacaaaaatatgagattaaaaatgttgaattttactaacaataaaagttgttcaaaggaaaactataaggttcttgtttcaactctgtcataggaagaacaggacagtgagctggcacagagttagggaaactgactgtgtctcatattggctagtgagagtgatctgttggaattgtatatcaaaattttaatgtacatacattttgtctagcaattctactattgggtatttatatagtacatataaatataaatgtatatgtttagtaaatatatacttatagttagtaaatatattttatatctatttagtaaatatactaaatgtcaggcctctgagcccaagctaagccatcatatcccctgtgacctgcatgtacatacgtccagatggcctgaagcaagtgaagaatcacaaaagaagtgaaaatggcctgttcctgccttaactgatgacattaccttgtgaaattccttctcctggctcatcctggctcaaaagctcccccactaagcaacttgtgacacccacctctgcccgccagagaacaaccccctttgactgtaattttcctttaccaacccaaatcctgtaaaatggtcccaaccctatctcccttcactgactgtcttttcggactcagccagcctgcacccaggtgattaaaaagctttattgctcacaaaaaaaaaaaaaaaa

SEQ ID NO: 5868 - DNA, 934 bp, Homo Sapiens
  NM_052945
agctcagcctcagtccccgcagcttgtgcggcggcgtcggcaccatgaggcgagggccccggagcctgcggggcagggacgcgccagcccccacgccctgcgtcccggccgagtgcttcgacctgctggtccgccactgcgtggcctgcgggctcctgcgcacgccgcggccgaaaccggccggggccagcagccctgcgcccaggacggcgctgcagccgcaggagtcggtgggcgcgggggccggcgaggcggcgctgcccctgcccgggctgctctttggcgcccccgcgctgctgggcctggcactggtcctggcgctggtcctggtgggtctggtgagctggaggcggcgacagcggcggcttcgcggcgcgtcctccgcagaggcccccgacggagacaaggacgccccagagcccctggacaaggtcatcattctgtctccgggaatctctgatgccacagctcctgcctggcctcctcctggggaagacccaggaaccaccccacctggccacagtgtccctgtgccagccacagagctgggctccactgaactggtgaccaccaagacggccggccctgagcaacaatagcagggagccggcaggaggtggcccctgccctccctctggacccccagccaggggcttggaaatcaaattcagctcttcactccagcatgcacatgccctctttctgggaccaggctaactctgcagaagcacagacactacagaccacagcattcagcccccatggagtttggtgtgcttgcctttggcttcagacctcaccatctttgacagcccttgaaggtggtagcccagctcctgttcctgtgccttcaaaaggctggggcactatgagtaaaagaccgcttttaaaatggggaaggcaccattaagccaaaatgaatctgaaaaaagac

SEQ ID NO: 5869 - DNA, 1317 bp, Homo Sapiens
  NM_052951
agtgacgtcacggcgccactttccggccggtgacagagtccagcggagttgtgggggccgggggcgccatgggagccactggcgacgccgagcagccgcggggacctagcggggccgagaggggcggcttggagctgggggatgcgggcgcagcggggcagctggttcttacgaacccttggaacataatgataaagcaccggcaggtgcagcggaggggccgccgctcacagatgacaacaagtttcacagatcctgccatctccatggatctcctccgagctgtcctgcagcccagcatcaacgaggagatccagactgtcttcaacaagtacatgaagttcttccagaaggcagcactgaacgtgcgagacaatgttggggaggaggtggacgcagagcagctgatccaggaagcctgtcggagctgcctggagcaggctaaactgctcttttcagatggagaaaaagtaatacccagattgacccatgagcttccaggaataaagcgtggccgtcaggcagaagaagaatgtgcccatcgaggaagcccccttcctaaaaagaggaaaggacggcctcctggacacatcctgtcaagcgaccgggcagccgccggcatggtatggaaaccaaaatcctgtgaaccaattcgccgggaaggccccaagtgggacccagctcgcctgaatgaatctaccacctttgtgttgggatctcgagccaacaaagccctggggatggggggcaccagaggaagaatctacatcaagcacccacacctctttaagtatgcagctgacccccaggataagcactggctggctgagcagcatcacatgcgggcaacagggggcaagatggcctacctcctcatcgaggaggacatccgggaccttgcggccagtgatgattacagaggatgcctggatctgaagctagaggaattgaaatcctttgtcctaccctcctggatggtggagaagatgagaaagtatatggagacactacggacagagaatgagcatcgtgctgttgaagcacctccacagacctgaggccgggtcccctggccacacttggcagccctcctccaaagccctcttcctcacgtggctgaggccaccgctgggactgctcctagatggatctcagcggcattaagctgtgcctgagcgagtttgtagtgactcactgcacagcacccccagactagcatgtggttctatatttgtaaagttattgggataagaaacaattaaacagtttgtagtaaacacagatggtgaaaaaaaaaaaaaaaaaaaaaaaaaaaaa

SEQ ID NO: 5870 - DNA, 3094 bp, Homo Sapiens
  NM_052954
gaaatgtgagcctgggtggccaaggacgccggagtggccgccttccccgcgcctgagcgcagtggggcgagacaaagagacctgggcccccagcgcagcccgtctcgggccacgggcgccccagctccgcggagtcccgcagtcgctggcccgggacgcgcccggcccgggctcccttggaaggctccctaggcaatggccgggtctctgctccacccggctctcaggagcgctgctctctccatctgatcgccctccatcctccccattccctccggttccgggctctcccttcgctccaagcctcaggccaccggcttggatggacgctccgaggctacccgtgcgtccaggggtcttgcttccgaagttggtcctgctctttgtctacgcagatgattgccttgctcagtgtggcaaagattgcaaatcttactgctgtgatggaaccacgccctactgttgctcctactacgcttatattgggaatatcctctcgggcactgcaattgcgggcattgtttttggaatagtatttatcatgggggtcattgctgggattgccatatgcatctgcatgtgcatgaagaaccacagggcgacccgcgtgggcatcctcaggacgactcacatcaacaccgtctcctcctatcctggaccaccaccctacggtcacgaccacgagatggaatactgtgcagacttgcctcctccatactcccccaccccacagggtccagcacagcgttctccaccccctccttatcctggaaacgcaaggaaataatctatctcccagaacagaacatgtgccaatgggcgatcttgcctggaataaaatgcctctactcagaaacaggcaggaaagaattgctccaaggaatactttttggggtcagataatgtgtcaggtggaatatccctgctaggagatataggatttctactctgctcaaagctgaccccatctggagtattaatgtttggttctatggaaccacattttaagagatctgctgatccacctaagcacattcagggaagagtaatgtaattgacaaaatatctgataatcatgttgtttaagggctaggtgaagaaagtttcagtattgatcctggaaaaaaagaagatctaagtaggatgggagaatgatttggcccacacaaggaagcaactttattctatatagctttaaaagtcagaactagaattgttcattctttcattcatcaataaatgtattttgagtgcctaagagtttactatgtgcctagcactgtttgaggtcctgatggaagttacaggacgggtactctggttttagtacaagaaagagcaatgactagattgctttgtgaagctcttggtagagacacgctccagaagggataacaaaatcaaatagtagatgggttcattgggcctcagaagttctgctcgtattttaggtgggtgtgaagtgaatttctatatgtccaggagtgaatacaacagaaagagttggatcttatttatttaattagggagttaaaacaagaccaaaaagactcaacagccgcttgaagccaagaactcttcaatgccagctactgccacctaaaaatcatctggctttatagtggatcagaataaaggttattctaactgtggggagaaaaaaaaaattgtatcaagttccacaggtagcagacacttcacttccaagtaaaagatgagaaatcaattattcccacaggattttaggtcagggagcaaaaatctcagaacttgaccatgaagatacacaacagactcgcaaaaataaagtgggaaatgaagttcagattcccttctgtagatttccttaaaactattatttttttcttcttcgtaaaattttgataatctgttctcttaaaaaagttaatgacacaattaagatactgacatcaaattgttgccttttaccaaaatgcaaattttatgaagtgcctacctttatatgtataaagcatttaataaataattctaatgtgccatattttgctgtgagtgaccttaacatttatatttttatatgaattgtttcatgtatttataaaaattgtatattgaacattggaaatagatgattagatttttgtgtcattttacaattaaatctaaaatgcttaatccaatatcatcatcaaaattcagtgaaatcccaaaacagtgccaagaattttgctgaatgaaacaatcaaacaaagcattttaaggtgtaagttatagtacctgtacttgcagataagaagcttactatatcattattataagtagcatatattactttcaaatacctatattagaaagatattgatctgactgaaatataacctacctgccagtaaggtccaaaggctgaatttgttttgaatgagttccttgatctttaagcactgatgattttcttatatatgaggatgcaaagcattcaagagtttcagcctgttctggtgaggggctccctgacttacataaagttttcagtgcaattttaatagtacatatgctttaatttatttttcttctgcgtgtggtcagacccaattacactgtggctaagactctcaaagtgccagggtttctgtgatgattctgagaatgctgaatacaaatataccttatattctttaaggaaaacggaaaggaaagatcagcagaaatagggttttctcatcttcaccatcaataaacatttattgcgtacctcctatattctgcaaattttccccaaatagaagccagttcagtccacaccatctcttctttgagttgtttatggcctcccttaaggcattttacaaacccataagcctacaatagatgagtatttttactatttgtattaagtgtcataatagcatcaatgtgcacattaccagtatagactgttggagttcactgattgttttcatagatgatgcttcttggggaaaaatagtataggatgtgaaagttttgaattacggttatttaaaaactaacatttgctatggccaaagtgtttacaataagcaataaagtgaaagaacctattataacacagattataaaaaaaaaaaaaaaa

SEQ ID NO: 5871 - DNA, 704 bp, Homo Sapiens
  NM_052960
ggtttataggtcccggcccgagcctccggccgcccgccgggtttgtcccgcgatccccgaccatgcccgccgacctcagcggtacttggaccctgctcagcagcgacaacttcgagggctacatgctggccctaggtattgactttgccactcgtaaaatagccaagttgctgaagccacagaaagtgattgagcagaatggggattcttttaccatccacacgaacagcagcctaaggaactactttgtgaaatttaaagttggagaagaatttgatgaagataacagaggcctggacaacagaaaatgcaagagtttggttatctgggacaatgacaggctcacctgtatccagaagggagaaaagaagaacagaggctggacccattggatcgaaggagacaaactccacctggaaatgttctgtgaaggtcaagtgtgcaaacagacattccagagagcctgatccacatccagcagcagagcccacttgtggctgcagctttatgccaaattatattgcagactgaacagacgtttatctatcccatttggcgacgaggactcgtggctggagagagccacacagcgtgtaacctgaagtcatctagattatggggaaactgctcagcttcaataaacctgtccaaatgaaaaaaaaaaaaaaaaaaaaaaaaaaaaaaaaaaaaaaaaaaaaaaaaaa

SEQ ID NO: 5872 - DNA, 3434 bp, Homo Sapiens
  NM_052961
gcccggaacgcccgcgggctaggccacaacggctcgggaaccgccgccggtatccgcgtccgcagcgccgccagccaggcgagagccgtgtgggatcccagcgcccgcactcccgcccccgccaaggagccaggaatggcacaactagagaggagcgccatctctggcttcagctctaagtccaggcgaaactcattcgcatatgatgttaagcgtgaagtatacaatgaggagacctttcaacaggaacacaaaaggaaggcctcctcttctgggaacatgaacatcaacatcaccaccttcagacaccacgtccagtgccgctgctcatggcacaggttcctacgatgcgtgcttacaatctttcccttcctagaatggatgtgtatgtatcgattaaaggattggcttctgggagacttacttgctggtataagtgttggccttgtgcaagttccccaaggcctgacacttagtttgctggcaaggcaactgattcctcctctcaacatcgcttatgcagctttctgttcttcggtaatctatgtaatttttggatcgtgtcatcaaatgtccattggttccttcttcctggtgagtgctctgctgatcaacgttctgaaagtgagcccattcaacaacggtcaactggtcatgggatctttcgtcaagaatgagttttcggccccctcctaccttatgggctataataaatccttgagtgtggtggcaaccacaacttttctgactgggattattcagctaataatgggcgtattgggtttgggcttcattgccacttaccttccggagtctgcaatgagtgcttacctggctgctgtggcacttcatatcatgctgtcccagctgactttcatctttgggattatgattagtttccatgccggtcccatctccttcttctatgacataattaattactgtgtagctctcccaaaagcgaattccaccagcattctagtatttctaactgttgttgttgctctgcgaatcaacaaatgtatcagaatttctttcaatcagtatcccattgagtttcccatggaattatttctgattattggcttcactgtgattgcaaacaagataagcatggccacagaaaccagccagacgcttattgacatgattccttatagctttctgcttcctgtaacaccagatttcagccttcttcccaagataattttacaagccttctccttatctttggtgagctcctttctgctcatatttctgggcaagaagattgccagtcttcacaattacagtgtcaattccaaccaggatttaatagccatcggcctttgcaatgtcgtcagttcatttttcagatcttgtgtgtttactggtgctattgctaggactattatccaggataaatctggaggaagacaacagtttgcatctctggtaggcgcaggtgtgatgctgctcctgatggtgaagatgggacactttttctacacactgccaaatgctgtgctggctggtattattctgagcaacgtcattccctaccttgaaaccatttctaacctacccagcctgtggaggcaggaccaatatgactgtgctctttggatgatgacattctcatcttcaattttcctgggactggacattggactaattatctcagtagtttctgctttcttcatcaccactgttcgttcacacagagctaagattcttctcctgggtcaaatccctaacaccaacatttatagaagcatcaatgattatcgggagatcatcaccattcctggggtgaaaatcttccagtgctgcagctcaattacatttgtaaatgtttactacctaaagcataagctgttaaaagaggttgatatggtaaaggtgcctcttaaagaagaagaaattttcagcttgtttaattcaagtgacaccaatctacaaggaggaaagatttgcaggtgtttctgcaactgtgatgatctggagccgctgcccaggattctttacacagagcgatttgaaaataaactggatcccgaagcatcctccattaacctgattcactgctcacattttgagagcatgaacacaagccaaactgcatccgaagaccaagtgccatacacagtatcgtccgtgtctcagaaaaatcaagggcaacagtatgaggaggtggaggaagtttggcttcctaataactcatcaagaaacagctcaccaggactgcctgatgtggcggaaagccaggggaggagatcactcatcccttactcagatgcgtctctactgcccagtgtccacaccatcatcctggatttctccatggtacactacgtggattcacgggggttagtcgtattaagacagatatgcaatgcctttcaaaacgccaacattttgatactcattgcagggtgtcactcttccatagtcagggcatttgagaggaatgatttctttgacgctggcatcaccaagacccagctgttcctcagcgttcacgacgccgtgctgtttgccttgtcaaggaaggtcataggctcctctgagttaagcatcgatgaatccgagacagtgatacgggaaacctactcagaaacagacaagaatgacaattcaagatataaaatgagcagcagttttctaggaagccaaaaaaatgtaagtccaggcttcatcaagatccaacagcctgtagaagaggagtcggagttggatttggagctggaatcagaacaagaggctgggctgggtctggacctagacctggatcgggagctggagcctgaaatggagcccaaggctgagaccgagaccaagacccagaccgagatggagccccagcctgagactgagcctgagatggagcccaaccccaaatctaggccaagagctcacacttttcctcagcagcgttactggcctatgtatcatccgtctatggcttccacccagtctcagactcagactcggacatggtcagtggagaggagacgccatcctatggattcatactcaccagagggcaacagcaatgaagatgtctaggagatgaactagaaataaggggtcagataatgctggcaaatcctcctacccaaaaaggggtcaattgtccagagacctagactggatacgaactagcagtacttccttcctgactgtgactcctactacctgccagccttcttccttgctctgcgctgggatcatactcccaaatcacattactaaatgccaacaattatctctgaattccctatccaggctcccctcatttcaccttcagcatatattctagtcatgaatttccttcttcacacaccccacatctctgggctttgtgccagaccatctctaacttaatcctctcatccctgttcccctttctccaaagagatgaagctcaaataaaatgtataactctagtaaca

SEQ ID NO: 5873 - DNA, 1923 bp, Homo Sapiens
  NM_052963
ctttcccggaggctggcagatgcgcgtggtgcggctgctgcggctccgggcggctctgacgctgctcggggaggtcccccgccgcccggcctcccggggtgtcccgggctcgcgcaggacgcagaagggcagtggagccaggtgggagaaggagaagcacgaagacggggtgaagtggagacagctggagcacaagggcccgtacttcgcacccccatacgagccccttcccgacggagtgcgtttcttctatgaaggaaggcctgtgagattgagcgtggcagcggaggaggtcgccactttttatgggaggatgttagatcatgaatacacaacaaaggaggttttccggaagaacttcttcaatgactggcgaaaggaaatggcggtggaagagagggaagtcatcaagagcctggacaagtgtgacttcacggagatccacagatactttgtggacaaggccgcagcccggaaagtcctgagcagggaggagaagcagaagctaaaagaagaggcagaaaaacttcagcaagagttcggctactgtattttagatggtcaccaagaaaaaataggcaacttcaagattgagccgcctggcttgttccgtggccgtggcgaccatcccaagatggggatgctgaagagaaggatcacgccagaggatgtggttatcaactgcagcagggactcgaagatccccgagccgccggcggggcaccagtggaaggaggtgcgctccgataacaccgtcacgtggctggcagcttggaccgagagcgttcagaactccatcaagtacatcatgctgaacccttgctcgaagctgaagggggagacagcttggcagaagtttgaaacagctcgacgcctgcggggatttgtggacgagatccgctcccagtaccgggctgactggaagtctcgggaaatgaagacgagacagcgggcggtggccctgtatttcatcgataagctggcactgagagcaggaaatgagaaggaggacggtgaggcggccgacaccgtgggctgctgttccctccgcgtggagcacgtccagctgcacccggaggccgatggctgccaacacgtggtggaatttgacttcctggggaaggactgcatccgctactacaacagagtgccggtggagaagccggtgtacaagaacttacagctctttatggagaacaaggacccccgggacgacctcttcgacaggctgaccacgaccagcctgaacaagcacctccaggagctgatggacgggctgacggccaaggtgttccggacctacaacgcctccatcactctgcaggagcagctgcgggccctgacgcgcgccgaggacagcatagcagctaagatcttatcctacaaccgagccaaccgagtcgtggccattctctgcaaccatcagcgagcaacccccagtacgttcgagaagtcgatgcagaatctccagacgaagatccaggcaaagaaggagcaggtggctgaggccagggcagagctgaggagggcgagggctgagcacaaagcccaaggggatggcaagtccaggagtgtcctggagaagaagaggcggctcctggagaagctgcaggagcagctggcgcagctgagtgtgcaggccacggacaaggaggagaacaagcaggtggccctgggcacgtccaagctcaactacctggaccccaggatcagcattgcctggtgcaagcggttcagggtgccagtggagaagatctacagcaaaacacagcgggagaggttcgcctgggctctcgccatggcaggagaagactttgaattctaacgacgagccgtgttgaaacttcttttgtatgtgtgtgtgtttttttcactattaaagcagtactggggaattttgtacaataaaaaaaaaaaaaaaaa

SEQ ID NO: 5874 - DNA, 1972 bp, Homo Sapiens
  NM_052965
ggaacccacaggcgcgcgcgccgctgcttctggccgggcgcgggtcgtggtgcaccacgggagcgccgcaccggccggcatggaggagcgcggcgattccgagccgacccccggctgcagcggcctgggtccgggcggtgttcgcggctttggcgacggcggtggagctccttcgtgggcccctgaggacgcctggatgggcactcaccctaagtatctagaaatgatggaattagatataggagatgccacccaagtttatgtagcgttcttggtttacctggacctcatggaaagcaaaagctggcatgaagtaaactgtgtaggattaccagaactccagctcatctgccttgttggtactgagatagaaggggaggggttacagactgtggtgcctacccccatcactgcttccctcagccataacaggataagggagatcttgaaggcatctcgaaagttgcaaggtgatccagatttgccgatgtcttttactttggccatagtggagtctgattctacaatagtctattataaacttactgatggatttatgctgccagaccctcagaatatttctcttagaagatgacatccatgtttcctgatgcttgttttattcatacaagattggatttgagacccatcagactgcttcatcttttatctcagaaatagggttgacgtacatagtgagggttgacttccccattccataaggttttcattctgaagagtaaaacttccccaggtagaagactttctccttcttaaaaaatatagggtgatttctttaaaactttgttatctagagacagtttaattacagttatatacaggtttatgcctaggatgtattcagatgggtgggacctgtgtgctgcttttgtcatcccacactcaaagttgtctctttgtttcttgctgccactgccagctcattgttgagactgccatttctttctcttactcagctctccccagtgccttttggccactgcagctaccgtagaatggcattttatatgtaccttgtcacccacttctgtttactttttcctctccagtaaaaagtaaaagatttctttcaattggtcttcccattgcagttactgttatttctcttttttggttaactttaaatcaaaactcaaaatatgttcatccagagtgtgtcttaagtaacttacgtgtcttaagtaacagggaccagagacatgttacctacaagagttctgggctatccttttcattcttatcacatatcatagcttgaatattacaacagtgtgggagagaatcaaccgtaaaaatgtcttcattaattagacccagttattccacttttgttaatgtctctcaaattgtacaaagtataaaaaattatatgcacaaagatgttccaagtgacattacttttagtagcccaaattataaaccactttaaagtttggggtaaagattggcaaactttttctataaagggccagaaagtaactattttaggtttttaaacctactgtctctgtcataacttgtcaacactgctgtatgaagcacaaaagcagccatagacaatacataaacaatacgggcgtggctttgttccagtaaaactttgtttacaaatgtggtgccatagtttgtcatccctgggtctaggaaatagtcaataaacagatatatacaaatgatacataatgtacttattaaaaattagtaatgaatattattaaaaacatgaaaatattaccttaagtaaaaattgcaagacggaaaagtgtataagtgggtgtaatcatggctgaaataacagaccaagcatatgataaaaagataacaaagtaaatcaaattactaactggttatagtgggataggaggcagaaaatggatgactttgtcttttctcaatgtttttatttgtattttataataaaaatgttttaaaattaaaaaaaaaaaaaaaa

SEQ ID NO: 5875 - DNA, 6926 bp, Homo Sapiens
  NM_052966
cccacggatcatcagaaggcgcggacctggaggaggcgccccagaaggcgacgcctcttgcctcctgtctctcgcctctcgaaggaagtttgctcttaatttcagagccgggttcgccgtcggatcaacctccaggagctagcagcgggcgcggaccgggcagtttccgcgctcagcacaggcagctcgcggtcatgggcggctcagcctccagccagctggacgagggcaagtgcgcttacatccgagggaaaactgaggctgccatcaaaaacttcagtccctactacagtcgtcagtactctgtggctttctgcaatcacgtgcgcactgaagtagaacagcaaagagatttaacgtcacagtttttgaagaccaagccaccattggcgcctggaactattttgtatgaagcagagctatcacaattttctgaagacataaagaagtggaaggagagatacgttgtagttaaaaatgattatgctgtggagagctatgagaataaagaggcctatcagagaggagctgctcctaaatgtcgaattcttccagccggtggcaaggtgttaacctcagaagatgaatataatctgttgtctgacaggcatttcccagaccctcttgcctccagtgagaaggagaacactcagccctttgtggtcctgcccaaggaattcccagtgtacctgtggcagcccttcttcagacacggctacttctgcttccacgaggctgctgaccagaagaggtttagtgccctcctgagtgactgcgtcaggcatctcaatcatgattacatgaagcagatgacatttgaagcccaagcctttttagaagctgtgcaattcttccgacaggagaagggtcactatggttcctgggaaatgatcactggggatgaaatccagatcctgagtaacctggtgatggaggagctcctgcccactcttcagacagacctgctgcctaagatgaaggggaagaagaatgacagaaagaggacgtggcttggtctcctcgaggaggcctacaccctggttcagcatcaagtttcagaaggattaagtgccttgaaggaggaatgcagagctctgacaaagggcctggaaggaacgatccgttctgacatggatcagattgtgaactcaaagaactatttaattggaaagatcaaagcgatggtggcccagccggcggagaaaagctgcttggagagtgtgcagccattcctggcatccatcctggaggagctcatgggaccagtgagctcgggattcagtgaagtacgtgtactctttgagaaagaggtgaatgaagtcagccagaacttccagaccaccaaagacagtgtccagctaaaggagcatctagaccggcttatgaatcttccgctgcattccgtgaagatggaaccttgttatactaaagtcaacctgcttcacgagcgcctgcaggatctcaagagccgcttcagattcccccacattgatctggtggttcagaggacacagaactacatgcaggagctaatggagaatgcagtgttcacttttgagcagttgctttccccacatctccaaggagaggcctccaaaactgcagttgccattgagaaggttaaactccgagtcttaaagcaatatgattatgacagcagcaccatccgaaagaagatatttcaagaggcactagttcaaatcacacttcccactgtgcagaaggcactggcgtccacatgcaaaccagagcttcagaaatacgagcagttcatctttgcagatcataccaatatgattcacgttgaaaatgtctatgaggagattttacatcagatcctgcttgatgaaactctgaaagtgataaaggaagctgctatcttgaagaaacacaacttatttgaagataacatggccttgcccagtgaaagtgtgtccagcttaacagatctaaagccccccacagggtcaaaccaggccagccctgccaggagagcttctgccattctgccaggagttctgggtagtgagaccctcagtaacgaagtattccaggagtcagaggaagagaagcagcctgaggtccctagctcgttggccaaaggagaaagcctttctctccctgggccaagcccacccccagatgggactgagcaggtgattatttcaagagtggatgaccccgtggtgaatcctgtggcaacagaggacacagcaggactcccgggcacatgctcatcagagctggagtttggagggacccttgaggatgaagaacccgcccaggaagagccagaacccatcactgcctcgggttctttgaaggcgctcagaaagttgctgacagcgtccgtggaagtaccagtggactctgctccagtgatggaagaagatacgaatggggagagccacgttccccaagaaaatgaagaagaagaggaaaaagagcccagtcaggcagctgccatccaccccgacaactgtgaagaaagtgaagtcagcgagagggaggcccaacctccctgtcccgaggcccatggggaggagttggggggatttccagaggtaggcagcccagcctctccgccagccagtggagggctcaccgaggagcccctggggcccatggagggggagctcccaggagaggcctgcacactcactgcccatgaaggaagagggggcaagtgtaccgaggaaggggatgcctcacagcaagagggctgcaccttaggttctgaccccatctgcctcagtgagagccaggtttctgaggaacaagaagagatgggagggcaaagcagcgcggcccaggccacggccagtgtgaatgcagaggagatcaaggtagcccgtattcatgagtgtcagtgggtggtggaggatgctccaaacccggatgtcctgctgtcacacaaagatgacgtgaaggagggagaaggtggtcaggagagtttcccagagctgccctcagaggagtgaaagggacaatttggctgaagtctttctctgaaaaaagccaaagggttataggggtacacttaggggttgcatgcaagctgttaccaaaaaatttttaagtattttcttaatttgaataataaaaccagaggaaatgcatacagggcatgagcaactgaggcaaacctttgtggacatgaattgttctacgatgaatttttgctttagtattttaataagaattacaaagacaatggcatacttggggtgagagggagctgaggatgtctgaggagggaatagtattgcagggaagactgagaaaacagtaggatgacagttttgagtatactctgcacttttcaattgtgcaatcttcttgtgcactttaaggctttttaattttgtttgagaatgcaaatgtatactgtaagtctacctttactatctactatgcctacttcaccatctcttaaggactcggcatttgtccacagtcagactgcaagagagggtaggtcatgaacagtcacccgtgctggctgtagcccccacagaggcaatcatgcccaatagattcaagagaagctaagcggaaatggagggtggaaggtgtgatctgtgggactgtctgggcctgttactcatcctgctatcaatttcttattaattaatcttgatgattcttattaattaatcacatttgcaggaaattcagatgaggcaagaaaattttattggcctgggtaagactgaaagcattccaaattaggcttagactgtgcaaagggcttagctaagttatcgagcttaaaacccgtcaattaaacaaacattatttgaacagttactgcatgccacgcactgtgttgggcttagtaataaaaaaaagaaaagataagtgcttgttctagcataaattaaaaggtccaagggaatttaatctggaagagaacatatgccaatttttaaactatgacagcttttttttttctctttccattcaaatagtcctggttcattcccagaagggcacaaaatgaatgaataaataaataaatgaataaagacaaaagccaaggtgtatgctctcaagttccaaagatgttatcaaaagctgaaatcatttgtttggtcattcagcaagctaattgagtctctgttatataccaagcactggggataccatggcgaaaaacaactttgttccttcctcctagaacttacattttaatggaaatagacaaaacacatcttcttaacggatggtgacctataaccattaatgttgaaaatggaagagacttgcttccaaaagattaaaaggagttgttcttttctccttcagaaaaataccagatcatttcctaaaatctccagtcccaagtattacatcgtggtttccctccccgactttttattttattttattctatttttttgagatggagtctcactctgtcgccaaggctggagtgcagtggtgtgatctcggctcactgcaacctccgcctcctgggttcaggagattctcctctgtcagcgtcccaagtagctggaattacagccatgcggcaccattcccggctaatttttgtatttttggtagagatgggttttcaccatgttggccaggctggtctcaaactcctgatttcaagcgatccacccacctcgacttcccaaagtgctgggattacagcgtgagctacctggcccctccccaaattttaacatcagatctcaacatatttgttgagaacttgtttagatcatcactatcgagtaaatttatgtcagttctttagagcatttgcttcacacacagttcaaccatttaaccagaaattaaaatatcacccttttcagccctcccatgaagaatttctaggtcataaacatgaataatactcagtatatgtataatatcatatttaattgttgcaacttttcttggcgtgtttaaatcctcatgtctttgagggatcccaccacaggtgaaggaagtaaagaccacttctcccccagtctctgctttctgcagtgctcactcatatcctggcatttagcatggtgtgttgaaattaggtttacttcttgtctctccaagtggctcctctcttaaaagacagaaactagggtttagtcatcatttgtgcttcctgctagaaacccacagccttgaataatggcttcctgcctccttgagtcactttaatatccctggtgcataggacctggcatgcgtcaggctgctcgggaaatgtgggaactggacacccagaacactgctgtgctggggctatttggggcctgctgtcaggcagaaagacgttttgaattgggctttctgcccttgttgagttttctcttaagtaaagtccaaagtccaaggggcagatggccagatgcactgcccagtaaggcaggaagccaaagaggcagtgcccagccccacaaaggctgcccgactccctgggacagtagtgtggagtcccagcccaggctgacctcacaccggagcttcctagcttcctttctttgctcaatgcagggcttcttgcaccccctggaaagctaagagatttttttcaaccctaaaagagagtacctttcactgcattggatggatgaacatcagtgccctaactttatccatcatgtaggtcagggaggactgggcactatttggcaggatgtactccagaatataatcaaagaattttctgtacatatttcactaaagacaagtttttgggctggatgtggtagcttacacctataatcccagcactttgggaggctgaggtgagagggtcacttgagcccaggagttctagacaagcctgggaaacatagcaagatctcatccttacaaaaaataataatggtgtgtgcctgcagtcctagctacttgggtggttgaggcaggaggattgtttgagcgagggaagttgaggctgcagtgaactatgattttaccactgcactccagcttgggcaacaaaatgagaccctgtctcaaaaaaaaaaaaaaagttttctagaataagcaggatgattgtttaatttgaagatggaacaggaaactagagtgcatttaaaatactctgtcttcattttaacatgttgaatggaataactgcatatcaccatgagtttgttttgcttttcatacagacttgtatgtgtcatttgagtggtttccagattggagcgaggttattctgatctaaatgaacagcatttttttccttagcctctgtttgccactctgggtatctctcctatgggcaaagccattagaaatgcataaaacctcgagacatggtttttggcaaaaactccatgactttaaactagctcttttactactgacctttcacagagaaaaaatatttcccttgaaaaaaactgggcttgtcattttttcccttgtagctttaagcagagacataagtgccttgcattacacatagtaaactttctttaaaaaaaaaaaaaaaagattttggagactaccagggtaagattccaacttgtccaaaagctttctggccttacatattttattataaaaattctcaagtctggtaatcttctatgtcagagctagtgatttcaaaaggtttcacaattccccaagacaaaagtgattttcgttcattataataaggttaagtgatatgtgattcatagcaattttgatgtgaagaagggaaggacatcattgacttaataatagtatcagtcggtgcaacagttggcaacatgtgccttcacactttaccataaagagacgggtttgagggtttgccttctaaagtctgcaacttcaagaaaaaaaatcgacactgtggattgactttcccggtcactatataaagcaaataaacttaaaacactttgtaaccatgtatttactctgccaggtgcctatattccaataaaatgttcatccttgaa

SEQ ID NO: 5876 - DNA, 707 bp, Homo Sapiens
  NM_052971
tcaggctccaacatcctccccctgtcaagatgtggcacctcaaactttgtgcagtcctcatgatcttcctgttgctgttgggccagatagatggctccccaataccagaagtgagttcggcaaagagaaggccacggagaatgaccccattttggagaggggtttccctcaggcctattggagcctcctgccgggatgattctgagtgtatcacaaggctatgcagaaaaagacgctgttccttaagtgtggcccaggaatgatgtacataccagggaaagaaaggacagcagtcacctccgacaatgctccgttctatggaatattgattaactgcattttggctggagacacccaagtgaagcaatcttgtatttttaatatttaaaggcagatgtacgctttaaattggtctccatttcttcttagaatgttgatatatggataagcataactaaacttgtcaatttagagtttatttttctatggatactattaaatgtctcaaattgaaattttagcagtctggaattcaagcttttgagggaaagaaggattcattttgtatactaaagaaaaaaacagcattgcccaataatgtgttaacttctcaatctggaaagtgtagtgagagctacataatcaatagctacgtaatcaacttcagcaagttcctaagctgtggccctggatcccttcactccata

SEQ ID NO: 5877 - DNA, 1780 bp, Homo Sapiens
  NM_052972
gcagagctaccatgtcctcttggagcagacagcgaccaaaaagcccagggggcattcaaccccatgtttctagaactctgttcctgctgctgctgttggcagcctcagcctggggggtcaccctgagccccaaagactgccaggtgttccgctcagaccatggcagctccatctcctgtcaaccacctgccgaaatccccggctacctgccagccgacaccgtgcacctggccgtggaattcttcaacctgacccacctgccagccaacctcctccagggcgcctctaagctccaagaattgcacctctccagcaatgggctggaaagcctctcgcccgaattcctgcggccagtgccgcagctgagggtgctggatctaacccgaaacgccctgaccgggctgcccccgggcctcttccaggcctcagccaccctggacaccctggtattgaaagaaaaccagctggaggtcctggaggtctcgtggctacacggcctgaaagctctggggcatctggacctgtctgggaaccgcctccggaaactgccccccgggctgctggccaacttcaccctcctgcgcacccttgaccttggggagaaccagttggagaccttgccacctgacctcctgaggggtccgctgcaattagaacggctacatctagaaggcaacaaattgcaagtactgggaaaagatctcctcttgccgcagccggacctgcgctacctcttcctgaacggcaacaagctggccagggtggcagccggtgccttccagggcctgcggcagctggacatgctggacctctccaataactcactggccagcgtgcccgaggggctctgggcatccctagggcagccaaactgggacatgcgggatggcttcgacatctccggcaacccctggatctgtgaccagaacctgagcgacctctatcgttggcttcaggcccaaaaagacaagatgttttcccagaatgacacgcgctgtgctgggcctgaagccgtgaagggccagacgctcctggcagtggccaagtcccagtgagaccaggggcttgggttgagggtggggggtctggtagaacactgcaacccgcttaacaaataatcctgcctttggccgggtgcgggggctcacgcctgtaatcccagcactttgggaggcccaggtgggcggatcacgaggtcaggagatcgagaccatcttggctaacatggtgaaaccctgtctctactaaaaatataaaaaattagccaggcgtggtggtgggcacctgtagtcccagcaactcgggaggctgaggcaggagaatggcgtgaacttgggaggcggagcttgcggtgagccaagatcgtgccactgcactctagcctgggcgacagagcaagactgtctcaaaaaaattaaaattaaaattaaaaacaaataatcctgccttttacaggtgaaactcggggctgtccatagcggctgggaccccgtttcatccatccatgcttcctagaacacacgatgggctttccttacccatgcccaaggtgtgccctccgtctggaatgccgttccctgtttcccagatctcttgaactctgggttctcccagccccttgtccttccttccagctgagccctggccacactggggctgcctttctctgactctgtcttccccaagtcagggggctctctgagtgcagggtctgatgctgagtcccacttagcttggggtcagaaccaaggggtttaataaataacccttgaaaactgga

SEQ ID NO: 5878 - DNA, 1815 bp, Homo Sapiens
  NM_052988
gcgtctgcgcctgcgcgcaagagaggcggggccagcgctcggcatggcggagccagatctggagtgcgagcagatccgtctgaagtgtattcgtaaggagggcttcttcacggtgcctccggaacacaggctgggacgatgccggagtgtgaaggagtttgagaagctgaaccgcattggagagggtacctacggcattgtgtatcgggcccgggacacccagacagatgagattgtcgcactgaagaaggtgcggatggacaaggagaaggatggcatccccatcagcagcttgcgggagatcacgctgctgctccgcctgcgtcatccgaacatcgtggagctgaaggaggtggttgtggggaaccacctggagagcatcttcctggtgatgggttactgtgagcaggacctggccagcctcctggagaatatgccaacacccttctcggaggctcaggtcaagtgcatcgtgctgcaggtgctccggggcctccagtatctgcacaggaacttcattatccacagggacctgaaggtttccaacttgctcatgaccgacaagggttgtgtgaagacagcggatttcggcctggcccgggcctatggtgtcccagtaaagccaatgacccccaaggtggtcactctctggtaccgagcccctgaactgctgttgggaaccaccacgcagaccaccagcatcgacatgtgggctgtgggctgcatactggccgagctgctggcgcacaggcctcttctccccggcacttccgagatccaccagatcgacttgatcgtgcagctgctgggcacgcccagtgagaacatctggccgggcttttccaagctgccactggtcggccagtacagcctccggaagcagccctacaacaacctgaagcacaagttcccatggctgtcggaggccgggctgcgcctgctgcacttcctgttcatgtacgaccctaagaaaagggcgacggccggggactgcctggagagctcctatttcaaggagaagcccctaccctgtgagccggagctcatgccgacctttccccaccaccgcaacaagcgggccgccccagccacctccgagggccagagcaagcgctgtaaaccctgacggtgggcctggcacacgcctgtattcccacaccaggtcttccgatcagtggtgtctgtgaagggtgccgcgagccaggctgaccaggcgcccgggatccagctcatccccttggctgggaacatcctccactgacttcctcccactgtctgccctgaacccactgctgcccccagaaaaaggccgggtgacaccggggggctcccagcccgtgcaccctggaagggcaggtctggcggctccatccgtggctgcaggggtctcatgtggtcctcctcgctatgttggaaatgtgcaaccactgcttcttgggaggagtggtgggtgcagtccccccgctgtctttgagttgtggtggacgctggcctgggatgagagggcccagaagaccttcgtatcccctctcagtcgcccggggctgtcccgtgcatgggttggctgtggggaccccaggtgggcctggcaggactccagatgaggacaagagggacaaggtatggggtgggagccacaattgaggataccccgagactaccaggagagccctgggctggaggctgagctgcatccctgctccccacatggaggacccaacaggaggccgtggctctgatgctgagcgaagctataggctcttgttggataaaagcttttttaacagacatggtttcaaaaaaaaaaaaaaaaaa

SEQ ID NO: 5879 - DNA, 2210 bp, Homo Sapiens
  NM_052998
tgggcggggttatataagccagcggcgggcggaaggcggggcgtgggggtctgtggctgctgggctggcggggcgcaggccgcgggacccgagcccggggaagcgagagagcggaggcgccgaggatccgattcactccctggggagacctatgggccgaagccgtgtaaatgcgttttaagcagaggcctcggctccgcaactgccactcctcctcggggtgttgcacaagtttcgaggtcaccggcgaccccccctagcagcgcgcctggctctggcccccgcgaaggaggacggagtttggagcttgcggcccccacccaccgcgtggcgtccccaggcacgcctagaattctagcacctcaggatcagtccagcccccatttacaattggggaaactgcggctccgaaagggtcagagggtacccgaggtcaagcagtagagagcggactcgaacttaagctcttgctcttaggctgagacgccttgatgtggccaccggctaccctctagtgtgttgcatactttctaaggcggcggctgcagcagcggctccatccagcccgtcagctcctcctgcaaggcatggctggctacctgagtgaatcggactttgtgatggtggaggagggcttcagtacccgagacctgctgaaggaactcactctgggggcctcacaggccaccacggacgaggtagctgccttcttcgtggctgacctgggtgccatagtgaggaagcacttttgctttctgaagtgcctgccacgagtccggcccttttatgctgtcaagtgcaacagcagcccaggtgtgctgaaggttctggcccagctggggctgggctttagctgtgccaacaaggcagagatggagttggtccagcatattggaatccctgccagtaagatcatctgcgccaacccctgtaagcaaattgcacagatcaaatatgctgccaagcatgggatccagctgctgagctttgacaatgagatggagctggcaaaggtggtaaagagccaccccagtgccaagatggttctgtgcattgctaccgatgactcccactccctgagctgcctgagcctaaagtttggagtgtcactgaaatcctgcagacacctgcttgaaaatgcgaagaagcaccatgtggaggtggtgggtgtgagttttcacattggcagtggctgtcctgaccctcaggcctatgctcagtccatcgcagacgcccggctcgtgtttgaaatgggcaccgagctgggtcacaagatgcacgttctggaccttggtggtggcttccctggcacagaaggggccaaagtgagatttgaagagattgcttccgtgatcaactcagccttggacctgtacttcccagagggctgtggcgtggacatctttgctgagctggggcgctactacgtgacctcggccttcactgtggcagtcagcatcattgccaagaaggaggttctgctagaccagcctggcagggaggaggaaaatggttccacctccaagaccatcgtgtaccaccttgatgagggcgtgtatgggatcttcaactcagtcctgtttgacaacatctgccctacccccatcctgcagaagaaaccatccacggagcagcccctgtacagcagcagcctgtggggcccggcggttgatggctgtgattgcgtggctgagggcctgtggctgccgcaactacacgtaggggactggctggtctttgacaacatgggcgcctacactgtgggcatgggttcccccttttgggggacccaggcctgccacatcacctatgccatgtcccgggtggcctgggaagcgctgcgaaggcagctgatggctgcagaacaggaggatgacgtggagggtgtgtgcaagcctctgtcctgcggctgggagatcacagacaccctgtgcgtgggccctgtcttcaccccagcgagcatcatgtgagtgggcctcgttccccccggagaatcccagcggggcctcagagatgcatctgggagaggtggggaagatggcaggcaagggtacccttggccaggactctggtgcccaccctgccacccccgcgctccacctgcagtgtttctgccctgtaaataggaccagtcttacactcgctgtagttcaagtatgcaacataaatcctgttccttccaaaaaaaaaaaaaaaaaaaaaaaaaaaaa

SEQ ID NO: 5880 - DNA, 1017 bp, Homo Sapiens
  NM_053000
tgtcgggtcccaaaatacgtggtctaaagtcctttgggctcctgccgctgccagcactgatcatatgctcttgaccctggtcgggtggggggatgtctggatacctcctctgtggaaagaactggccacacatccgcagaggtgactcgggctgagaacccaggctcctcctccctttggtgacacgcccctcggtccctcactggcacttctccctccggccacacggcggcgtctcgccatagcgcagcggccgatggtacagcccgctcccccctcgcgctctcggacagtgggtccttccacttgtagaaaagcattgtgggacggaagcctgtcctttcttccttttggtgcgagcttgctgtggtttttgctctgggtcctctgggatggcgcctggctgtggccgcgtggtctctcacgcaggggcgccgggcgggggaacgcggccaccctgagtctggtgagtcgactgcggcggcctgtgtccgaagtgtccggggccgtgaacaagggcagcggcctggcctcaggcctgcgttcccacgtttggaaacggggagcttcgtcgatttgtgtttacatcatcgactatgccagggagttctccagataagcctggttttattttcgtcagtgaaaaggccttaccgtataactgactttatgcttgccctgcccccgtataaaataacttaaaagcagcgtgcctggttacagctgtttccacgtgcggtgctcgtcgggagtgatcacctaccctacaggtggaagatggatgcctgaagtgtagactgctgctagctgaataccatctgggagcataaaggtgacctgaaggatgtccttggtgaggattttgaaaatttgatcttcacaagagttgcctggatcatttgaaatttctgggagtctgaggagtactgacataattacctgctggagtctgtaaatacacatttaagacagtgaggatgtgaataaatatattaatgcaaaaaaaaaaaaaaaaaa

SEQ ID NO: 5881 - DNA, 1537 bp, Homo Sapiens
  NM_053004
catgcgccgggtcgtacacggcggccgcgcgcacgctgggggcgtggctgcgcgatgtaatcggtctctggacgctgcgcggcgctcctaggagcaggcgttcccgactccggcaagagggtggcgcctggactctcgccctcagagggaggcccgtcccacggtctgtggctacggatcccaggaccctcttcgcgggcgattcgcgtagcctcaggtaactgcatcctgcccagcatgacggccccctgcccgccgccacctccagacccccagtttgtcctccgaggcacccagtcaccggtgcatgcgctgcacttctgcgaaggagcccaggctcaggggcgcccgctcctcttctcagggtctcagagtggcctggtacacatctggagcctgcagacgcggagagcggttaccaccctggatggccacggcggccagtgtgtgacctggctgcagacgctgccccaggggcgccagctcctcagtcagggccgggacctgaagctgtgcctgtgggacctcgcggagggcaggagcgctgtcgtggactccgtgtgcttggagagtgtgggcttctgccggagcagcatcctggccgggggccagccacgctggacgcttgccgtgccagggaggggcagcgacgaggttcagattctggagatgccctccaagacgtcagtgtgcgccctgaagccgaaggcagatgccaagctgggcatgcccatgtgcctgcggctgtggcaggccgactgcagctcccgcccactccttctggccggctatgaggatggatcggtggtcctgtgggacgtctctgagcagaaggtgtgcagccgcatcgcctgccatgaggagcccgtcatggaccttgactttgactcccagaaggccaggggcatctcaggctccgcggggaaggcgctggctgtctggagcctggactggcagcaggccctgcaggtgcgtgggactcatgaactcaccaatcccgggatcgccgaggtcacgatccggccagatcgcaagatcctggccaccgcaggctgggaccaccgcatccgcgtgttccactggcggacgatgcagccactggccgtgctggccttccacagcgccgctgtccagtgcgtggccttcaccgccgatggcttgctggccgcgggctccaaggatcagcggatcagcctctggtcactctacccacgcgcatgactcacccactcccttcccgggagacgaggagggcgggcagggaggtgggcatcaggccccagccttggcctgaaacctcaagggcctctgaggaccagcaagtcatggcccaaggaccatggagtccccgctgtcttcatgaggttggtatttccttttgtggagtgcctcatcacaggacggtgactctgggggccagccagagccctggccgtccgaggcctgcaggagacgttggcttgggcctgctgtgttgccagctgagggtattttataataaatttccattgccaagttgaaaaaaaaaaaaaaaaaa

SEQ ID NO: 5882 - DNA, 2117 bp, Homo Sapiens
  NM_053024
ccccgcctccccccgcgccgccgccgcccgctaccgccgccgccgccgctgcgcctgctgctcctcgccgtccgcgctgcagtgcgaagggctcgaagatggccggttggcagagctacgtggataacctgatgtgcgatggctgctgccaggaggccgccattgtcggctactgcgacgccaaatacgtctgggcagccacggccgggggcgtctttcagagcattacgccaatagaaatagatatgattgtaggaaaagaccgggaaggtttctttaccaacggtttgactcttggcgcgaagaaatgctcagtgatcagagatagtctatacgtcgatggtgactgcacaatggacatccggacaaagagtcaaggtggggagccaacatacaatgtggctgtcggcagagctggtagagtcttggtctttgtaatgggaaaagaaggggtccatggaggcggattgaataagaaggcatactcaatggcaaaatacttgagagactctgggttctagctgctaggcagactgttaagtattaggggaaaattgctcttaaactttcctagctataagcttaagtcttaattctggaaattttattagcaatgcagggtgatggggtatgaacctgtgtctcctttgtatccctctgttggtggggaaaggtgtctttctttctgccctccccccccaaaataattctgttcacttttgttttgtttccttgtgtactccagcattggttatagtcatgggaaaggaaggtgtccacggaggcacacttaacaagaaagcatatgaactcgctttatacctgaggaggtctgatgtgtaagcagcctctccccatctacctagcaactgtcttcatcaacaaccctaattatggtcacaatgctaccaaactgtagatggtagctaatttttctttacctattttctaatgtcatgattcctgtttgcccaatggatcatttgtatgttaaccactgtatgtaaccaacccttatctggcaacataattgcagcacaataatgatttgcatgataccttgaaattggggggagggggcatgccaagttgggcatcactttgtcttagcaattaatgggatattgattactaaaataagttaatattaagcaaggtgccggttgtacaatctctgatcagtgtcttttcagcactttgagcatttacttggctcatttagtcttccttttgtagcgcatggttgggaggaaaaagtgcatgcatcattccttcactcttctctttttcccgccccccctcccttcgcacataggcatttggtttgcttccatctttttttatgcagtgcctgtttttttttaaccaattaaaatcccttttgttgatgagctattgagagctgcagtagtttgcttttagtattgttgttgcacttgagcagagacaaacctttattcatagtgtctacaggacatatgaagagtgcaatggcaaaacaagagcaaaaagcacttcctcccatgaccttacagtaaccatactgattgaatccccagggacattccatcattgcaatagctcagatttttcttcctttttctttgcacaccagctctactctttagtaaaattgtaaaaggctgccattatggacattaggtatcccaacataaccatctggagtgtgtccagtttgttcttcataggaccaatttttatttgcagcttgagtttttatatgaagttgcattattgtggacttggctgtcttgtgatgaatttttttcatatgtattctgtgccatactattgttaaaatgaactgttgctattgtgagatggattttaactgacctattaagggtttctttcgaatggcactactttagggacattctagtatttgcttctattgtttgggccttgtggataatgtacagatttaaaaacaaatcttgttgctgatttgtccatttctttccctgcactttgttacatctgggatacagtctaactcatctgatttaatatgcatttaaaaaaatgccataactattaaacaccttgtttacagacagatgaaataaatttattccaaccaaaaaaaaaaaaaa

SEQ ID NO: 5883 - DNA, 6936 bp, Homo Sapiens
  NM_053042
agggacctacagcgggcgcggcgccggcggtctgcggccggcggtgtagacgccccttcgccgggacctggcacccgaatccggcctgccgggcctctttgtgcagcgccttgctgacgcccagggttctgatgtagaagcctacaccagggcctgaggttgtgaaactcatggcagtccacgcctgagaagagaaggcctgaaagagaaggaagagcccatgggacttgccacggttttgacttacatctgcaactccaaggctacaggcaggaatgttacctggaatgtcagagagctgaaagcagtcatattttgggatcatgcacctactgcggcagtatataaagaaagataattaagtatgcacccaagaagtagctgcgcccctacccatcacaaactgtatagaaggatatctcctaaggattttatcatgtgaaaactttctgaattttagttggctctttttagaaatgcagataagatgaaggatattggacagcagctatacactacacacttgaacggcggacataattccttgaccatgtcacccaaacagcctgatgctaatggagcacctcggccaaatagacaagaagcacaaacccttttgtatcaaggctcagaggcagaggctgccatgatgaccattgctacatgtgcaaagtgcaaaagtgttcacaagatctctcttcaagatttgcagaagggtacagggaaggacggtatgtatgtctgcttccagtgcagcctcggtgcagctcctcccaattttcattttgtgagcaataattccagtgcgactcatgttggaaataaaactgaaaacttctcaagttctgtcaatagcaaatttaaggtaaggaactttaagccaggcaaatactattgtgataaatgtcgattctctacaaaggacccgctgcagtacaaaaagcacacccttcaacacgaggagattaaattcatttgttctcactgcagctacatttcgtatacgaaaggagagtttcagaggcatttggtgaaacacacaggcatatttccttatcagtgtgagtattgtgactatggtgctattagaaatgattatattgtcaaacacacgaagagagtacatgaaagggcaggtgcgaaacggccagtcaaagctgttgccaagctggagccaaaaagaaccggaacttcaaaacaaaacccagagcttctaaaagcttccaatccacggactacatttcaaaataagtggtcagaccaactgtcaggtttctctctccatgcaaataaagacaaaatgcacaatatcatgttgttacctgaaccaaaggaataccaaaaagatgtagtttgtattccaaataaaatgaccctgtctgagccaaatgaagtcaacctatttgagaacaaaaatgttgaagtagaagtgttatcccctgcaaaagaacctgttcagccaggtatgccattgacagttgttgcaccagcagaactagttgtccctgcaaactgtttagcccagttgatagatgtgaaggttgtcaatggtacacagcagcttgttctgaaactgtttccgctggaagaaaataattgccttgaagctgggagggataatggaggtaattctgaacgtatggtgaaagagaagggttcaaatgaacaagaaaaagtactttctgcagaaaaaacaaagtcactgacagttgacgggaatgttggaaaactcgtaggcattgatagttttcaaccttcagttcagaaacagcttaaaaatgtgaaatgggtaaggtcttatgattttattatgccaaattctagtgtgcacaacaatggaaaatccttcattaattcggaaacaattgaggattttcagaaaaaaaataatttgtatccacatagaactgcttttccttccgttgccttaaaaggtcattctctagcatctgtatttaaaaacagtgttttacgtagtcttggagctgcatcaaacccttttccatataaagctgctgtttgttttgctgaaagtggaagaaatttacacagtagctcacagcagttactcccatttgctgcatcacctgcaacctgttccttctctggagaaaagggcttattgcctgtaagtgaaaatgacttggaatctacaagtaaagtcaatattcctgtaaaagtggtttcctctaataggaagcaggaagataaccagacagaggaacacaaggcagtttcaactgtaggccagatttcctctcaacataagagtgagtatttacatataaacataactggagaagatagatctcaacagcctggggataagcctttggaattaaagaattctgaaaggactaacaacactaatgatggcccagtcatctcatcagtattttctctgagctctggatctgaaaatgtccccgagggcattaagtggaatagctcaacgtctaaaataaagtcaattgaactgttgcgcagaaagatagctcagttaattgagtcctgtgggaagccgtcatctttggcttcaaatagtgcacatcgtcgctctgtagggcaggcatcaaagggaacttcaaaagctacctctgaaggtattcaagaaatcaacgtgtcactcactggtcttggccattccacaggtactcttcagaaacctccgaatgatggtggtattactggtaatagacagcttactcatcaacaaatatatccacactttgcagatggcagtaataggaaaaccaaaagcagagtggccaggaaggctcatgttgccacgccagtgttaatccccaaaggggctgtgttgagggttcttaattcctctgagaatgcccacatcatagaggctacatgtgaagcacctgtcagcataccttgcagtgaaagacagttaataaaaccagttccattttgccctgtgagacaggcggactcagacttacagcctttaagaagtgaaagggggccaatagatatgtccccaaatatcgagacacctctgcggcctaaactgagaaaagagagtgctgtctgtagcaccatccatagaaaaactggcctcttgtatggacagcaaggaagcagtgaattaaataagcaagggagactgctttccagaagtctttctataagtagaaataaaaccaaacaagtacacttatccaggaagaaaaacaaaattcaagctgaacctagccgctgtctcaaggatccttcaatttttcaggttgcaaggcaactaagactgatagcagctaagccagatcagttgattaagtgtccccgtcggaaccagccagtcattgtgttaaaccaccctgatgtggactcgccagaagtgaccaatgtgatgaaggtaataaataaatacaaaggcaatgtcctcaaagttgttttatcagagaggactaggtgtcagctaggcatcagacggcatcatgtacgcctgacctaccagaatgcggaagaagccagtcaaattaaaaggcaaatgatgttgaaaatgaaactcaaaaaagttcataaaaacaactaccaggtagtggattccttgcctgatgattcttcacagtgtgtatttaagtgctggttttgtgggcgactgtatgaagaccaggaagagtggatgagtcatggccaacggcatttgatagaagcaactagagattgggatgttctttcctccaagggcaaataagtaaacagttactctttaaagcaagttatcttttagtttattctggtttggagtccctccaccaagattcagtagaagaaatacagactgtagaaatgagaggactgctaattcttcagaactgtaggaatattgggagctaggagtctgaacctgaagtatgtgattggaccccagaatgtatttgaaggctctgaaattgtacatgcaaattggtacatatgcatttttctggagagagcctgtgaaactgaacagattttcagtgggatctgagacttttctttgtttagcaccccgttttctgagtacatactgatctttcataatccattcagaggggcagattgagaatgttttacacatgctcttcatataaatgctacagaaaaacctttgttttggtgtgcacatccattttgtttttgctttaatttgtgttctgagtatttggtgcacaatggaaattatattttctactttactgtcttcaatttggttatagagaaatggccattcttttactccctccctggttttgtaatactcccgagtgttccgtatagcacaaagagttttgcttttactggccattttaaagaatgttttcaactgcttgcctgaatttactcctttcacagcaagtgttagaagaaagataacattttcaaatacttagcttttgctttctttaaaatacattggtttatgacatatgggaagggaacgtacctttttgcaaagacaaaaagagattacaaaaggaaaatatctaaaactattttctctttgcccttaccactcccagaaacataagtgaccaatttaaaatgctagggaacaggcttacaacataggtaaaactcgcaaacacagttcaaggtaggctcataaagttgtgaaaagggtttcatatgccctttagttttcatttgggattcatccaaagaccatgggtggatgctgtcttctctcttcttgatccctttgattcatggacactagactccctttgccatttcttctgaaccggccctcctgtggactagcacaacttccttgcccactgtttcttcctttctgtgcctttgagaccccttaaggttttccctcatgcgattactagaaaatggcaggaatcaacaaaatggagacctcccactgtttttgctaaagttacaggaacacgatccctagttttcattgatagtaacgctgtttctaatttgtcttaaccacattcatgcttaccctgctgctcagctttctcagggaagcaactccaggaacactccttccactcccctctctaccaacagatgtcaggactgtcatttatctacacatttgtgttctttagaaaaaggcccaccccctgcacaagcacagcctcttgggcagataggtggctgggtcagtgcttaagacaggattctagtcttcacttgcctgtgcagctgggcgctgaccttccaggtagagcacagatggcacaaccccgaggcagccccaacttgcatttccctccctccaggggctattcctgtcttaggcgatttgtggggtgcagtgaatgaaactaaagagttgttgcacctgaaaaagacaccagtgattgtttattgggtagtcgattggagactttgatttttttttttttttttcacatgggaaagtcttagattccagtagatggaattgcaatcctttgcagtttgttctcattacagataatcaacatttcttttgtataattcaatacatgatcatcaagttaattggtaaatttttattgaaatttaaaacttgcatttttatatatgtgtatgtgtacacataaaaatattttttaccatatgaaaattgcagtagctaattttctgatttcctattttataatgatacatgggctggaaaaatgtagaacgtttttatattctagaaatttattttggaagtacatttttataagggtctaatctcacttttggaaaatgaaagcacaggaatgatggggtctggtttatgtgaacaagtgagtagaaacccctttggatcattttattactgcatttttatttggtgctttttaggaagtagatctttggtaccacttcactacgtagagcattcgaagttttatccatgttatatattgtactcctgtggcatgaaaaatagctcccaagatatagagaggagaggagtgaagaaaaggctgtggtttttttttgttttgttttgtttgccacttttttatctcctattcctcaccacatagtgctttttcctgaaaagctggactgagaattggccttgaatcaggtcagagtgttaactgtcaacatgaagtattttcacttcgcagcatcaactttcaagcataagtaaaaacacaacttgcatactttgatggagcttaattgtgtgagtagaatatgtagcaaagctttttaggattttcagaactagaatactttttaaggaattaaaagtgtttctggaagtcaaaaatgggaaagcaaaaagtagctgtcctccctaaagagctttagaagatagcttaacctgtaggtacatgttatgaaataaacacatttctaacaatacaagggagtaggggcagacctgtgttgagtatttgtgtgggttcttaattttgaaggacctccaatcactacattttgttaatactgccaataaaatcattttcaacttattttttaaagtaggttttcttactttggtggaccagaagtgagagattgttatatttaggatataggcaaatacagtaaaagttaaaaaaaaaaaacctgacccaaagtatactctgatagactatattatattcaattttgtatccccagtcgagaacatcttgtaagccttcattaagggccacctgctgtctgttgaactagactgaacaaaatatattttctcacaagctccatccctttttctttaggacatgttatatataatccatctcagaagttgaagatgtgatgttgctcggcctttggaataatttttaaatctgtaaatgtctatatgagcagaaacaaaacattgtgtaacatgttttaagcattattgtaattcctgtgttaacagtttgtgtgtctgctgctctggttttgaaacatgtttgtatatagatacaggagttggcataaattttgttaaataaagcaacaaaaattttctttgccctttga

SEQ ID NO: 5884 - DNA, 1576 bp, Homo Sapiens
  NM_053045
ggcgtccgatcgaggcgggcgttcacgggcggccagggttgagtcccgggtcggggccgggggattgccggcgcatcagggccgagggctggggctggcggggccgctcgctgcctctcgctcgcagcagcggcggcaggcgcgggcgagggccacggggagaggagacgcagccccgcgggtggcacgctcggccgggccccggcccgcgctcaacgggcgcgatgctcttctcgctccgggagctggtgcagtggctaggcttcgccaccttcgagatcttcgtgcacctgctggccctgttggtgttctctgtgctgctggcactgcgtgtggatggcctggtcccgggcctctcctggtggaacgtgttcgtgcctttcttcgccgctgacgggctcagcacctacttcaccaccatcgtgtccgtgcgcctcttccaggatggagagaagcggctggcggtgctccgccttttctgggtacttacggtcctgagtctcaagttcgtcttcgagatgctgttgtgccagaagctggcggagcagactcgggagctctggttcggcctcattacgtccccgctcttcattctcctgcagctgctcatgatccgcgcctgtcgggtcaactagcctcaccgaggtgccggagagggagcgctggacaactagaatgttgacctcgagccgaggccctacttgcagcgcaccggaggagaggctctctagtctgaaggcaccgccggcttgcgccgagctgagtgccgggtttccctattccaatcctgtttgaaatggtttcttcagcagggcttaaaagagcagccttcatcctgaaaatgtatttccttttgtttaatgctttgagtagataatcctgaattgaggtcatgaggaggccccccaggccagacagtcctgaacccctctgacacttggaaactgaatataagtaaaatgtccaggtggactctgagtatttcctgtggatcctgggaaagtactgttgcacaaaggctgcaaagctggactcaggaatgtcctccaaccagcagcgctgacctaagagctccctgtgccgtctatccagaccagacttcggtagatgcctttgttagatctatcacatgtaaacgagcttgtatctccttccctgtgccacgagagagattggctttttattccagtctaggcagagacagaagaatgttgaataagagcacgattagagtcctgtctggttatctgttgcccaagaaaagaactctgctgtccaggcactgcttggcttactatcccagcaaagactgcagttttgtggacttttgaccaccttgggctggcactcttagcacacctgagacagatttaagcctccctaagagactgaagagaggaacaggtgtcagatactcataggcactgagatctacaaatgggaagcttgtgagtggcccatctttgttggcctacgaactttggtttgatgccagtcaggtgccacatgagaacctttgctgagatgcaaataaagtaagagaatgttttcctgaaaaaaaaaaaaaaaaaaaaaa

SEQ ID NO: 5885 - DNA, 2388 bp, Homo Sapiens
  NM_053052
gcggccgccgccccaccgtaggtccgtagcaggtggtcgaagtcgggcctccccgcgggcgtcacccagcgccgccggctgccccagccctgcgtgaaggcgctggaaaacacgcagggcaggttgggcagcaagaagccccgcacaaagtcggcgtaggagaaggcgcccggctccgagacgaaggctacccggcccggagcctggccgacgccggggacatcgacccccaggcctcggaagtggctgtcggcgagggcgcgcgtctcgcggtccatccagctcagcacgggtcgaaggaccctcctcctcacttccgccggagcggaaacggtgaggaccagcctcggaaccagaagacgcagggcgccgcgtttctgccccgccagcgcctggggctccgggcctgcacgcatgcgcgcggctcgccgcggtcttcactgcgcaggcgccgagcggccgaggcgccgcggtcggctctgggactcgtctggcgtccctcagaggcagaagaggcctggaccttggcgcacacagacccaggaacagatgagcagggatgtctgcatccacacctggccgtgcacctactacctggagcccaagaggcgatgggttactggacagctgtccttaacatcgctgtcgctcaggttcatgactgacagcactggagagattctggtcagcttccccctctccagcatagttgagatcaagaaggaggcttcacattttatcttcagctccatcaccatcctggagaagggccatgccaagcactggttcagctccctgcggccaagtcgaaatgtggtcttcagcatcatcgagcatttctggagggagctgctgctgtctcagcctggagccgtggcagacgcatctgtcccaaggacccggggcgaggagctgacgggactcatggctggatcccagaaacgcctggaggacacggcgagggtcctgcaccaccagggccagcagctggacagcgtcatgagaggcctggacaagatggagtcagacctggaggtggcggacagattgctgacagaactggaatctcctgcttggtggccctttagctccaagctttggaagacaccaccggaaacaaagcccagggaagatgtctccatgaccagttgtgaaccctttgggaaagaagggatactgataaaaattcctgctgttatttcccacagaacagagtctcacgttaaaccagggaggctcaccgtccttgtgtctgggttggaaatacatgactccagttctttgctcatgcacaggtttgaaagagaagacgtggacgacatcaaggtccactcaccttacgaaattagcatccgccagcggtttattggaaagccagacatggcctatcgtttgatatctgccaagatgccagaggttatccccattttagaagtgcagttcagcaagaagatggagctgttagaagatgcattggtgctcagaagcgcaagaacctcttcccccgcagagaagagctgctcagtctggcatgcagcatctgggctgatgggccgtaccctgcaccgtgagccacccgcaggagaccaggagggcacagcactgcacctgcagacaagcctgccagccctttctgaggcagatacccaggaactaacccagatcctgaggaggatgaaggggctggccctggaggccgagagtgagctggagagacaagacgaagccctggatggcgttgcagcagctgtggacagggcaaccttgaccatcgacaagcacaacaggcggatgaagaggctgacctaggggcagaacgtccctgcattcctgtctcaccctgcacatcccgctgagatggagggctgggcggcagtgccagggctgcagaggcctgtggccctccggagtggtcttcctctggatggggctgctactgtggggctgcttctgcaccaggggcctccccaggtgtgcaccatgcctgcctcccacttggctgtccctgctgctgggcaggacccggccacatgttctgcggatgctgcagaagtgtggaccatggcgggaccccaaggacacttggcacaggcctggaagaggccgccctcgtcttgtctcggctccctttcatggacagactggccttcttagctgtactataaatttgtgagtgaagttagagcccagctcacttagccagctcactttgagggcatcctataaacacccaactgttcttttatcgtctcggttttagccaaaagtgaaattagcatgactgcatctttcaaacaaaaatattgatttctgcttttagggccccgtttccatccagaaataaagggaaatgctggcttcagagtgaaaaaaaaaaaaaaaaaaaaa

SEQ ID NO: 5886 - DNA, 2276 bp, Homo Sapiens
  NM_053053
gggcaccttccctgcgaaaaggcgggcggagccgaaaaccaaacaaacgacttctgagagattgggggcgggactgacggcggccggcttagcttccagagccaaggccttccgccgagttggtttttgggttgttgatcgcggtggccgggcggtctgcggtcgggctgagacacgcggagcaatggcgacctttgtgagcgagctggaggcggccaagaagaacttaagcgaggccctgggggacaacgtgaaacaatactgggctaacctaaagctgtggttcaagcagaagatcagcaaagaggagtttgaccttgaagctcatagacttctcacacaggataatgtccattctcacaatgatttcctcctggccattctcacgcgttgtcagattttggtttctacaccagatggtgctggatctttgccttggccagggggttccgcagcaaaacctggaaaacccaagggaaagaaaaagctttcttctgttcgtcagaaatttgatcatagattccagcctcaaaatcctctctcaggagcccagcaatttgtggcaaaggatccccaagatgatgacgacttgaaactttgttcccacacaatgatgcttcccactcgaggccagcttgaagggagaatgatagtgactgcttatgagcatgggctggacaatgtcaccgaggaggctgtttcagctgttgtctatgctgtggagaatcaccttaaagatatactgacgtcagttgtgtcaagaaggaaagcttatcggttacgagatggtcattttaaatatgcctttggcagtaacgtgaccccgcagccatacctgaagaatagtgtagtagcttacaacaacttaatagaaagccctccagcttttactgctccctgtgctggtcagaatccagcttctcacccaccccctgatgatgctgagcagcaggctgcactcctgctggcatgctccggagacactctacctgcatctttgcctccggtgaacatgtacgatctttttgaagctttgcaggtgcacagggaagtcatccctacacatactgtctatgctcttaacattgaaaggatcatcacgaaactctggcatccaaatcatgaagagctgcagcaagacaaagttcaccgccagcgcttggcagccaaggaggggcttttgctgtgctaaattaggatttgagggtgtgggaccctcaccgaattcattgattactgaaaattgaatgttttttgggtccacatttcaaggctgaagtgtatagtgtatatataacctttcctatggaaatgtgacattgagtacattttgtgttgctgttgtgaagccattaatataaatctttggtaatgacccatatctctatatgtatgtgttcccagttgtgggagcaggcactaatgaaatcctgtgcctggaatggagatatttaggtacctgaggcttagtgtcctgtggtctgcatgtaagatagatgacatcctagaacaaagaagctgttttaacttaatccccctgatcagcaggatatctgtgtgttcagtgacatcatacattctgtatctagaagtctaaaatttctgcctttctcctaaagaatgtgttcttgcattttggttgaaataacctacacagtgttaaaaatcagatacctcctttagtgaccagttcaaattttaatagcgataggtagcccctgagaaatttatcactataactccacaggaaatatgacttggaagtgctctgtgtactaaacaaaataaagcccctctttgcatttaaaaccaaagtcaaaacaaaactcttgtaatgcaattaattaactttatgtcttcccatgactcaagttttgttaaatatgcccaaaaactttgattggcagtttcttcggttaattattcctatagaatgtattttaagaaatctatacaaattggatatatgcttggtaattctccagtttctaggaggtacctatttctaccgtttcaagtgatgaagtgaaaataatttacattcgatagtgttactgataacaaacctacttaagagatatgttgctttttacttaagggatagtgttgatagataaattagaatgtatagataggtttgtgaaagtctaaataatggttgtatagatatgtatatatggttcacatatctggatctgtgtatttgattttgtactttaaatgtgacaaataaaccttttgggagaaaaaaaaaaaaaaaaaaaaaaaaaaaaaaa

SEQ ID NO: 5887 - DNA, 2224 bp, Homo Sapiens
  NM_053055
cctacccggaccccgccggcctcacaccccggccagccagccgccagtagtgcgcaccgcctcctccccaagccccgccctgcgtccaccccaggggttaactcgcacgcgcgctcttgtggcggaggtagagtgcgccgtccagggctagagcaagcgcggccccgcggcccggagccatgctgaggagctgcgccgcgcgcctccgcacgctgggggctctgtgcctgccgccagtaggccggcgcctgccgggaagcgagccgcgacccgagctgaggtcattttcttctgaggaagtcattcttaaggactgttctgtccccaaccccagctggaacaaggacctaagactgctctttgaccagtttatgaagaaatgtgaagacggctcctggaaacgtttgccttcatataaacgtacacctactgaatggattcaagacttcaaaacccattttcttgacccaaagcttatgaaagaagaacaaatgtcacaggcccagctcttcaccagaagctttgatgatggcctgggctttgaatacgtgatgttctacaatgacattgagaaaaggatggtttgcttatttcaaggaggcccttacctggaaggaccacctggattcattcatggaggtgccattgcaaccatgattgatgctactgttggtatgtgtgcaatgatggctgggggaatcgtcatgactgccaatctcaacatcaattataaaagacctatccctctttgttctgttgttatgataaatagccaacttgataaagttgaaggaaggaaattttttgtttcctgtaatgttcagagtgttgatgagaagaccctatactcagaggcgacaagcttatttataaagctgaatcctgctaaaagtctgacataaagagctgctggtgaactccatctcattctcgcccctccagaagaagcagttgtcccccaaatactctgctccctcactgctgaatccctgtagggagaagcctgccaacagtgaccttccgaaacagccttctgaatacaaagaggattcagtttccatcttctcaactttttaacacagaaatacttcctgcgagcatatcgacaactctcgggccaggcgctgtggctcacacctataatcccagcactttaggaggccgaggcaggcggattgcctgagctcaggagttcaagatcagtctgggcaacacgatgaaactccgtctctactaaaatacaaaaaattatccaggcatggtggcgtacgcctgtagtcccagctactcaggaggctgaggcaggagaattgcttgaacccaggaggaagaggttgcagtgagccaagatcatgccacatcactccaacctgggcaacagaacaagaacccatctcaaacaaacaaacaaacaaaaaaaaaaaactcttgtctccttaggatatgttacctgctccactgcagactagagaaataaatgtgtattgaaccttttactgcaaacttgaaaatgctagaaaaccaagcatgaagaataaatacatggtgggaaacacacaggcatgtgcatatgcatatacattgtaagttagtaagttagaaagctagctttgttgtatctgaacacatgaatcttttttggtcagtgtaggaagcacagccagatcctataggaatgaatacctcaaatctgttgtctgagattctagagattaaaccactgtgccatttttaacccaggctgtactgttgtttcttaccaacagcataggttttcatcactggaaggagcctgtgttcatttcctagggctgctgtagcaaagtagtacaaactggattgtttaaaccaacaaaaactcattgtctctcagttctggaggccagaagttcaaaatcaaggtgttgaccaaggccattctcctgaaagtgctagggaaggagctgtccacgcctccctcctggcttctgggagcctcaggtgttccttggcttctagatgcatcattccagtcctccatcttcacatggcattccctctgtgtgtctccacagtgtcttccctctgtgcagatctatctctgtgtccaagtctcctctttttataaggaaaccagtcataatggacccacctgaatgacctcattttaacttgattacctctgtaaaaaatgtatttccaaataaagtgaccttatgaggtattgaaaaaaaaaaaaaaaaaa

SEQ ID NO: 5888 - DNA, 4304 bp, Homo Sapiens
  NM_053056
cacacggactacaggggagttttgttgaagttgcaaagtcctggagcctccagagggctgtcggcgcagtagcagcgagcagcagagtccgcacgctccggcgaggggcagaagagcgcgagggagcgcggggcagcagaagcgagagccgagcgcggacccagccaggacccacagccctccccagctgcccaggaagagccccagccatggaacaccagctcctgtgctgcgaagtggaaaccatccgccgcgcgtaccccgatgccaacctcctcaacgaccgggtgctgcgggccatgctgaaggcggaggagacctgcgcgccctcggtgtcctacttcaaatgtgtgcagaaggaggtcctgccgtccatgcggaagatcgtcgccacctggatgctggaggtctgcgaggaacagaagtgcgaggaggaggtcttcccgctggccatgaactacctggaccgcttcctgtcgctggagcccgtgaaaaagagccgcctgcagctgctgggggccacttgcatgttcgtggcctctaagatgaaggagaccatccccctgacggccgagaagctgtgcatctacaccgacaactccatccggcccgaggagctgctgcaaatggagctgctcctggtgaacaagctcaagtggaacctggccgcaatgaccccgcacgatttcattgaacacttcctctccaaaatgccagaggcggaggagaacaaacagatcatccgcaaacacgcgcagaccttcgttgccctctgtgccacagatgtgaagttcatttccaatccgccctccatggtggcagcggggagcgtggtggccgcagtgcaaggcctgaacctgaggagccccaacaacttcctgtcctactaccgcctcacacgcttcctctccagagtgatcaagtgtgacccggactgcctccgggcctgccaggagcagatcgaagccctgctggagtcaagcctgcgccaggcccagcagaacatggaccccaaggccgccgaggaggaggaagaggaggaggaggaggtggacctggcttgcacacccaccgacgtgcgggacgtggacatctgagggcgccaggcaggcgggcgccaccgccacccgcagcgagggcggagccggccccaggtgctcccctgacagtccctcctctccggagcattttgataccagaagggaaagcttcattctccttgttgttggttgttttttcctttgctctttcccccttccatctctgacttaagcaaaagaaaaagattacccaaaaactgtctttaaaagagagagagagaaaaaaaaaatagtatttgcataaccctgagcggtgggggaggagggttgtgctacagatgatagaggattttataccccaataatcaactcgtttttatattaatgtacttgtttctctgttgtaagaataggcattaacacaaaggaggcgtctcgggagaggattaggttccatcctttacgtgtttaaaaaaaagcataaaaacattttaaaaacatagaaaaattcagcaaaccatttttaaagtagaagagggttttaggtagaaaaacatattcttgtgcttttcctgataaagcacagctgtagtggggttctaggcatctctgtactttgcttgctcatatgcatgtagtcactttataagtcattgtatgttattatattccgtaggtagatgtgtaacctcttcaccttattcatggctgaagtcacctcttggttacagtagcgtagcgtgcccgtgtgcatgtcctttgcgcctgtgaccaccaccccaacaaaccatccagtgacaaaccatccagtggaggtttgtcgggcaccagccagcgtagcagggtcgggaaaggccacctgtcccactcctacgatacgctactataaagagaagacgaaatagtgacataatatattctatttttatactcttcctatttttgtagtgacctgtttatgagatgctggttttctacccaacggccctgcagccagctcacgtccaggttcaacccacagctacttggtttgtgttcttcttcatattctaaaaccattccatttccaagcactttcagtccaataggtgtaggaaatagcgctgtttttgttgtgtgtgcagggagggcagttttctaatggaatggtttgggaatatccatgtacttgtttgcaagcaggactttgaggcaagtgtgggccactgtggtggcagtggaggtggggtgtttgggaggctgcgtgccagtcaagaagaaaaaggtttgcattctcacattgccaggatgataagttcctttccttttctttaaagaagttgaagtttaggaatcctttggtgccaactggtgtttgaaagtagggacctcagaggtttacctagagaacaggtggtttttaagggttatcttagatgtttcacaccggaaggtttttaaacactaaaatatataatttatagttaaggctaaaaagtatatttattgcagaggatgttcataaggccagtatgatttataaatgcaatctccccttgatttaaacacacagatacacacacacacacacacacacacaaaccttctgcctttgatgttacagatttaatacagtttatttttaaagatagatccttttataggtgagaaaaaaacaatctggaagaaaaaaaccacacaaagacattgattcagcctgtttggcgtttcccagagtcatctgattggacaggcatgggtgcaaggaaaattagggtactcaacctaagttcggttccgatgaattcttatcccctgccccttcctttaaaaaacttagtgacaaaatagacaatttgcacatcttggctatgtaattcttgtaatttttatttaggaagtgttgaagggaggtggcaagagtgtggaggctgacgtgtgagggaggacaggcgggaggaggtgtgaggaggaggctcccgaggggaaggggcggtgcccacaccggggacaggccgcagctccattttcttattgcgctgctaccgttgacttccaggcacggtttggaaatattcacatcgcttctgtgtatctctttcacattgtttgctgctattggaggatcagttttttgttttacaatgtcatatactgccatgtactagttttagttttctcttagaacattgtattacagatgccttttttgtagttttttttttttttatgtgatcaattttgacttaatgtgattactgctctattccaaaaaggttgctgtttcacaatacctcatgcttcacttagccatggtggacccagcgggcaggttctgcctgctttggcgggcagacacgcgggcgcgatcccacacaggctggcgggggccggccccgaggccgcgtgcgtgagaaccgcgccggtgtccccagagaccaggctgtgtccctcttctcttccctgcgcctgtgatgctgggcacttcatctgatcgggggcgtagcatcatagtagtttttacagctgtgttattctttgcgtgtagctatggaagttgcataattattattattattattataacaagtgtgtcttacgtgccaccacggcgttgtacctgtaggactctcattcgggatgattggaatagcttctggaatttgttcaagttttgggtatgtttaatctgttatgtactagtgttctgtttgttattgttttgttaattacaccataatgctaatttaaagagactccaaatctcaatgaagccagctcacagtgctgtgtgccccggtcacctagcaagctgccgaaccaaaagaatttgcaccccgctgcgggcccacgtggttggggccctgccctggcagggtcatcctgtgctcggaggccatctcgggcacaggcccaccccgccccacccctccagaacacggctcacgcttacctcaaccatcctggctgcggcgtctgtctgaaccacgcgggggccttgagggacgctttgtctgtcgtgatggggcaagggcacaagtcctggatgttgtgtgtatcgagaggccaaaggctggtggcaagtgcacggggcacagcggagtctgtcctgtgacgcgcaagtctgagggtctgggcggcgggcggctgggtctgtgcatttctggttgcaccgcggcgcttcccagcaccaacatgtaaccggcatgtttccagcagaagacaaaaagacaaacatgaaagtctagaaataaaactggtaaaaccccaaaaaaaaaaaaaaaa

SEQ ID NO: 5889 - DNA, 4093 bp, Homo Sapiens
  NM_053067
aatttcgctaaccgtgacgtcatctcggtgcgccgttacagcgcttaactggaaactgcgatttagtttttggtgaaaggagtggaaaaaaaccatgaactgacctaccccgccccattttgcttttagtccttcacactggcttcgcctgcactttgggcaatggagcgggaaaggaaaaggcacgcaggctgagctcaaagtcgcgccagccggggatgactcggcgacgccgccaggcgcgttacccggcgtgctccgcgcggcgccggcgaagggacgtgggggaaggggcagggaggaggaagcggtggctgctgcggatgtcggtgtgagcgagcggcgcctgaacacacggcggctgccgagcgcctgacccgggcctgcgccagagcctgcaccgagctccggggccccacacccgctacggtggccctgcgcccgttgctactgaggcggcgtgctctgcattcttcgctgtccaggcctgccggctctggtgtctgctggctcctccttgctcgcctgctccctcctgcttgcctgagtcaccgccgccgccgccgccacagccatggccgagagtggtgaaagcggcggtcctccgggctcccaggatagcgccgccggagccgaaggtgctggcgcccccgcggccgctgcctccgcggagcccaaaatcatgaaagtcaccgtgaagaccccgaaggaaaaggaggaattcgccgtgcccgagaatagctccgtccagcagtttaaggaagaaatctctaaacgttttaaatcacatactgaccaacttgtgttgatatttgctggaaaaattttgaaagatcaagataccttgagtcagcatggaattcatgatggacttactgttcaccttgtcattaaaacacaaaacaggcctcaggatcattcagctcagcaaacaaatacagctggaagcaatgttactacatcatcaactcctaatagtaactctacatctggttctgctactagcaacccttttggtttaggtggccttgggggacttgcaggtctgagtagcttgggtttgaatactaccaacttctctgaactacagagtcagatgcagcgacaacttttgtctaaccctgaaatgatggtccagatcatggaaaatccctttgttcagagcatgctctcaaatcctgacctgatgagacagttaattatggccaatccacaaatgcagcagttgatacagagaaatccagaaattagtcatatgttgaataatccagatataatgagacaaacgttggaacttgccaggaatccagcaatgatgcaggagatgatgaggaaccaggaccgagctttgagcaacctagaaagcatcccagggggatataatgctttaaggcgcatgtacacagatattcaggaaccaatgctgagtgctgcacaagagcagtttggtggtaatccatttgcttccttggtgagcaatacatcctctggtgaaggtagtcaaccttcccgtacagaaaatagagatccactacccaatccatgggctccacagacttcccagagttcatcagcttccagcggcactgccagcactgtgggtggcactactggtagtactgccagtggcacttctgggcagagtactactgcgccaaatttggtgcctggagtaggagctagtatgttcaacacaccaggaatgcagagcttgttgcaacaaataactgaaaacccacaactgatgcaaaacatgttgtctgccccctacatgagaagcatgatgcagtcactaagccagaatcctgaccttgctgcacagatgcagaatcctgatacactatcagcaatgtcaaaccctagagcaatgcaggccttgttacagattcagcagggtttacagacattagcaacggaagccccgggcctcatcccagggtttactcctggcttgggggcattaggaagcactggaggctcttcgggaactaatggatctaacgccacacctagtgaaaacacaagtcccacagcaggaaccactgaacctggacatcagcagtttattcagcagatgctgcaggctcttgctggagtaaatcctcagctacagaatccagaagtcagatttcagcaacaactggaacaactcagtgcaatgggatttttgaaccgtgaagcaaacttgcaagctctaatagcaacaggaggtgatatcaatgcagctattgaaaggttactgggctcccagccatcatagcagcatttctgtatcttgaaaaaatgtaatttatttttgataacggctcttaaactttaaaatacctgctttatttcattttgactcttggaattctgtgctgttataaacaaacccaatatgatgcattttaaggtggagtacagtaagatgtgtgggtttttctgtatttttcttttctggaacagtgggaattaaggctactgcatgcatcacttctgcatttattgtaattttttaaaaacatcaccttttatagttgggtgaccagattttgtcctgcatctgtccagtttatttgctttttaaacattagcctatggtagtaatttatgtagaataaaagcattaaaaagaagcaaatcatttgcactctataatttgtggtacagtattgcttattgtgactttggcatgcatttttgcaaacaatgctgtaagatttatactactgataattttgttttatttgtatacaatatagagtatgcacatttgggactgcatttctggaaacatactgcaataggctctctgagcaaaacacctgtaactaaaaaagtgaagataagaaaatactcttaaagctgagtatttcctaattgtatagaatcttacagcatctttgacaaacatctcccagcaaaagtgccggttagtcaggtttgttgaaaatacagtagaaaagctgattctggttatctctttaaggacaattaattgtacagacacataatgtaacattgtctcaacattcattcacagattgactgtaaattaccttaatctttgtgcagactgaaggaacactgtagtataccccaaagtgcatttgcctaggacttctcagcttctcccataggtagtttaacaggcattaaaatttgtaattgaaatgttgctttcactgaaaaagtgtcttgatgtttcagttatttttaatcgccataaaaaaatagaactatcttttgggtttatctgttttctcatgcacaggcaatacacaaatttaaaatgagttgtgagccaattgtttctgaagtgttttggtagttctattaagaaatagttaaatattgtgcttttcagagcctcagagaaagggggacggggtgggggggtggggcagcggaatctgtcctggatggggccagcttaaataatactggcaaccaagattctgttaggatttctgtgcatatagtgtagtaaagaagtatcattcaggggtgaaaaacaaagagccgttttaatgatgttgagtacatttggctgttttatagcctttttcttccctcccccaaagaattctgtttgcctaactcccaaactgttggggtggtacattcctttaggaccaattaaaacataattgagggtcagtgatacatttggctgactctggttcagtattctcttaggtgattatattctctcatgtacagttacaggaaattaaaatgttaaagtaacctaaaatgaattcagaccaataaaatcaagggaaatacaagttgattgcattacttctgtatgttgcttgctattaaaaaggttaagaggccaggttacccaccagtccttgcactgttctgacactttccccaggaggaaaacaagtacaaaggttacggtggaggcataagtagaagagattgttaagaagggtattcatgtgtctttgctctttctgctttatgcctcagtttggtttaaaaacttctgtactggcaaatggtggtattcagtgtgggatagtgtcataactaatttgacaatttattaatcataaaataacaataaatctctagcttttacacttgaaaaaaaaaa

SEQ ID NO: 5890 - DNA, 2042 bp, Homo Sapiens
  NM_053274
acgcgtagcgcggggcggggccagaagagcgggctaagacgccggaggaggtggcggcggctgggagaggcgagggttctggccgattttagcatcgaaactaggagaaataagaatggctgtagaggaacttcagtctataataaagagatgtcaaatcctagaagagcaagactttaaagaagaggattttggcctatttcagttagctgggcaaagatgcatagaagaagggcacacagaccagctattagaaattattcaaaatgaaaagaataaggtcatcatcaagaatatgggctggaatctcgttggtcctgttgttcgatgccttttgtgtaaagataaagaggatagtaaaagaaaagtttattttttgatctttgatttattggtaaagttatgcaatccaaaggaattattgttgggtttgcttgaactgattgaagagccctctggaaaacagatatcccaaagtattcttcttttgcttcagccattacaaacagtgattcagaaacttcataacaaggcatattcaattggattagcattgtctaccctttggaatcagctatctcttcttcctgttccatactcaaaagaacaaatacaaatggatgactatggcctttgtcagtgttgcaaggccttaatagagttcactaagccttttgtggaagaagtcattgataacaaagaaaactcactggaaaatgaaaagttaaaggatgaattactgaaattttgtttcaaaagcttgaaatgccctttgctgacagcacaattctttgaacagtctgaagaaggtggaaatgatcctttcaggtattttgcatcagaaataataggttttttatcagcaattggacaccctttccccaaaatgatttttaatcatggaaggaaaaagagaacttggaattaccttgaatttgaagaagaagaaaataaacagttagcagactcaatggcttctctggcatatctagtatttgtacagggcatccatattgatcagcttccaatggtcttaagcccattgtaccttttgcagtttaatatggggcacattgaagtctttttgcaaagaacagaagagtctgttatctccaaaggattggagctgctggagaatagtttattgagaatagaagacaatagtctactttaccagtacttagaaatcaagagttttcttactgtacctcagggcttagtgaaagtaatgacactttgccccattgagacactgaggaaaaagagtttagctatgcttcagctgtatattaacaagttggattcacaaggcaaatatacattatttaggtgcttattgaatacaagtaatcactcaggtgtggaggcttttattattcaaaatatcaaaaatcaaattgacatgtcattaaagagaacacgtaacaacaaatggtttacaggaccacagttgatttcccttcttgatttggtactttttctcccagagggtgcagaaacagatttactgcaaaactcagataggattatggcttcattaaatttattgaggtatttggttatcaaagataatgaaaatgacaatcaaactggattatggacagaacttggaaatattgagaataatttcttaaagccacttcatataggacttaatatgtcaaaagcacattatgaagcagaaattaaaaatagccaagaggcccagaaatctaaagatctttgttctataactgtaagtggagaagagatccctaatatgcctcctgaaatgcagcttaaggtcctgcattcagctcttttcacatttgatttgattgaaagtgttctagctcgagtggaagaactcattgaaataaaaacaaagtctacctctgaagaaaatattgggataaagtgaaagttccatttcctaaataaaaactaataaaatatagtactttccattatgattcatttaatacctttataaaaaatttttctgtaaaaatttactgcttgaaaaataaatgtagcttttctcatttatcaaaaaaaaaaaa

SEQ ID NO: 5891 - DNA, 1289 bp, Homo Sapiens
  NM_053275
gtctgacgggcgatggcgcagccaatagacaggagcgctatccgcggtttctgattggctactttgttcgcattataaaaggcacgcgcgggcgcgaggcccttctctcgccaggcgtcctcgtggaaggcccgggaccgcgggatgggtgtcggcgtgaccaggcctgagctccctgtctctcctcagtgacatcgtctttaaaccctgcgtggcaatccctgacgcaccgccgtgatgcccagggaagacagggcgacctggaagtccaactacttccttaagatcatccaactattggatgattatccgaaatgtttcattgtgggagcagacaatgtgggctccaagcagatgcagcagatccgcatgtcccttcgcgggaaggctgtggtgctgatgggcaagaacaccatgatgcgcaaggccatccgagggcacctggaaaacaacccagctctggagaaactgctgcctcatatccgggggaatgtgggctttgtgttcaccaaggaggacctcactgagatcagggacatgttgctggccaataaggtgccagctgctgcccgtgctggtgccattgccccatgtgaagtcactgtgccagcccagaacactggtctcgggcccgagaagacctcctttttccaggctttaggtatcaccactaaaatctccaggggcaccattgaaatcctgagtgatgtgcagctgatcaagactggagacaaagtgggagccagcgaagccacgctgctgaacatgctcaacatctcccccttctcctttgggctggtcatccagcaggtgttcgacaatggcagcatctacaaccctgaagtgcttgatatcacagaggaaactctgcattctcgcttcctggagggtgtccgcaatgttgccagtgtctgtctgcagattggctacccaactgttgcatcagtaccccattctatcatcaacgggtacaaacgagtcctggccttgtctgtggagacggattacaccttcccacttgctgaaaaggtcaaggccttcttggctgatccatctgcctttgtggctgctgcccctgtggctgctgccaccacagctgctcctgctgctgctgcagccccagctaaggttgaagccaaggaagagtcggaggagtcggacgaggatatgggatttggtctctttgactaatcaccaaaaagcaaccaacttagccagttttatttgcaaaacaaggaaataaaggcttacttctttaaaaagtaaaaaaaaaaaaaaaaaaaaaaaaa

SEQ ID NO: 5892 - DNA, 2553 bp, Homo Sapiens
  NM_053282
ctagaggaagaggtagctccacaggaggtacagctgcttacacatctctcctcagagctgtcccttgacttgggggtgaatttcaggccaacagggcttcctgggatacaagagcgttctccatggatctgccttactaccatggacgtctgaccaagcaagactgtgagaccttgctgctcaaggaaggggtggatggcaactttcttttaagagacagcgagtcgataccaggagtcctgtgcctctgtgtctcgtttaaaaatattgtctacacataccgaatcttcagagagaaacacgggtattacaggatacagactgcagaaggttctccaaaacaggtctttccaagcctaaaggaactgatctccaaatttgaaaaaccaaatcaggggatggtggttcaccttttaaagccaataaagagaaccagccccagcttgagatggagaggattgaaattagagttggaaacatttgtgaacagtaacagcgattatgtggatgtcttgccttgaagataaggctgccggacaaagcaagttgaagagatgagtaacagttctcactgatgacccacttctgcaggcataggtccagagcaccaaactctagtggacaattcagactctcctggttgtgtaactgaagatgttctgcccaccagcaccagaggtcactctccacatccccgcctcccagacatataccaggagcaatttcaaaaccctctccagtttcactcttctttcttggaatgggacagcctgaacattttccctttgacttgttaaaggtaccaccctacatcatggttgacaccctcctttggaccatgcagtcagaggggcagctttatacagaggaggggcacacttgtctgtgagtttgaagccctgagttccagtcctgtggctgtgtgactttgaacacgtttctgcccatctccaggtcttagtttctttgtctctgtggttgggtgggatgataaacattgccccagtctctctgttgagcctgcttgtgtcaggtgaaggtgagggatcgggagtgatggagatgcatacagatcagcaccttctctgtacctgctggacccccatgtgcacccttctccctccagcctgggctactctcctcctggttctttctaatcttaaacttcctggtgagcattgccccagccacactttctccctggttttgcttaattccacttatgcatcagtcatttcaacagcatgaatgtggttctgtacagtgatgtatgtggagatttctaaaatattctatgtgtgatttctgttcccaactaggttctaagtgccatcaaagcacggttgggtctcccttgtatcttccacagtgtgtagaaatttgtgctgcccagagctgtgcctagttcatagaaactgactggaagcacattgctgagggaggtttgttgaattggtttttaaggtttattgaaattgatttgctgaatttttctgctagttcaaaatgtgaattaggacctggtcagtttgaaatataccaaattctatgccctttctcttacctatcatcaaattgtagtaatgtatttcaccccactggacttatcttcagagttttaaaagagaggagctctcgacttagaggtaatatgaacagatgaacagacactgtggctggagccccaaagtgtggagcattgtgagatttggggtcacagcaatttatggctactattccctgggtctggtaggtaggacaaatgtcctcttttacttttcaaaactggcttaggtattcatggaccttgattcttctatatacattttataataaatacgtgaaattgcttaaaacctctttttggaatttttaatgaacttgcaacaaatttgtaaataggagagaactgacgttcttgtgatgttttcccatgcataaacatgccacatccatgttcttgggtcatcttttttgccctttcatggagtcataaattttcccaactgaagtcttgtatattctgttagattaattcctatttctagttgctgtaaatgatatcttatgttttattacatttctaataggatatggtgttggtgaaatgttaaccctctcattagatctactagtttacctgttgattctattgtgttttctatgtaaatgattttgtcagctataaataataacattttattttctctttccttgcaatacctatgctcatttattttttatgtttacccattggttagggcctcctgtatacattaaacagttcatagtcatgatagtgagtattcttacactgttcccagtattacagggaatgcttagaaattttctttatttaaacattatgtttgttgtagccttgttaaaggctattttataatttttactagaaatattttgacatttattgtgatttttttctatctctaatctattgagatagtcacattccttttgtcttcactccattataaaggtaagttaccttaataaaattgttgatatcatttcatcaaaaaaaaaaaaaaaaaa

SEQ ID NO: 5893 - DNA, 901 bp, Homo Sapiens
  NM_054014
tttccgggacgtcgcgcgccgtgtggggcgcgcacgcagggctgggcgtgagggggcgtgcgcgtgcgcaggcgacgcgccgaggtactaggcagagccgtggaaccgccgccaggtcgctgttggtccacgccgcccgtcgcgccgcccgcccgctcagcgtccgccgccgccatgggagtgcaggtggaaaccatctccccaggagacgggcgcaccttccccaagcgcggccagacctgcgtggtgcactacaccgggatgcttgaagatggaaagaaatttgattcctcccgggacagaaacaagccctttaagtttatgctaggcaagcaggaggtgatccgaggctgggaagaaggggttgcccagatgagtgtgggtcagagagccaaactgactatatctccagattatgcctatggtgccactgggcacccaggcatcatcccaccacatgccactctcgtcttcgatgtggagcttctaaaactggaatgacaggaatggcctcctcccttagctccctgttcttgggtaaggaaatggaatactgaagggcccttcactgcctttgctcctcccatgttatgcccagcgtttgatgggtagcagagagaacaaaaaacaccacaaggctatttttccccctgcattctttctgtattgagtatcctttcagtgttattagtgtatgctttgaatgtaaaaattggtcaccctaaggaaaggaattggcatgtgtatgttcccagttcaactcatggagatggcagctgtttaaatgtttttctatgtagtttataaattaaaactgaattgaggactatggaaatgtaggccaaatttgtagtgccaacattttagttctttggaaataagactcttaatgaatgacttt

SEQ ID NO: 5894 - DNA, 3056 bp, Homo Sapiens
  NM_054016
ggacgcctggtgttctcgcgggaaagaaccgttgcgcccgactttgcgcggaggtaggagggggaagtggaggcgggagtgaagtctcgcgagaagagtcggttgccgtagcagagccctctagctgtgtgtgtctgaggctcggccgcctgagccgcggacggtttgctgagcccgttagtgcgcccggccgagacacgccgccgccatgtcccgctacctgcgtccccccaacacgtctctgttcgtcaggaacgtggccgacgacaccaggtctgaagacttgcggcgtgaatttggtcgttatggtcctatagttgatgtgtatgttccacttgatttctacactcgccgtccaagaggatttgcttatgttcaatttgaggatgttcgtgatgctgaagacgctttacataatttggacagaaagtggatttgtggacggcagattgaaatacagtttgcccagggggatcgaaagacaccaaatcagatgaaagccaaggaagggaggaatgtgtacagttcttcacgctatgatgattatgacagatacagacgttctagaagccgaagttatgaaaggaggagatcaagaagtcggtcttttgattacaactatagaagatcgtatagtcctagaaacagtagaccgactggaagaccacggcgtagcagaagccattccgacaatgatagattcaaacaccgaaatcgatctttttcaagatctaaatccaattcaagatcacggtccaagtcccagcccaagaaagaaatgaaggctaaatcacgttctaggtctgcatctcacaccaaaactagaggcacctctaaaacagattccaaaacacattataagtctggctcaagatatgaaaaggaatcaaggaaaaaagaaccacctagatccaaatctcagtcaagatcacagtctaggtctaggtcaaaatctagatcaaggtcttggactagtcctaagtccagtggccactgatagtataaaccatggtcatttttaggcatgtatcattcatttactcatagtttggtttacttaaattatcaggaatacaatgttgcaatgatgcttaaaaaacacttgttagttttccctgtaccaggcaatggttataattaaaatgatatgctgttgagaagccactcttaagagtccagtttgtttaatgttatgggcagctaccaatttgtggtgtctctgtatatttttgtaaagattctcattttttatgcttgaagtatttggtgaaaagatgttggttgaccataatttgcaacattgtctcattaaaaataaactttcatattcatatttggtagaactgttaacctagaaatgtagcttgctaataagatagaatgatacaaaagtgaagtagtagccacagtacaacactgactgctcagacacatttaggttcagggtggacctttatgtcttgtcaagatgtctaggcccggctgggcgtggtggctcacacctgtaatcccagcactttgggaggccgaggcgggcggatcacgaggtcaggagttcgagaccagcctgaccaacacggtgaaaccccgtctctactaaaaatacaaaaattatccgggcatggtggcacatgcctgtaatctcagctactcaggaggctgaggcaagagaatcgcttgaacctgggaggtagaagttgcagtgagccaaaatcacgccactgcactccagcctgggcaacagagtgagactccgtctcaaaaaaaaaaaaaaaccggatgtctaggccaatgataattatttttgatgcagtgtggattagttcttttgttaaccccactgtcttggggaatgatgccagctgggaaattgagtttttgactgaaacatggagccttcactgctttttttctggttcctatgaagatttggaacatagaaaacacaaaaactcaccttaaaatttgagcaggtcgttgatggcaaaaataattttaaggaaaaaggaatattcttatgtagttattctaaagtttaaggagcgttgttgaccataatattgcttagttttcttactgctgttaagtaagtaaattgtttcaaagtaggttttgtgtgtgtgtgcctagtgtaaaagaactgaaattttgatgcttacagcacttggctcgtgcatttgtatcaaaatttgcctgcctctttatgagggaggcctgcttttcacacctcagtttatttaatacgaggcaagttgtaagacaacactcattctaggtgattctgtggtgccatgaaatttaaggtaatttggggaaaaggattagtcagttttaagcaagagtcacatcttttgagctttcgattatcagtgtagtacctgactaaaaatgaagtaatacccttaaaccatttataatttctagtatttctctgaaagatcgttttggggacaaaagtgacttgacatgtccaatttcatttcagaataaaaagctagcatctttaaaaatctcagattgcttgcttacagatacaagtacgaattatggacaaacgattccttttagaggattacttttttcaatttcggttttagtaatctaggctttgcctgtaaagaatacaacgatggattttaaatactgtttgtggaatgtgtttaaaggattgattctagaacctttgtatatttgatagtatttctaactttcatttctttactgtttgcagttaatgttcatgttctgctatgcaatcgtttatatgcacgtttctttaatttttttagattttcctggatgtatagtttaaacaacaaaaagtctatttaaaactgtagcagtagtttacagttctagcaaagaggaaagttgtggggttaaactttgtattttctttcttatagaggcttctaaaaaggtatttttatatgttctttttaacaaatattgtgtacaacctttaaaacatcaatgtttggatcaaaacaagacccagcttattttctgcttgctgtaaattaagcaaacatgctataataaaaacaaaatgaagg

SEQ ID NO: 5895 - DNA, 1016 bp, Homo Sapiens
  NM_054033
gactccagccgcacctcctccggctctgcagtggcggcgaggaggcgagccggagcgacggcggggctggggccggagccgagccggggtcgggcagcagcagggaccccccagaggcggggcctgtgggaccgctatgggcgtggagatcgagaccatctcccccggagacggaaggacattccccaagaagggccaaacgtgtgtggtgcactacacaggaatgctccaaaatgggaagaagtttgattcatccagagacagaaacaaacctttcaagttcagaattggcaaacaggaagtcatcaaaggttttgaagagggtgcagcccagctgggtcctctttctcctctccccatctgcccccatccctgctagatgagcttggggcagagggcgaagctgacctgcacccctgatgtggcatatggagccacgggccaccccggtgtcatccctcccaatgccaccctcatctttgacgtggagctgctcaacttagagtgaaggcaggaaggaactcaaggtggctggagatggctgctgctcaccctcctagcctgctctgccactgggacggctcctgcttttggggctcttgatcagtgtgctaacctcactgcctcatggcatcatccattctctctgcccaagttgctctgtatgtgttcgtcagtgttcatgcgaattcttgcttgaggaaacttcggttgcagattgaagcatttcaggttgtgcattttgtgtgatgcatgtagtagcctttcctgatgacagaacacagatctcttgttcgcacaatctacactgccttaccttcacttaaaccacacacacaaggtgctcagacatgaaatgtacatggcgtaccgtacacagagggacttgagccagttacctttgctgtcactttctctcttataaattctgttagctgctcacttaaacaatgtcctctttgagaaaatgtaaaataaaggctctgtgcttgacaaaaaaaaaaaaaaaaaaaaaa

SEQ ID NO: 5896 - DNA, 3363 bp, Homo Sapiens
  NM_054114
gacatagctgccctaaaaggaatgaggaagcgagagctctccagtgtctggctggctccgtccgtgtgacagcccatgatgttctttccggtctctgtaatattctgaatttccacctgcccgccccttcgcttataatgcagagcatgtgaagggagaccggctcggtctctctctctcccagtggactagaaggagcagagagttatgctgtttctcccattctttacagctcaccggatgtaaaagaactctggctagagaccctccaaggacagaggcacagccacacgggagtgaaatccacccctggacagtcagccgcaatactgatgaagctgagaagcagccacaatgcttcaaaaacactaaacgccaataatatggagacactaatcgaatgtcaatcagagggtgatatcaaggaacatcccctgttggcatcatgtgagagtgaagacagtatttgccagctcattgaagttaagaagagaaagaaggtgctgtcctggccctttctcatgagaaggctctcccctgcatcagatttttctggggctttggagacagacttgaaagcatcgctatttgatcagcccttgtcaattatctgcggtgacagtgacacactccccagacccatccaggacattctcactattctatgccttaaaggcccttcaacggaagggatattcaggagagcagccaacgagaaagcccgtaaggagctgaaggaggagctcaactctggggatgcggtggatctggagaggctccccgtgcacctcctcgctgtggtctttaaggacttcctcagaagtatcccccggaagctactttcaagcgacctctttgaggagtggatgggtgctctggagatgcaggacgaggaggacagaatcgaggccctgaaacaggttgcagataagctcccccggcccaacctcctgctactcaagcacttggtctatgtgctgcacctcatcagcaagaactctgaggtgaacaggatggactccagcaatctggccatctgcattggacccaacatgctcaccctggagaatgaccagagcctgtcatttgaagcccagaaggacctgaacaacaaggtgaagacactggtggaattcctcattgataactgctttgaaatatttggggagaacattccagtgcattccagtatcacttctgatgactccctggagcacactgacagttcagatgtgtcgaccctgcagaatgactcagcctacgacagcaacgaccctgatgtggaatccaacagcagcagtggcatcagctctcccagcaggcagccccaggtgcccatggccacagctgctggcttggatagcgcgggcccacaggatgcccgagaggtcagcccagagcccattgtgagcaccgtggccaggctgaaaagctccctcgcacagcccgataggagatactcagagcccagcatgccatcctcccaggagtgcctcgagagccgggtgacaaaccaaacactaacaaagagtgaaggggacttccccgtgccccgggtaggctctcgtttggaaagtgaggaggctgaagacccatttccagaggaggtcttccctgcagtgcaaggcaaaaccaagaggccggtggacctgaagatcaagaacttggccccgggttcggtgctcccgcgggcactggttctcaaagccttctccagcagctcgctggacgcgtcctctgacagctcgcccgtggcttctccttccagtcccaaaagaaatttcttcagcagacatcagtctttcaccacaaagacagagaaaggcaagcccagccgagaaattaaaaagcactccatgtctttcacctttgcccctcacaaaaaagtgctgaccaaaaacctcagcgcgggctctgggaaatcgcaagactttaccagggaccacgtcccgaggggtgtcagaaaggaaagccagcttgccggccgaatcgtgcaggaaaatgggtgtgaaacccacaaccaaacagcccgcggcttctgcctgagaccccacgccctctcggtggatgatgtgttccagggagctgactgggagaggcctggaagcccaccctcttatgaagaggccatgcagggcccggcagccagactagtggcctccgagagccagaccgtggggagcatgacggtggggagcatgagggcgaggatgctggaggcgcactgcctcctaccccctcttccacctgctcaccacgtagaggactcaagacacaggggcagcaaagagccactccctggccacggactctctcccctgcctgagcgatggaaacagagcagaactgtccatgcttctggggactctctggggcacgtgtctggcccagggagacctgagctcctcccgctgaggaccgtctccgagtccgtgcagaggaataagcgggactgtctcgtgcgacgatgtagccagccggtctttgaggctgaccaattccaatatgccaaagaatcgtatatttaggagggaggccatacgccatgccatagcttgtgctatctgtaaatatgagacttgtaaagaactgcctgtagattgtttttaaaaggtcttgaataagctccttgagaaagttgtggaaagccctcctcagtgaggatagctacaccatggccatggcgcatcagatagtctctgtgtacctggatttgtgcaatatgtaaaaatgtatcaaatgtattatagataaggtgttaggtgcaaaggatgtctaataatccctgcacacgttttgaacttgcagtgaagtacactgctgttccttgcttcctggggcacttttctcttggttagtgtttaaaaattatcttcgcttttttaatgtggcctcaaatgtcatgccaattttcacatcttccacaaactccatttagggagaaatgtttaaatctctggtataagtttactccataccagagtaaactatatattactctatataagcagtcttgcaataactaatcaccaccatagaagaaagaaacagactgcaaggaacagagttgagtgtctggagtcatcaaaggcattaaaaactccagtaaaagctggggccgtagcaaaaatcatgaaaaacacttcaacgtgtcctttcaatcatccaattaaatgtgggtagattaatgaaaatgtattacatcaatattaactcatctatagcactttgagtatctttgtagttcatgatatcctatcctataatgtggaggtaaatgattttatatgcattgggggtcatatataaaacttcaatgtaatttcactacaataaattgccttccttatttgaaagtaaaaa

SEQ ID NO: 5897 - DNA, 1879 bp, Homo Sapiens
  NM_057161
gcttggctgtgtttatctcgttggggactaaggcgtcggttggcgcgcaacgggttctaggctgcaggcagctcgaggacccgcggccccgccccggctcggcctggcagatagcagaggcagcaggccgtgccgggggggcatgttgctgtaaccagtggcccaggggatgttacggtggacagtgcacctggagggcgggccccgcagggtgaaccatgctgcagtggctgtcgggcatcgggtatactccttcgggggttactgctctggtgaagactatgagacactgcgtcagatagatgtgcacattttcaatgcagtgtccttgcgttggacaaagctgcccccggtgaagtctgccatccgtgggcaagctcctgtggtaccctacatgcgctatggacactcaaccgtcctcatcgacgacacagtcctcctttggggcgggcggaatgacaccgaaggggcctgcaatgtgctctatgcctttgacgtcaatacgcacaagtggttcacaccccgagtgtcagggacagttcctggggcccgggatggacattcagcctgtgtcctaggcaagatcatgtacatttttgggggctacgagcagcaggcggactgtttttccaatgacattcacaagctagataccagcaccatgacatggactcttatctgtacaaagggcagccctgcacgctggagggacttccactcagccacaatgctgggaagtcacatgtatgtctttgggggccgtgccgaccgctttgggccattccattccaacaatgagatttactgcaaccgcattcgagtctttgacaccagaactgaggcttggctggactgtcccccgactccagtgctgcctgaggggcgccggagccactcggcctttggctacaatggggagctgtacatctttggtggttataatgcaaggctgaaccggcacttccatgacctctggaagtttaatcctgtgtcctttacctggaaaaagattgaaccgaaggggaaggggccatgtccccgccggcgccagtgctgctgtattgttggtgacaagattgtcctctttgggggtaccagtccatctcctgaggaaggcctgggagatgaatttgaccttatagatcattctgacttacacattttggactttagccctagtctgaagactctgtgcaaactggccgtgattcagtataacctagaccagtcctgtttgcctcatgatatcaggtgggagctgaatgccatgaccaccaacagcaatatcagtcgccccatcgtctcctcccatgggtaggaggaagtttctgccacctcccctcctgagcctgctgtcatcttcactgcccctgcccatctgtcacccacctgctcctttgacccctggacttggtatacctccatgtggagttgttgggcgagaggtgttctctgtgctgtgaattcagtggggagctgtagcggggtgggggctaggttcctccccccttgggccgagggccccttccccttggtgctctgtccccatccacctcctttcagctgctcctgggcctcagctctgcccagggccagccaggttctgctgggaagggaagggaatggggagaagggagaagcaagcagtgtctgagcctcaggagcttccccctccccctttgcctatcccctcccctctgcttgagccttgagccttgactgggagctgaaaggagttgcagctgttggcatgagacctccttctccccgtcttggggaggtggggaccagcagataaatcccacccttccttgagctgtcgctgtactctgaagttcagccagctcagattttataaaaattaattaaaatctccaaa

SEQ ID NO: 5898 - DNA, 4088 bp, Homo Sapiens
  NM_057165
aagccctgactggtatccctggccccagtccagtttggagctcagtcttccaccaaaggccgttcagttctcctgggctccagcctcctgcaaggactgcaagagttttcctccgcagctctgagtctccacttttttggtggagaaaggctgcaaaaagaaaaagagacgcagtgagtgggaaaagtatgcatcctattcaaacctaattgaatcgaggagcccagggacacacgccttcaggtttgctcaggggttcatatttggtgcttagacaaattcaaaatgaggaaacatcggcacttgcccttagtggccgtcttttgcctctttctctcaggctttcctacaactcatgcccagcagcagcaagcagcacaagactctgctgacattattttccttattgatggatcaaacaacaccggaagtgtcaatttcgcagtcattctcgacttccttgtaaatctccttgagaaactcccaattggaactcagcagatccgagtgggggtggtccagtttagcgatgagcccagaaccatgttctccttggacacctactccaccaaggcccaggttctgggtgcagtgaaagccctcgggtttgctggtggggagttggccaatatcggcctcgcccttgatttcgtggtggagaaccacttcacccgggcagggggcagccgcgtggaggaaggggttccccaggtgctggtcctcataagtgccgggccttctagtgacgagattcgctacggggtggtagcactgaagcaggctagcgtgttctcattcggccttggagcccaggccgcctccagggcagagcttcagcacatagctaccgatgacaacttggtgtttactgtcccggaattccgtagctttggggacctccaggagaaattactgccgtacattgttggcgtggcccaaaggcacattgtcttgaaaccgccaaccattgtcacacaagtcattgaagtcaacaagagagacatagtcttcctggtggatggctcatctgcactgggactggccaacttcaatgccatccgagacttcattgctaaagtcatccagaggctggaaatcggacaggatcttatccaggtggcagtggcccagtatgcagacactgtgaggcctgaattttatttcaatacccatccaacaaaaagggaagtcataaccgctgtgcggaaaatgaagcccctggacggctcggccctgtacacgggctctgctctagactttgttcgtaacaacctattcacgagttcagccggctaccgggctgccgaggggattcctaagcttttggtgctgatcacaggtggtaagtccctagatgaaatcagccagcctgcccaggagctgaagagaagcagcataatggcctttgccattgggaacaagggtgccgatcaggctgagctggaagagatcgctttcgactcctccctggtgttcatcccagctgagttccgagccgccccattgcaaggcatgctgcctggcttgctggcacctctcaggaccctctctggaacccctgaagttcactcaaacaaaagggatatcatctttcttttggatggatcagccaacgttggaaaaaccaatttcccttatgtgcgcgactttgtaatgaacctagttaacagccttgatattggaaatgacaatattcgtgttggtttagtgcaatttagtgacactcctgtaacggagttctctttaaacacataccagaccaagtcagatatccttggtcatctgaggcagctgcagctccagggaggttcgggcctgaacacaggctcagccctaagctatgtctatgccaaccacttcacggaagctggcggcagcaggatccgtgaacacgtgccgcagctcctgcttctgctcacagctgggcagtctgaggactcctatttgcaagctgccaacgccttgacacgcgcgggcatcctgactttttgtgtgggagctagccaggcgaataaggcagagcttgagcagattgcttttaacccaagcctggtgtatctcatggatgatttcagctccctgccagctttgcctcagcagctgattcagcccctaaccacatatgttagtggaggtgtggaggaagtaccactcgctcagccagagagcaagcgagacattctgttcctctttgacggctcagccaatcttgtgggccagttccctgttgtccgtgactttctctacaagattatcgatgagctcaatgtgaagccagaggggacccgaattgcggtggctcagtacagcgatgatgtcaaggtggagtcccgttttgatgagcaccagagtaagcctgagatcctgaatcttgtgaagagaatgaagatcaagacgggcaaagccctcaacctgggctacgcgctggactatgcacagaggtacatttttgtgaagtctgctggcagccggatcgaggatggagtgcttcagttcctggtgctgctggtcgcaggaaggtcatctgaccgtgtggatgggccagcaagtaacctgaagcagagtggggttgtgcctttcatcttccaagccaagaacgcagaccctgctgagttagagcagatcgtgctgtctccagcgtttatcctggctgcagagtcgcttcccaagattggagatcttcatccacagatagtgaatctcttaaaatcagtgcacaacggagcaccagcaccagtttcaggtgaaaaggacgtggtgtttctgcttgatggctctgagggcgtcaggagcggcttccctctgttgaaagagtttgtccagagagtggtggaaagcctggatgtgggccaggaccgggtccgcgtggccgtggtgcagtacagcgaccggaccaggcccgagttctacctgaattcatacatgaacaagcaggacgtcgtcaacgctgtccgccagctgaccctgctgggagggccgacccccaacaccggggccgccctggagtttgtcctgaggaacatcctggtcagctctgcgggaagcaggataacagaaggtgtgccccagctgctgatcgtcctcacggccgacaggtctggggatgatgtgcggaacccctccgtggtcgtgaagaggggtggggctgtgcccattggcattggcatcgggaacgctgacatcacagagatgcagaccatctccttcatcccggactttgccgtggccattcccacctttcgccagctggggaccgtccaacaggtcatctctgagagggtgacccagctcacccgcgaggagctgagcaggctgcagccggtgttgcagcctctaccgagcccaggtgttggtggcaagagggacgtggtctttctcatcgatgggtcccaaagtgccgggcctgagttccagtacgttcgcaccctcatagagaggctggttgactacctggacgtgggctttgacaccacccgggtggctgtcatccagttcagcgatgaccccaaggtggagttcctgctgaacgcccattccagcaaggatgaagtgcagaacgcggtgcagcggctgaggcccaagggagggcggcagatcaacgtgggcaatgccctggagtacgtgtccaggaacatcttcaagaggcccctggggagccgcattgaagagggcgtcccgcagttcctggtcctcatctcgtctggaaagtctgacgatgaggtggacgacccggcggtggagctcaagcagtttggcgtggcccctttcacgatcgccaggaacgcagaccaggaggagctggtgaagatctcgctgagccccgaatatgtgttctcggtgagcaccttccgggagctgcccagcctggagcagaaactgctgacgcccatcacgaccctgacctcagagcagatccagaagctcttagccagcactcgctatccacctccaggtgagatgggggcgtcggaggttctccttggagcattttccatatgaaaaataacaggctcaaaggccatggtactcataataaattaaattaaaataaaggttgtatgcccttaaaaaaaaaaaaaaaaaaaaaa

SEQ ID NO: 5899 - DNA, 5554 bp, Homo Sapiens
  NM_057175
tgttcagttaccacgtgaaccgccgacggagacccgtagtgggggaggcggcggcagcgttaagtgagaaaggaaaaaagacaacgaggaaaaaggaggtgtccgggtagggcaacgcggcgacacccgaggcctggtggtggcggcggatcgagatattcaaggctgaagcagctacggaacggcagcggcggcggtcggacaaactgactgaccgagccgggtggtggcgggagcagcgggagcagccggaacgatgccggccgtgagcctcccgcccaaggagaatgcgctcttcaagcggatcttgaggtgttatgaacataaacagtatagaaatggattgaaattctgtaaacaaatactttctaatcccaaatttgcagagcatggagaaaccttggctatgaaaggattaacattgaactgtttggggaaaaaggaagaagcttatgaattggttcgtagaggtttgagaaatgacttgaagagtcatgtgtgttggcacgtttatggccttcttcagaggtcagacaagaagtatgatgaagccattaagtgttacagaaatgcactaaaatgggataaagacaatcttcaaatcttaagggacctttccttactacagattcaaatgcgagatcttgagggttacagggaaacgaggtatcagttacttcagcttcgacctgcgcagagagcatcatggattggttatgctattgcttaccatttattagaagattatgaaatggcagcaaagattttagaagaatttaggaaaacacaacagacatcccctgacaaggtggattatgaatatagtgaactactcttatatcagaatcaagttcttcgggaagcaggtctctatagagaagctttggaacatctttgtacctatgaaaagcagatttgtgataaacttgctgtagaagaaaccaaaggggaacttctgttgcaactatgtcgtttggaagatgctgcagatgtttatagaggattgcaagagagaaatcctgaaaactgggcctattacaaaggcttggaaaaagcactcaagccagctaatatgttagaacggctaaaaatttatgaggaagcctggactaaatatcccaggggactggtgccaagaaggctgccgttaaactttttatctggtgagaagtttaaagaatgtttggataagttcctaaggatgaatttcagcaagggttgcccaccagtcttcaatactttaagatcattatacaaagacaaagaaaaggtggcaatcatagaagagttagtagtaggttatgaaacctctctaaaaagctgccggttatttaaccccaatgatgatggaaaggaggaaccaccaaccacattactttgggtccagtactacttggcacaacattatgacaaaattggtcagccatctattgctttggagtacataaatactgctattgaaagtacacctacattaatagaactctttctcgtgaaagctaaaatctataagcatgctggaaatattaaagaagctgcaaggtggatggatgaggcccaggccttggacacagcagacagatttatcaactccaaatgtgcaaaatacatgctaaaagccaacctgattaaagaagctgaagaaatgtgctcaaagtttacaagggaaggaacatcagcggtagagaatttgaatgaaatgcagtgcatgtggttccaaacagaatgtgcccaggcttataaagcaatgaataaatttggtgaagcacttaagaaatgtcatgagattgagagacattttatagaaatcactgatgaccagtttgactttcatacatactgtatgaggaagattacccttagatcatatgtggacttattaaaactagaagatgtacttcgacagcatccattttacttcaaggcagcaagaattgctatagagatctatttgaagcttcatgacaacccccttacagatgagaataaagaacacgaagctgatacagcaaacatgtctgacaaagagctaaagaagctacgtaataaacaaagaagagctcaaaagaaagcccagatagaagaagagaaaaaaaatgcagaaaaagaaaagcagcagagaaatcagaaaaagaagaaggatgatgatgatgaggagataggaggtccaaaagaagaacttattccagagaaactggccaaggttgaaactccattggaagaagctattaaatttttaacaccgttgaagaacttggtgaagaacaagatagagactcatctttttgcctttgagatttactttaggaaagaaaagtttcttttgatgctacaatcagtaaagagggcatttgctattgattctagtcatccctggcttcatgagtgtatgattcgtctctttaatactgcagtgtgtgaaagtaaagatttatctgatacagttagaacagtattaaaacaagaaatgaatcgtctttttggagcaacgaatccaaagaattttaatgaaacttttctgaaaaggaattctgattcattgccacacagattatcagctgccaaaatggtatattacttagatccttctagtcagaagcgagctatagagttggcaacaacacttgatgaatctctcactaacagaaacctccagacatgtatggaggtattggaagccttgtatgatggtagcctaggagactgtaaagaagctgctgaaatttatagagcaaattgtcataagcttttcccttatgctttggctttcatgcctcctggatatgaagaggatatgaagatcacagttaatggagatagttctgcagaagctgaagaactggccaatgaaatttgaacatcactaaacaagcaaatggaatgactttggaccatatctagtatataatatttttgtcacgcacctgctgcattgctctaacttacacagaatgagaggagtaaatgttcttgccttcaaatagtgttttacgttttttatcctgctgaaaaagtatatataaaatatctaacattacaggatagaggttcagtttcttaaaaaattaaagctgctaaaattgagtggttaaaaaagataccttatcctattcctccccacccacccatgtttttaaactaatttatataaaatctggaggctgttacagctaacaaagcaggtgtgtggcagaaatattactttaaatttgtcttgtgagattttactatatctcagacagcataaatgctgttttagcactggattctttcactgagcacaaagagttgttggggctttagcatctgactgattttgttacggggttgattctgaccataggaagtatgcaatgtgaatcactatttacagagaaacctacaacagatgcttgatgttgtagaaactgggacatatagataccaagcaaaattataagaaacctataaggtgttcaatacgcttgtgtttccaaaattcactgtacatgatcagtttggtgttcttgtaccacagtttttaactgaaggaaccagttgtaacagtctcaattttaactaaaacttgaagaactaaaacaacaatgcaaacctttcagcattgtttggccaaacttgttaaaactgtaatgcaagaaccaaatgcactgtgatgtggcaccaactaattagcaagcatgaatttttcacccaagagtgaaaaaaggaaaatctaccatggcttgaagttaaagagcagaactcctgactaccattctatgactgatcaaaagactaatagttaaaaacctcagcaggccttgttcacgatatgcagaaaaaaaagtgctgcagtttagatacctctggaatttttccacagtgtcacaggtttgtaatacttgaagccctacatttctaagaatatatttcttgctcagttgtttcaggcaagcccaagactttgtaatttttaaagggcccaagattttttttttttttttttttttcaaataacagaccagcttctttttcttgcagttacagatgtaatttcctttttgttgtcaaacataaggtaccaaatatgatgcaataaattgttttgaaaaacagttgtgtgaatatttcaactaatctgtgttgggcttctgtgaaatacacaggtggaaacagaggtgcaagccagaggcaatgtaatatgctgtaaggctagtgcagatgggagctttttagaaggggctaagtgctggtgtcagggaaattccataatgaagtagaatgctgctcctgcattaagatttcattgagggcaaggctggtggcaggtactatgaatgtaattcataatttaaaaggaaaactaaaaactattttgatttgggaaaatgagccttaatttgttaaacctatacactgagaactagcctcaggcttaatattctcattgcatttgcaagatctgagcaaataagattaagtaaaacaaatcaattgtatatataattgacctttttgtggaacatgtagtttatagaaagtatactctaaagggaatttgccgaagaccttttactgattgaacagttgtgctacaatcaacttttcatagtacatgacctgcattccacatctcagtctaacagtttagtagtgatgtaaagagaagtacaaaccgaactccagtgctttgttatgttttattaactggccctgtctcaggaacatcttaacagatggcaaaaaaacaaaaactttttttcaactcctatgagtggcaactgaagttcttattgttgggaaagaacactagtcctacctctgccactaatgaggtgtttggaggaggtaccagccatataatagggggtgtatgtgtgaattttgtttaaactctactgtatattgaaatgaaattcatttatttgtcttgacaatgttcaaatgatgtagattgtcttagaatgaatattcataagtactcagaactcttaagatgcagatgccacccgtgaggagctaaattcctaatgtgtattgtattccaacccaattttactggaactattgaataaatcttttattttctttcaggtttacttgatagtggatacattggtgtcagaggaccttgactgggttcattttatgtccagacatcacccctgaaacactgtactgtactatcttgctctgagtagtatcaactggatcgtctcatatttgcctcattcatcctattaatttcaaatgatactgtgggggaaaaacagggttagaaaaacaagtggaaaaaatggagtgatgttgtaatctaaacaagtgccttatgtttattgctaagaactggtgttaccaacccttttgagaagaaagggtctcttgacctgtattaacataggaaagtaaagttctttttgtttttctttatattcagctactcttgtcatttctcgttgaaaaactaaaatctgactaggttagtttactcagctttaattagatagttgagtcatatattttcaacatttttctgtatcgtatttattatgcacaaaaataaagtgtgatctct

SEQ ID NO: 5900 - DNA, 1186 bp, Homo Sapiens
  NM_057179
ctagagtttccaaaaaagttagaataacttcctctcccggagacctcggttttgcacaagccggccttgaaatcagagcctttccagcaactccgagagcgtgtgctcggcgaccgcgggcttggccagcggcgcgcgctcggcgccccggcgcccccagccccacgcgcgccgggcgggcgccatggaggagggctccagctcgcccgtgtcccccgtggacagcctgggcaccagcgaggaggagctcgagaggcagcccaagcgcttcggccggaagcggcgctacagcaagaagtcgagcgaagatggcagcccgaccccgggcaagcgcggcaagaagggcagccccagcgcgcagtccttcgaggagctgcagagccagcgcatcctggccaacgtgcgcgagcgccagcgcacccagtcgctcaacgaggccttcgcggcgctgcgcaagatcatccccacgctgccctctgacaagctgagcaagatccagacgctcaagctggccgccaggtacatagacttcctctaccaggtcctgcagagcgacgagatggacaataagatgaccagctgcagctacgtggcccacgagcgcctcagctacgccttctccgtgtggcgcatggagggcgcgtggtccatgtccgcctcccactagcgccgcgccacccacctccggaccggcgcgccaggaggagattctgaatgatgctgccattgccagaccttctgctaccaaacagagcgaagaggaagagggggcagtgtttggtcaagacagcccacgaaacgttggcgggagtgagcacattagcaatggctaagaacatgcttgaatcatttgtaacaacccaggacagagatgccacaagaggactttggggaaaggcgaatccactcatacatcttggagttgttttttcaagttcagaaaatgaaccttcaccaaggtcttggaacatgaagcagagactctggtgctgactctatcatttgagctcctaagggtactcatgcccagtggagcatgcacaccagcaacactgccaacaccatctcggtgtcccaccccttagaggaggaagaggacacagaggggcgcccggtaataaccctcatttcctctcttccaccccaccacatcatcttaataaaacatgaaggtaaaaaaaaaaaa

SEQ ID NO: 5901 - DNA, 2613 bp, Homo Sapiens
  NM_057735
agcgggtgcggggcgggaccggcccggcctatatattgggttggcgccggcgccagctgagccgagcggtagctggtctggcgaggttttatacacctgaaagaagagaatgtcaagacgaagtagccgtttacaagctaagcagcagccccagcccagccagacggaatccccccaagaagcccagataatccaggccaagaagaggaaaactacccaggatgtcaaaaaaagaagagaggaggtcaccaagaaacatcagtatgaaattaggaattgttggccacctgtattatctggggggatcagtccttgcattatcattgaaacacctcacaaagaaataggaacaagtgatttctccagatttacaaattacagatttaaaaatctttttattaatccttcacctttgcctgatttaagctggggatgttcaaaagaagtctggctaaacatgttaaaaaaggagagcagatatgttcatgacaaacattttgaagttctgcattctgacttggaaccacagatgaggtccatacttctagactggcttttagaggtatgtgaagtatacacacttcatagggaaacattttatcttgcttacgtcactgatggtgcttgcagtgaagaggatatcttaaggatggaactcattatattaaaggctttaaaatgggaactttgtcctgtaacaatcatctcctggctaaatctctttctccaagttgatgctcttaaagatgctcctaaagttcttctacctcagtattctcaggaaacattcattcaaatagctcagcttttagatctgtgtattctagccattgattcattagagttccagtacagaatactgactgctgctgccttgtgccattttacctccattgaagtggttaagaaagcctcaggtttggagtgggacagtatttcagaatgtgtagattggatggtaccttttgtcaatgtagtaaaaagtactagtccagtgaagctgaagacttttaagaagattcctatggaagacagacataatatccagacacatacaaactatttggctatgctggaggaagtaaattacataaacaccttcagaaaagggggacagttgtcaccagtgtgcaatggaggcattatgacaccaccgaagagcactgaaaaaccaccaggaaaacactaaagaagataactaagcaaacaagttggaattcaccaagattgggtagaactggtatcactgaactactaaagttttacagaaagtagtgctgtgattgattgccctagccaattcacaagttacactgccattctgattttaaaacttacaattggcactaaagaatacatttaattatttcctatgttagctgttaaagaaacagcaggacttgtttacaaagatgtcttcattcccaaggttactggatagaagccaaccacagtctataccatagcaatgtttttcctttaatccagtgttactgtgtttatcttgataaactaggaattttgtcactggagttttggactggataagtgctaccttaaagggtatactaagtgatacagtactttgaatctagttgttagattctcaaaattcctacactcttgactagtgcaatttggttcttgaaaattaaatttaaacttgtttacaaaggtttagttttgtaataaggtgactaatttatctatagctgctatagcaagctattataaaacttgaatttctacaaatggtgaaatttaatgttttttaaactagtttatttgccttgccataacacattttttaactaataaggcttagatgaacatggtgttcaacctgtgctctaaacagtgggagtaccaaagaaattataaacaagataaatgctgtggctccttcctaactggggctttcttgacatgtaggttgcttggtaataacctttttgtatatcacaatttgggtgaaaaacttaagtaccctttcaaactatttatatgaggaagtcactttactactctaagatatccctaaggaatttttttttttaatttagtgtgactaaggctttatttatgtttgtgaaactgttaaggtcctttctaaattcctccattgtgagataaggacagtgtcaaagtgataaagcttaacacttgacctaaacttctattttcttaaggaagaagagtattaaatatatactgactcctagaaatctatttattaaaaaaagacatgaaaacttgctgtacataggctagctatttctaaatattttaaattagcttttctaaaaaaaaaatccagcctcataaagtagattagaaaactagattgctagtttattttgttatcagatatgtgaatctcttctccctttgaagaaactatacatttattgttacggtatgaagtcttctgtatagtttgtttttaaactaatatttgtttcagtattttgtctgaaaagaaaacaccactaattgtgtacatatgtattatataaacttaaccttttaatactgtttatttttagcccattgtttaaaaaataaaagttaaaaaaatttaactgcttaaaagtaaaaaaaaaaaaaaaaaaa

SEQ ID NO: 5902 - DNA, 1353 bp, Homo Sapiens
  NM_058163
taatggcgggcgctgcagaagatgcgcgagctcttttccgggctggggtctgcgcggccctggaggcctggccggccttgcagatcgctgtggagaatggcttcgggggtgtgcacagccaggagaaggccaagtggctggggggtgcagtggaggattacttcatgcgcaatgctgacttggagctagatgaggtggaagacttccttggagagctgttgaccaacgagtttgatacagttgtggaagacgggagtctgccccaggtgagccagcaactgcagaccatgttccaccacttccagaggggtgatggggctgctctgagggagatggcctcctgcatcactcagagaaaatgcaaggtcacagccactgcacttaagacagctagagagactgatgaggatgaagatgatgtggacagtgtggaagagatggaggtcacagctacgaatgatggggctgctacagatggggtctgcccccagcctgaaccctctgatccagacgctcagactattaaggaagaggatatagtggaagatggctggaccattgtccggagaaaaaaatgagtggggatgattggaaatggctttgggcccttatttgctgttctaagagttgtctgtaggggttttttttttgaggattgcagacctgtggactggttaccccatctccaccctctcccctgttcctctgtctggctccctccagggcaaggaaaacctagggtccttggtcttgggggtggggggaccttttccagcatattcccctgggcctttagttaacatccgagtgacgaagccgggttccccagtacagtgtcttttgggtgcggtcattgtgaggaaggggatgagtgagtgtgggtgtggctggaggaggagctagatgccggtggacagtgggcaggtggatttggggaggagaggatcagcagcagcagcagtactcagtgatagggggctggctgggtcaggaatggtgagatgaacatgcaagtggaagagagaatagttgaaaatgtgaatgaaagtagctctggagcctctcccttaccccaccccacacacacgcaacagctctgtacccctgcccagaacttggaacctcccaggaatgctgccttccttcagcccagcctccagtcctgggttccctcaggaattcgaagaccttggctaggtggtgagcttggaagagctgggctttgttttctgtctcctctaacctctttccttactccttatcccatcccatttgagttcaggggtgaggcttaagatcttaataaataataccttactgcttaaaaaaaaaaaaaaaaaaaaaaaaaaaaaa

SEQ ID NO: 5903 - DNA, 8058 bp, Homo Sapiens
  NM_058172
agtcatcttcaactcggcaggaacccacaagtgtgcatgtgtggctcggaggcttcagctggggccccgccctcgtccccaggcgcacactgacacacgcagcccagacccggcccgagcgggctcctgccctcggcgtggcttctctccagccgggagtcccagggccagctagcctcctcccctaaaggggacggcctgtcagcgcagtgccagagtccagcaccgggaggaaagtttcggagtgcggagggagttggggccgccggaggagaagagtctccactcctagtttgttctgccgtcgccgcgtcccagggaccccttgtcccgaagcgcacggcagcgggggggacttcagccctccaggcggggtgggttccaggtccgggtccgaggcgggcgctggaggctcggccccaggccggagaggaactcctttcgcgagctgtcgccgtgggcccgcattgtctgcaggaactctccggaatcgggagggggaggactggatcgcgcttccactgggattcgtcaagagttccggcggcagctgcggcggtggcggagactccctttgtcctctcaggacctccctctctccctccctgtcagctggtgggtcccgctgccgcaggcgccggcgtctcagctgctcgccgccccccaccccagagtgcgtgccgggtgactcccgccacctttgcgaccctcctgagcttaggggactgcgagcgggagggagtctcaggcccccggccgcaggatggtggcggagcggtccccggcccgcagccccgggagctggctgttccccgggctgtggctgttggtgctcagcggtcccggggggctgctgcgcgcccaggagcagccctcctgcagaagagcctttgatctctacttcgtcctggacaagtctgggagtgtggcaaataactggattgaaatttataatttcgtacagcaacttgcggagagatttgtgagccctgaaatgagattatctttcattgtgttttcttctcaagcaactattattttgccattaactggagacagaggcaaaatcagtaaaggcttggaggatttaaaacgtgttagtccagtaggagagacatatatccatgaaggactaaagctagcgaatgaacaaattcagaaagcaggaggcttgaaaacctccagtatcataattgctctgacagatggcaagttggacggtctggtgccatcatatgcagagaaagaggcaaagatatccaggtcacttggggctagtgtttattgtgttggtgtccttgattttgaacaagcacagcttgaaagaattgctgattccaaggagcaagttttccctgtcaaaggtggatttcaggctcttaaaggaataattaattctatactagctcagtcatgtactgaaatcctagaattgcagccctcaagtgtctgtgtgggggaggaatttcagattgtcttaagtggaagaggattcatgctgggcagtcggaatggcagtgttctctgcacttacactgtaaatgaaacatatacaacgagtgtaaaaccagtaagtgtacagcttaattctatgctttgtcctgcacctatcctgaataaagctggagaaactcttgatgtttcagtgagctttaatggaggaaaatctgtcatttcaggatcattaattgtcacagccacagaatgttctaacgggatcgcagccatcattgttattttggtgttactgctactcctggggatcggtttgatgtggtggttttggcccctttgctgcaaagtggttattaaggatcctccaccaccacccgcccctgcaccaaaagaggaggaagaagaacctttgcctactaaaaagtggccaactgtggatgcttcctattatggtggtcgaggggttggaggaattaaaagaatggaggttcgttggggtgataaaggatctactgaggaaggtgcaaggctagagaaagccaaaaatgctgtggtgaagattcctgaagaaacagaggaacccatcaggcctagaccacctcgacccaaacccacacaccagcctcctcagacaaaatggtacaccccaattaagggtcgtcttgatgctctctgggctttgttgaggcggcagtatgaccgggtttctttgatgcgacctcaggaaggagatgagggccggtgcataaacttctcccgagttccatctcagtaaaagggaagcaggaagaccaagaaggtacgaagatggcacattttcacatagctgattttcaaccaaatgaaaaaaatcaagtgcatttcagaagcttttggaagagcagcttaattcctctcagtcgggaaatgttttctctgccttctgctttgcttgcaccaaacatttctaaacacttgttctgccatctacatgggaggtgatgaaactcagtggtaactcatgatttatgacattgaaaataaagaggaacattgacctgcagactatggtttgtacaagaaagtttgtttgaatgtgtagaagaggaaaaagcaacaacagcaacaacacgaagatgataccaaaacaaggaccacaaaacaactagccatgatgggagacaggagttttttacatggaaacatggcacttgtgtttttatgtggcaagatctttatccataggcagagtatgaaatttcccaccaggctaagcaaataaagaagtccattgccttatagctatgtcagatcacagaatccttccaagtgctctatcacagtgtgccttatgggaagtttctgactggaaaatcttgtcattctaacactgaaaagtgcacacgcatgacaaaatgtagacaagatgcctcaaggtattggtagcaagcaagattttgccctttagttttcgaagacacctttctttcattatgcactcgggacaagaaaattaatagagcgttattccacagaaggcctctagccagagatcttgagtgtagtgcaagggactcattttttgcgaacttgtccctgtgactagtagattcccccttttcctgtgtttaggatttagtagtgcataaagcattaatatccataaacatacctagaagtttgttttgcttttaatttaaaggaagcagtaaccacaaagcttccgctcagggttttttctttcttcaagtctccaagggctcttcagcgtcacaagccagcaactctctttgcattaaaatttcaaagtttaattaatataattaaaagcaacagcaagcagcagcctgtgaagattttgctcatcttttttatgccttttgacattgaatgacctattactgtatgcgcattacttggattttgaggggcactctaccttggttatgattcagtagaggaaaaagaccacctttcttcaatttacaaattaaatcttctggagggtcgctatcacaaaacattgacgatgtatgtattataattttttagaaaaaccaccatcgtgtcacgtcgacgatgccaaattatgttagcgtgagcagaaacaccgtgggggaggaaggcagcagctgaagaaaaaagctcaaatgatctagtcactttcgatactgtacttcagatgcgaaatggatattcgagtggaaacctgacaaagtgcgcctgctttgatgtgaactggtatagacaatgaccagtggctgggtcagtgggatgtctctctgtgagcacaaaggcttatcaaatgacactaaaaataagttcaacaaccatcacattggaagggagaaggcgaacatttcatgtttggcgggcatgtgagtgcacaagatggaaagagcgattggagcatcctggtataattacccccattgtgctcttaatggaaatttcaaaggacgggagtattctgttggttggtgtccaggtttgtggcactgttccaagaggccttacacacacacacaaatatataattttctatacatatatatcctctagcttgaaacttttgctcaagtttatttatgtcactggctggctggatccaaagtcatgtgtccacacattcataaataaaaattttacctatgcctgtgctaccatttctttaagcccacataaagctaatgccttcttgggttgaatatgcagttgttatgcttagtttcagggatggaattctattcagttccaaaatgtccctcatgttcacagatgatactattggcagtagctgcatatgcaagtgtaacttggaagcctgatatagtatacccaaccctttctgcaatgagttattgtatccctttgttctgcatttgcatctggaacaagacctaatgtggcttccttaaatgggcacttcatttctgatgagtgcacaccaattattgctattttaatatcattgagaatactacagaagctaaggctatgtttctttggtaactacttcaaatttctctagaattatgtagcatacttacattttgctgcatgaacaatgaaaattaacctctgcctttaaatggaaaaataactttctgtagattgttatacagctactatgaagagctcttaatgaagaggaagtggcagtggtctatatgtagactgaaaaaatatcattaataaagttcaaagactgatggaatttcattgcccttaaagatatgaaccagatctgttttatgcttttctccaattatactaactagcagttgaaaagaatttgttttgaagagtgttattttcttaccaaaagaccagatcaaaaatccctatacttttccaccaaaaaaagattaaaatgaagccatttctataaatttaatggcactttatattttatatagagaaatagcttctgtttgattttctggacaccatgtcagtcaagatctactttctgtgtaaaaatgaataagtcttgcacataatccattcgtgttgcataaggttgcaaaaacaattaagtgggaaatgactcctaacttatgtgtctactctgcctagaaagaaagttttgaaggcatctatatatatttcataacaatgtctgttctttatggatttgatccataaatatttatctatctgaaaactttgatacttggaatgttttccttagagcatttggtgctccaagaaaaaacatttggtgctaagagttgcagcactgatgcctttccctaagttaattctattttaaaaatttatatttccttcccaatgagatgcagagtaaaatttgagaccctccattgactagggagcagcatctgtcatctatggttaattactattttgacaaaaatatagaaggtttaaacccccatgtatttcagattgttagagaaagaagtagtttgcttatatttcccttgaactttattctaaccatttaaataataaattattcaatatttgttataataaatccttactagatacaagatttgggtgtttctgtgaagttaactttattatctaaatatcactaaccattgtttactgctcagaggcagatacatttgtttagtttaaagttgaaacaaattctatattgtggataattaggtgtttaaaacattttgatagaccagcttatatatgttatttttgaaatttaagaaggcagaatgtaattaggtcacatttacaagtagaaggaattataacttcctactccatgcatatattgtatattggttagcttttactagcattttctagcatcacattactttagaaagtttttgagagtttcattactactggaaaagtttggtgggtatatgtacacaggaaagaaatatatgcatcatttcaatatgaaaggaaatacataatctagaaacatagaataactcttggtacatctgttacatagttaaggaaagaaacaggcaggtgaggctggagaatgttgtctatttgtaggaaataaagtcagtgcagacgcatattctagtttagagttagattaatattgtgcttagtgaatttctatgacatatttctgagaacactttaatatatttccacacctactggaatctaattcagtcgatcggataaaagaaagacttttttgttgttgtttttgaaaatccataatgtagcaggttctgcgctggttttttaatgtattttatttttgtgctctcctgccaaaagaaaaggctgataagtaagtacacagtacaacatgtaaatttgtataaaaatatgcttgtttagattgctctacaataactatattaaggtaaattgtgtgtgtgtgtgtgagagagagagagagagagagaaacagagggagaattgactcaatgtgttttctatgaagagtcttagcttaggaatcaggtaacagagaggtcctagaccatagacccagccatcaactagcttgctgatgttgaacagatcaactctcaaccatagactgaagatggaatgaagatatcaaaagttccttttagcactgactagattttttttcttttttttgaaacagagtctcactctgtcacccaggctggagttcaatggcatggtctgggctgactgtaacctcctcttcctgggttcaagtgattctcatccctcagcctcctgagtagctgggattacaggcacataacaccacacccagctaactcttgtatttttgtagaaatggggtttcgctatgttgctcagactggtctcaaacacctggcctcaagtgatcctcctgcctcagtctcccaaatgctgtgattacaggcacaagctactgcaccaggcctctgactacatttctattaatatggttaggttggaggttttagtatttttgtatctcatatttgtatcaatatgactggcttctttgtctgtagtgtgtggtaatattagttctgtaaactgtcagttgcaaaaaaaaaaaataccttgaactatagtatatgttgataattagccataataatttcttagttaatttcttataattaaatttgtcaaagaggaaacttacagtttatatctgatgaaatctctaaaaagatgggtaaaacattgggaaatgtatgcatgtacttcactctggtttcatagggttagcaagtgtcttaaaaacatatataaagaagcacagagattgttaggagatatttatgctcccagttttaataattgggatactttgtataccacagaaagaaaaattactaaactcctctttttttagtcaaaattggaaaaaaagtcttaattgacagttactatgcctgtgctacccatagcaagtattcagtggaaaatactttactaagtaagtaatttgaacacagcttaaaatccatagtatgttacaattgctagcctttcacaaagtttgcattgtcttaatgtagaaggatactgtgatctaagaattcacaattttaaaaagtggaacctaaatagggtttcctaattgccatgaagttatttgtatcttagatgaattatatttacaacattgtaaatgtcagtgggtgatccaaaataaattgttaaagttattaaaatgtacatttaagtaggtttcagtttgactagaaataattggcaagaaggcaagaactagtcttctagagcagggatcccatcccccaggtcatggactggtactggtccatggcctgttagaaaccaggccacacagcaggagatgagtggaaagcaagtgaaacttcatgggtatttacagcaattccccgtcgctcgcattaccacctgagctgtgtctcctgtgagatcagcagcagcattagattctcaaggagcacaaacccttttggaactgtgtgtgagggatctaagttgcgcatttcttatgagaatctaatacctgatgatctgttgttgtctcccaccacccccagatgggaccatctagttgcaggaaaacaagctcaggctcccactgattctacattatagtgagttgtgtaattatttcattatatataacaatgtaataataatagaaataaagtacataataaatgtaaaaaaaaaaaaaaaaaa

SEQ ID NO: 5904 - DNA, 1058 bp, Homo Sapiens
  NM_058181
tggcggggcttccggtcgggagggtccgcccgctctcgcgtcctttgctgggtccagacaccggtacgtccgggcgggtttttagtctcccaagcgagagcgtcgcattcacccgcgtgggtctgcgggcgccccagaccccagaggacccggcccccaacgcttacctgtcccctctcctgtccctcccccattccagccccttctctccccagccgttgcccctccccgcaccccgccgcgtccgcgcgcctctctccgcgcgcacccccaacccgcccccttttctctgggaaccgctccttccgctccgcccgcctggagtccttctggccggattccgcggcatccttccatagaccctcgttgttgcttcctccttgtggttccgttgcaaacatttttaaagggctggttattcttcctgaaatgagtttggtgattagaaatctgcagcgagtcatccccatcaggagagcgccacttcgcagtaagatcgagattgtaaggaggattttaggagtgcagaaatttgacctggggatcatctgtgttgacaacaagaatattcagcacattaatagaatctacagagatagaaatgtcccaaccgatgtgctttcttttccatttcatgagcatctgaaagcaggtgaatttccccagcctgattttccagatgactacaatttgggagacattttcctaggagtggagtatatcttccatcagtgtaaagaaaatgaagattacaatgacgtcctgactgtgacggccacccacggactctgtcacttgctgggattcacacacggcacggaggcagagtggcagcagatgttccagaaggagaaggcggtgctggacgagctgggccgacgcacggggacccggctgcagcccctgacccggggcctcttcggagggagctgagggccgcgttccttctgaaagcgggacgcgggaggggtggaggctgcggggagccggggtcgcacacgaataaataacgaatgaacgtacgaggggaacctcctcttatttccttcaaaaaaaaa

SEQ ID NO: 5905 - DNA, 917 bp, Homo Sapiens
  NM_058182
ggcccactgcgcctgagcacgtagcggtgcatttcgggacctgtagttttccccggcaggacggtagaagtcgtggtttgtgcgcggccaggcgctggagcctccgctgccgggagcaatcagaccttccagctgcctctcatgtacttgtctgttgggggcttgtgttgatcaggagtgaattcacagtctaccatgaattggaaggttcttgagcacgtgcccctgctgctgtatatcttggcagcaaaaacattaattctctgcctgacatttgctggggtgaaaatgtatcaaagaaaaaggttggaggcaaaacaacaaaaactggaggctgaaaggaagaagcaatcagagaaaaaagataactgaagattctgccatgtaaatgtcagcttgagtggactccagctgagaagaaagagaagaaagacttaattattgaataatttgtcagaggataaactcccaacctagacctttcacttaaaatagtgtgaatttgtatatgtttttaaaagaaccagtactggccgggtatgctggcttttacctgaaatcccagcactttgggaggccgaggcgagtggatcgcctgagatcgggagtttgagaccagcctggccaacatggtaaaatcctgtctctactaaaaatataaaaattagccaggtgtagtggcgcgcgtctgtaatcccagctactcgggaggctgaggcaggagaattgcttgaatccgggaggtggaggttgcagtgagcctaggtcgtgccactgccctccagcctgggtgacagagcgactgcgtctccaaaaaaaaaaaggtaaaattaaaattaaaaaaaataataataaccagtattttgtttactaaaataaaatgcctttgtaaaaaaaggaaaaaaaaaaaaaaaaaa

SEQ ID NO: 5906 - DNA, 1977 bp, Homo Sapiens
  NM_058187
ggaaggcgctcaaggtgcgcggcccggggcgcgctactgggggcgccctccgcggtgggcagcgcgccagggatcggcctgggcagccgcggggcgcgcgaaggctgcgctttccctacggcccccctcgcttcctccggcacggcggcaacggagatttcctctcggggaaactacgcggatccttttcggggatcctcgccccgccccagttctccgccccctcccctttgctggggcgcctgggctggcccgcgcaggggaggaggctctggcagcctgggcagggaggcggcggggggccgcggagccgctggccatcgattctccccgccatgtgacgccgtccttagccctgcgacccccagcgcgtcccgggcctgcgcctccgccccgccgcgcagcgcacgatgcttctgccgggacgcgcacgccaaccgccgacgccccagcccgtgcagcatcccggcctccgccggcaggtagagccgccggggcagctcctgcgcctcttctactgcactgtcctggtctgctccaaagagatctcagcgctcaccgacttctctggttacctaaccaaactcctgcaaaaccacaccacctatgcctgtgatggggactatttgaatctacagtgccctcggcattctacgataagtgtccaatcggcattttatgggcaagattaccaaatgtgtagttcccagaagcctgcctcccagagggaagacagcttaacctgtgtggcagccaccaccttccagaaggtgctggacgaatgccagaaccagcgggcctgccacctcctggtcaatagccgtgtttttggacctgacctttgtccaggaagcagtaaatacctcctggtctcctttaaatgccaacctaatgaattaaaaaacaaaaccgtgtgtgaagaccaggagctgaaactgcactgccatgaatccaagttcctcaacatctactctgcgacctacggcaggaggacccaggaaagggacatctgctcctccaaggcagagcggctcccccctttcgattgcttgtcttactcagctttgcaagtcctatcccgaaggtgctatgggaagcagagatgcaaaatcatcgtcaacaatcaccattttggaagcccctgtttgccaggcgtgaaaaaatacctcactgtgacctacgcatgtgttcccaagaacatactcacagcgattgatccagccattgctaatctaaaaccttctttgaagcagaaagatggtgaatatggtataaacttcgacccaagcggatcgaaggttctgaggaaagatggaattcttgttagcaactctctggcagcctttgcttacattagagcccacccggagagagctgccctgctgttcgtgtccagtgtctgcatcggcctggccctcacactgtgcgccctggtcatcagagagtcctgtgccaaggacttccgcgacttgcagctggggagggagcagctggtgccaggaagtgacaaggtcgaggaggacagcgaggatgaagaagaggaggaggacccctctgagtctgatttcccaggggaactgtcggggttctgtaggacttcatatcctatatacagttccatagaagctgcagagctcgcagaaaggattgagcgcagggagcaaatcattcaggaaatatggatgaacagtggtttggacacctcgctcccaagaaacatgggccagttctactgaaaaccacatgcatcttgatgcgatcgcactttctgaagaaggaaggatcccaaatgcccctccagttctggttcacctgtaccttctatgaaggagaattcgtcatgtcattcaacactcgtgaggccaggaagctattaaagggatgtttcaagctgtttctagcacattccaaaataaatgaggagggaagagtcaaaaaaaaaaaaaaaaaaaaaaaaaaaaaaaaaaaaaaaaaaaa

SEQ ID NO: 5907 - DNA, 2530 bp, Homo Sapiens
  NM_058191
ctctctctctttctccaagtattgagagcgcgtgggagcataggcgcatgcgcgctcgtggggtgcgcggtagcaacagaggactcgacccggctggagctccggagagcgcgcgtgcgccgtcacgagctcggcgctgccggggccgcggtgtggaagcgagtattcgaccgccgtgcgggccgcggggatgttccgaaaggcccggcgggtgaacgtgcgcaagcggaacgactccgaagaggaagagcgggaacgcgatgaggagcaggagccgccgccgttgttgccgccgccgggcacgggcgaagaggcgggccccggtggcggcgacagggcccctggcggggagtcgctgctgggcccggggccgtcgccgccttccgcgctgaccccgggcctcggggctgaggccgggggcggcttccccggcggcgcggagcccggcaacgggctgaagccgcgcaagaggcctcgcgagaacaaagaggtgccccgggccagcctgctcagcttccaggacgaggaggaagaaaatgaagaagttttcaaagtgaagaaatcaagttatagcaaaaagatagtaaaattgctcaagaaggaatataaagaagatcttgaaaaatcgaagattaagacagaactcaactcatcagctgaaagtgaacaacctttggacaaaacaggacatgttaaggatacaaatcaagaagatggagttatcatcagtgaacatggtgaagatgaaatggatatggaaagtgaaaaagaggaagaaaagccaaagactggtggagctttttcaaatgctttatcttcattgaatgttcttcgtccaggagaaattccagatgcagcttttatacatgctgcaaggaaaaagcgccaaatggcccgagaattgggagatttcactcctcatgataatgagcctggtaaaggccgccttgttagagaagatgagaatgatgccagtgatgatgaagatgacgatgagaaacgccggatagttttttctgtgaaagaaaagtcacaaagacaaaaaattgctgaggaaataggaattgaggggagtgatgatgatgctttagtaactggagaacaggatgaagagctcagccgatgggaacaggagcagataaggaaaggaattaatatccctcaggttcaagccagtcaacccgcagaagtgaatatgtactaccagaacacttaccagacaatgccttacggctcatcctatggcattccttatagttatacggcctatggatcatcagatgccaaatctcaaaaaacagataatacagtccctttcaaaactcccagtaatgagatgactcccgttactattgatttggtaaagaaacagcttaaagacaggttggactccatgaaagaattgcacaaaacaaatcgacagcagcatgagaaacatctgcaaagccgagtggactctaccagggctattgaaagattagaagggtcttctgggggtattggtgaacggtataaatttttgcaagaaatgcgagggtatgtccaagacttgcttgagtgtttcagtgaaaagtctgttcagttcaggaagctgctataacacttggtgccagtgttcccaaactctaaataatgtgttttccatttgcactaaccatcaggaaactagaatttctggtttcctcaggtatgtgtagtggtcattagtgttacgtgaaagtctcatagcatttgattataacataaggtatttagaaaaagaaagttttctgttttaagttagctctcatgttcttttgtattctatatgaatcaagtaaatgctttagggatattaacctggaaaaattattgactttgtaagttcacaattcatgtaaagaaatttttataaaatatgggagaatttaaacatttgacaggaagagaacaactttttaaatttgagatatattgagttcagagaggttagtgatagctggaaattttattcgccctagtaattattttgtttacattaaaaaatctgtaataaagctacaaaatagtaaacagattactgtaacgtacttggtacatatgagtggcagagcaactgaaatgtccaaaattggagaattagcagactcttgttcttacctacttatagagccattgcacttttttggtaccacacagtgataatgttttactttgaactacaaaaatcgcaatgcagataatgctgctggaaaattaaaaatagatattaaaaagacttctaagtacttaaatattctctaagggaaaagctctaaaattgttgacatttctttacttgttctatgaatactgaagtgttacatttcttaactaatgtttgctccaataactaggcactggacattatagctctatgcatggattaaaagaagaagtgtcgtttcccaaacataaaacagaatttgctacttgtgtgctgttggggattcatgattattctgtccatagagagggtactttttcagaaatccggaaatagtatggaacc

SEQ ID NO: 5908 - DNA, 2067 bp, Homo Sapiens
  NM_058192
gggcggaagcgctgccaggcgtccggagcggagcttccagggtctctgggtcgccagcgcgcgggcgcgcggctggagccggcgccgggcacggcatcgggggcctggactgcacggcccggcagcaggccggccatggagccaggcagcgtggagaacctgtccatcgtgtaccggagccgcgacttcctggtggtcaacaagcactgggacgttcgcattgacagcaaggcgtggcgggagactctgaccctgcagaagcagctgcggtaccgctttcccgagctggccgaccctgacacctgctacgggttcaggttctgccaccagctggatttctccaccagcggggcgctgtgcgtggccctaaacaaggcagccgccggcagcgcgtacaggtgcttcaaggagcggcgcgtgaccaaggcttacctggcattgctgcgggggcacatccaggagagccgggtaaccatcagccatgccattggcaggaacagcacggagggccgggcccacaccatgtgcatcgagggctcgcagggttgtgagaacccaaagccaagcctcacagatctcgtggttctggaacacgggctgtacgcaggcgatcctgtctccaaagtgctgctgaagccgctcacgggccggacacaccagctgcgcgtgcactgcagtgccctgggccaccccgtggtgggcgacctgacctacggagaagtctcgggccgggaggaccggccgttcagaatgatgctgcacgctttctacctgcgcatccccacggacaccgagtgtgtggaggtctgcacgcctgaccccttcctgccctccctggatgcctgctggagcccccacacactgctgcagtcgctggaccagctcgtgcaggccttacgggccacccccgaccctgaccccgaggataggggccccaggccaggcagcccctccgcactcctgcctgggcccggccggcctcctccacccccaaccaagccccctgagactgaggcacagcggggcccctgcctgcagtggctgtcggagtggacgctggaaccggacagctgagagccgtggggctggggcagggggtgtcagctgcacagcgggactctagggagatgggcgagcgagcgtctgctcactggctctggggcctcgaggtgccaggcagcatcaggcccactgggttgccccggccaggcctgcgaggaagggctgaggtggggccggcagggggcgccaggcagccgtgatcacaggtgacgaccgcaccgcggccgtgggactgatgcgggatcccgagggccttcctgcccacatgccccgggagaaaccgaggcccctccctcctcctggaacagcttccggctctcaagcgtcaccccaggggcgtcagttttacggactcaaggtcacctcaggaagaggcagggccaggttttgggataggctttgcctccaggatgggctgctcctgggcctggtgagctactgcccccaacctaccctctagaggggctgggaagggccgttctgggctcacctggcctgggagacccatctggtccctgcgtcctctgcccctcactgctctgtgcagatcctgtcgccctcagctgcctcctcccgagacctaatggtccctgctgggctcgagtctgcaggcccggctgcgtgtgccttggcctcactgtaccagtggttccctctctgcccggattctgagctcagtgtggtgtttggtgcacaggggttggtcaggggccatggccaaggccctgccacgcacgcccatccctcagatccactgtgagcaccaacctgctgcagtctcttgggcccctgctggcagctctgccacgtcaccgcctgcctggctcccacacagccatgcattgtcactctgcctccgggaccccagcttgggagctgtgggtctgccaggtcccacctcctctgtcccccatgccacaacctgggctcctggctacagcagggctccagggactccaaataaatgttcagtgactggctccaaggaaaaaaaaaaaaaaaaaa

SEQ ID NO: 5909 - DNA, 1295 bp, Homo Sapiens
  NM_058216
gtgcggagtttggctgctccggggttagcaggtgagcctgcgatgcgcgggaagacgttccgctttgaaatgcagcgggatttggtgagtttcccgctgtctccagcggtgcgggtgaagctggtgtctgcggggttccagactgctgaggaactcctagaggtgaaaccctccgagcttagcaaagaagttgggatatctaaagcagaagccttagaaactctgcaaattatcagaagagaatgtctcacaaataaaccaagatatgctggtacatctgagtcacacaagaagtgtacagcactggaacttcttgagcaggagcatacccagggcttcataatcaccttctgttcagcactagatgatattcttgggggtggagtgcccttaatgaaaacaacagaaatttgtggtgcaccaggtgttggaaaaacacaattatgtatgcagttggcagtagatgtgcagataccagaatgttttggaggagtggcaggtgaagcagtttttattgatacagagggaagttttatggttgatagagtggtagaccttgctactgcctgcattcagcaccttcagcttatagcagaaaaacacaagggagaggaacaccgaaaagctttggaggatttcactcttgataatattctttctcatatttattattttcgctgtcgtgactacacagagttactggcacaagtttatcttcttccagatttcctttcagaacactcaaaggttcgactagtgatagtggatggtattgcttttccatttcgtcatgacctagatgacctgtctcttcgtactcggttattaaatggcctagcccagcaaatgatcagccttgcaaataatcacagattagctgtaattttaaccaatcagatgacaacaaagattgatagaaatcaggccttgcttgttcctgcattaggggaaagttggggacatgctgctacaatacggctaatctttcattgggaccgaaagcaaaggttggcaacattgtacaagtcacccagccagaaggaatgcacagtactgtttcaaatcaaacctcagggatttagagatactgttgttacttctgcatgttcattgcaaacagaaggttccttgagcacccggaaacggtcacgagacccagaggaagaattataacccagaaacaaatctcaaagtgtacaaatttattgatgttgtgaaatcaatgtgtacaagtggacttgttaccttaaagtataaataaacacactatggcatgaatgaaaaaaaaaaaaaaa

SEQ ID NO: 5910 - DNA, 1729 bp, Homo Sapiens
  NM_058219
gcggaaggggttcgcacgccaagaaccgccatgcctggggatcaccgccgcatccgcggccctgaagaatcgcagccgccgcagctgtacgcggccgacgaggaggaggcgcccggcacccgcgacccaacgcggctacggcccgtgtacgcgcgcgccgggctgctgagccaggccaagggctcggcctacctggaggcgggaggcaccaaggtgctgtgtgccgtgtcgggcccgcgacaggccgagggcggcgagcgcggcggcggcccggccggagcaggcggcgaggccccggccgcgctgcgcggtcgcctgctctgcgacttccgccgcgcacccttcgcgggccgccggcgccgcgctcccccgggcggctgcgaggagcgtgagctggcgctggcgctgcaggaggcgctggagccggctgtgcgcctgggccgctacccgcgcgcgcagctcgaggtgtcggcgctgctgctggaggacggtggctcggccctggccgccgcgctcaccgccgccgcgctcgccctggccgacgcgggcgtggagatgtacgacctggtggtgggctgcggcctcagcctcgcgccggggcccgcgcccacctggctcctggaccccacgcggctcgaggaagagcgcgccgccgccggcctcaccgtggcgctcatgcctgtgctgaatcaggtggccgggctgctgggcagcggcgagggcggcctgacagagagctgggcggaggccgtacgcctgggcctcgagggctgccagcgcctctaccccgtgctgcagcagagcctggtgcgggccgcccgccgcaggggcgccgccgcccagccctgaaccagaagcctgagcaactacggacgcaagccgaggaccgtgctgccgccgtccacgaaaagacccgcgccatcggcctccagtttgcgtcgagaattcctggaagggccctgatatgactgtggttggactgacctgactgccagatggtgggacttggtctggagcagggactacttggaatgataaaggcaaaactcaacagcccctggagctgcgcttgtggtggagctggaccctgaaattacctggaccttttttttagagacagggtttctttctgcagtctcaaactcctagccttgattgatcctcctgccttggcctcccaaagtgctgggactacaggtgcatgcaaccacacctggctaattttcttttcttctttctttcttttttttttttttttttttttgatggagtcttgttctgttgcccaggctggagtgcaatggtgcaatcttggctcactgcaacctctgcctcctgggttcaatccattctcctgcctcagcctcccaagtagctgggattacaggcacatgcctccataccgggctaatttttgtatttttagtagagatggggtttcgccatgtgggccaggctgttctcgaatgcctgacctcaggtgatccacccgccttggcctcccaaagtgctggaattacaggtgtgagccactgtgcccagctgagtaaatttcttgattgcacagaatgtacggtgatattggcggacttaaggacatcgaattgtttatcaggaataaagtattatgtgtgttttctgcggccctggataatgctgtagcattcagggtcgattgagtaaaaaaaatgtagagatggaaaaaaaaaaaaaaaaaaaaaaaaaaaaa

SEQ ID NO: 5911 - DNA, 1530 bp, Homo Sapiens
  NM_058229
agcactcccggagcctgcaacgcttgagatcctctccgcgcccgccaccccgcagggtgccccgcgccgttcccgccgccccgccgcccccgtcgcgggcccctgcaccccgagcatccgccccgggtggcacgtccccgagcccaccaggccggccccgtctccccatccgtctagtccgctcgcggtgccatgccattcctcgggcaggactggcggtcccccgggcagaactgggtgaagacggccgacggctggaagcgcttcctggatgagaagagcggcagtttcgtgagcgacctcagcagttactgcaacaaggaggtatacaataaggagaatcttttcaacagcctgaactatgatgttgcagccaagaagagaaagaaggacatgctgaatagcaaaaccaaaactcagtatttccaccaagaaaaatggatctatgttcacaaaggaagtactaaagagcgccatggatattgcaccctgggggaagctttcaacagactggacttctcaactgccattctggattccagaagatttaactacgtggtccggctgttggagctgatagcaaagtcacagctcacatccctgagtggcatcgcccaaaagaacttcatgaatattttggaaaaagtggtactgaaagtccttgaagaccagcaaaacattagactaataagggaactactccagaccctctacacatccttatgtacactggtccaaagagtcggcaagtctgtgctggtcgggaacattaacatgtgggtgtatcggatggagacgattctccactggcagcagcagctgaacaacattcagatcaccaggcctgccttcaaaggcctcaccttcactgacctgcctttgtgcctacaactgaacatcatgcagaggctgagcgacgggcgggacctggtcagcctgggccaggctgcccccgacctgcacgtgctcagcgaagaccggctgctgtggaagaaactctgccagtaccacttctccgagcggcagatccgcaaacgattaattctgtcagacaaagggcagctggattggaagaagatgtatttcaaacttgtccgatgttacccaaggaaagagcagtatggagatacccttcagctctgcaaacactgtcacatcctttcctggaagggcactgaccatccgtgcactgccaataacccagagagctgctccgtttcactttcaccccaggactttatcaacttgttcaagttctgaatcccagcacatgacaacacttcagaagggtccccctgctgactggagagctgggaatatggcatttggacacttcatttgtaaatagtgtacattttaaacattggctcgaaacttcagagataagtcatggagaggacattggaggggagaaatgcagttgctgactgggaatttaagaatgtgaacttctcactagaattggtatggaaaagcaaaatactgtaaataaactttttttctaacaatttgccaaaaaaaaaaaaaaaa

SEQ ID NO: 5912 - DNA, 2494 bp, Homo Sapiens
  NM_058246
gagaaaggagagaaaggaaagcgcgaggagccgccgccaccaccagcgcagcagtcctggagctgtgaggagattcgggccgtcaccctgcctcccctgcgtcccgccaccggccgcttctgtcctcggacccattccaacaatctcgtaaaacatggtggattactatgaagttctaggcgtgcagagacatgcctcacccgaggatattaaaaaggcatatcggaaactggcactgaagtggcatccagataaaaatcctgagaataaagaagaagcagagagaaaattcaagcaagtagcggaggcatatgaagtgctgtcggatgctaagaaacgggacatctatgacaaatatggcaaagaaggattaaatggtggaggaggaggtggaagtcattttgacagtccatttgaatttggcttcacattccgtaacccagatgatgtcttcagggaattttttggtggaagggacccattttcatttgacttctttgaagacccttttgaggacttctttgggaatcgaaggggtccccgaggaagcagaagccgagggacggggtcgtttttctctgcgttcagtggatttccgtcttttggaagtggattttcttcttttgatacaggatttacttcatttgggtcactaggtcacgggggcctcacttcattctcttccacgtcatttggtggtagtggcatgggcaacttcaaatcgatatcaacttcaactaaaatggttaatggcagaaaaatcactacaaagagaattgtcgagaacggtcaagaaagagtagaagttgaagaagatggccagttaaagtccttaacaataaatggtgtggccgacgacgatgccctcgctgaggagcgcatgcggagaggccagaacgccctgccagcccagcctgccggcctccgcccgccgaagccgccccggcctgcctcgctgctgagacacgcgcctcactgtctctctgaggaggagggcgagcaggaccgacctcgggcacccgggccctgggaccccctcgcgtccgcagcaggattgaaagaaggtggcaagaggaagaagcagaagcagagagaggagtcgaagaagaagaagtcgaccaaaggcaatcactagaccggacttgaggcacgcggtgcacccccagacgctggcgctccaccgtgctcggcatgcggtcgtgcacacgcgctaggtagcagcgtcggtcaggactgtctcgaggccacactcgctcggcaggattatgcgatcacggatcagtcagagcagggtcaggagacggggctgacggcacgggtggcggggacagacgtttgggacttggccgcgactctctgcttctctccagctctcaatctgctgcattttcctctagtgcttccggatcctcttcattcttttcggctactcaaccactccgcatgctgctggaatatttctggctttagaagtacaggagggcgcagatggctaactgagtaacattcatgaaatgaggctttctgtggcggcgtagtgtttggaattagaaggtaattcagtagagtgtaacttagagaatattgcaagtgacacattgaatcctgcccgtcagggcaccttttcctcagagcaatccggccacacgaatagaaggctgtcgtgaatcacatcagatgtaaaatcattccttctgtttactcttttaattttcatcctttgcaggtagtgcaaattcaacttcaaatatggtgtaggttttgctagattccatatttttttcttggatttttgctaattatttttagcaaaaaatttttgctcagtggcactctccctagtgtccatgggttagggccatgctggggaaaacgggccggtatttacacacgcgcaaaacacccagagacggcacaaggaggttgaactcatgtttcagttcgcgaacattgactccttacgaaagtcacttcattctaactagatgcgcccacttccggtcattatttcgtttgcatgatgtattgcttcttcacgttttgtttttattgagcacggagtagaattccagggctgccttgacttcttccctgcatgctccctcccagtgactttccttccctttcacatgaggatctgccgttcatgttgctttctcctttgtcctcttggacttgagggcattgtgaaaagctttgctgtgatttaaaaatgccagcaattttaatctagcagtgttgaagctgggaattttttggcgcaatccatgtagcagtgacccaggcttgggagccagaaacaagtgtgacctgggattttatttaacacaactgttgccaaagagttggctttgtttatttggttttggcggggagaggagtggtatttgatgctttctgtggacaatgtaaccctaaacacatcatgtattttaaatgccacctacataaataaaacataagcatattgaatacaaaaaaaaaaaaaaaaaaa

SEQ ID NO: 5913 - DNA, 1261 bp, Homo Sapiens
  NM_078468
gcaggcgcagtgtgagcggcaacatggcgtccaggtctaagcggcgtgccgtggaaagtggggttccgcagccgccggatcccccagtccagcgcgacgaggaagaggaaaaagaagtcgaaaatgaggatgaagacgatgatgacagtgacaaggaaaaggatgaagaggacgaggtcattgacgaggaagtgaatattgaatttgaagcttattccctatcagataatgattatgacggaattaagaaattactgcagcagctttttctaaaggctcctgtgaacactgcagaactaacagatctcttaattcaacagaaccatattgggagtgtgattaagcaaacggatgtttcagaagacagcaatgatgatatggatgaagatgaggtttttggtttcataagccttttaaatttaactgaaagaaagggtacccagtgtgttgaacaaattcaagagttggttctacgcttctgtgagaagaactgtgaaaagagcatggttgaacagctggacaagtttttaaatgacaccaccaagcctgtgggccttctcctaagtgaaagattcattaatgtccctccacagatcgctctgcccatgtaccagcagcttcagaaagaactggcgggggcacacagaaccaataagccatgtgggaagtgctacttttaccttctgattagtaagacatttgtggaagcaggaaaaaacaattccaaaaagaaacctagcaacaaaaagaaagctgcgttaatgtttgcaaatgcagaggaagaatttttctatgagaaggcaattctcaagttcaactactcagtgcaggaggagagcgacacttgtctgggaggcaaatggtcttttgatgacgtaccaatgacgcccttgcgaactgtgatgttaattccaggcgacaagatgaacgaaatcatggataaactgaaagaatatctatctgtctaacccatttccaatggacagtgatgggcttgtttttgtaaaattaccagaaaactcagtggagatttactgaaaaactcagactttattcagattaagttcctctacaaaaagtagggttctgtcccatgtgtctctgacacatttacaaaataccagttttttaaaattttggtcaaattatgagtggttgatttaaaaacttttccaagaagaagaaaagcatggagtagtaatttaaagaactcaataaaaacttctattttttattttaaaataatataaaaaaaaaaaaa

SEQ ID NO: 5914 - DNA, 7689 bp, Homo Sapiens
  NM_078470
cacaaggtcgcagggccgttatgaggggaccccgggactcgaaccttggctccacagctgagccattctcgctacctgcccctcgtcacgccctccgtttccacacctttaacgcctcaaagatagaaggtgccgcccaaggggctggaaggagctgaggaaacgactccagaagaaatcaccactgactacgactcccgccggcccgccccggggagccttcggccgaccgtcccctcccccgccaccttccgcaccggccttcccggacggtatccgcgctcgttttcgctcagaggaggccccctgccttttcatgctccacgcgttcctccctcgtgcgcctgcagtttccacttggaatttgggctccggcgcgcaccagctaagaagcgcgtcaacagctgcgcgcgcccgtgcgcgcgtccccgacacctacgccccagcagcccccgcgaaagcggagtcgcaacgcaggcgcacttctgttcgctccggtccccagagaaggcggggctcccgctgcccgacccggaagtgcttctcttttccttggcggaggagggagaccacagagccctgggttgtggaagaggtggctgttccctgtcatcagtatgcagcgattgctctttccgccgttgagggccttgaaggggaggcagtatctgccgctcctggctcctagggcagcgcctagagcacagtgtgattgcatcaggcgccctttgaggccagggcaatacagcaccatctctgaagtagctttgcaatctggaaggggtacagtgtcccttccctcaaaggctgctgagcgggtggtgggccgatggctcctggtctgcagtggaacagtggctggagcagttattcttggtggagtaactaggttgacagagtctggcctctcgatggtagattggcatttaataaaggagatgaagccacctacaagccaagaggaatgggaagcagaattccaaagataccagcaatttccagaatttaaaatcttgaatcatgatatgacactgacagaattcaagttcatctggtacatggagtactcacaccgaatgtggggtcgccttgtaggccttgtgtacatcctgcctgctgcctacttttggagaaagggctggctcagccgtggcatgaaaggacgtgttcttgccctctgtggcctcgtctgcttccagggtctgttgggatggtatatggtgaaaagtggactagaagaaaaatcagactcccatgacatccctcgggtcagtcagtaccgccttgctgcccacctgggatcagccctggttctttattgtgccagcttgtggacctcactgtcactgctactccctccgcacaagttgcctgaaacccaccaactcctacagttgagacgatttgctcatggaacagcaggtctggtgttccttacggccctctcaggggcttttgtggcagggctagatgctgggcttgtttataactcctttcccaaaatgggagaatcctggatcccggaggacctctttaccttctcccccatcctgaggaatgtttttgagaatcccaccatggtgcagtttgatcaccggattctgggaatcacttcagtcactgccattacagtgctctacttcctctctcggagaattccccttcctagaaggaccaagatggcagcagtgactctgctggctttggcgtatacacaggtgggcttgggcatcagcacgctgctgatgtatgtcccaactcctctggccgccactcaccagtcaggctccttggctttgctcactggtgctctttggctgatgaatgaactccgaagagtcccaaaatgattcttagaggaccagcctcctgggactgtgactgcttttgagagctcttcagagatcataagaacttgggcttttctacgagatgaccttgacataccaagtggtttccaaatggtcaacttacttaaaaatcttttcctgttttgagatagtcactggatcaagaatgcattaagtgtggttaccctaaatgttcccttttaaatctgcttttcatgttgaaaatcagttttaatgtagagaaagaaatgtctgccatttgctgcttaacaggctttgtgtcaggtttttcagtgttggcaagctcttggttctacgtggatgatttctacgtggatgttctcctgagtccttaattctgcctaaatagaatttctttatgatcttaacttcacttccattaggtgaagattgaaaggataggattgacatacccaaagtagccagctggtcttcagcaaaaaaaaaaaagctaatgtcttctaatatcctgattttcagaaatggggaaattgcagattttgacaagcttaatgtgtatatgtagcaaaatggtttttaagtacttggaaaaggaggtaatcgccaaatagttccatttttttttttttttttgagacagagtttcactcttgttgcccaggctggagtacaatggcgtgatctcagctcactctgcaacctccacttcccaggttcaagcgattctcatgcctcagcctcccgagtagctgggactacaggcacaagtcaccatgcctggctaattttgtatttttagtagagaaggggtttcaccacattggccgggctggtcttgaactcctgacctcaggtaatccgcccatctcggcttcccaaagtgctgagattacaggcatgggccaccacgcccagctagttcctcttttgataaggctgttaacattacaaggtcagagagaggaatggaatcgacagtataaattggttcctgagagggtttcctaacagctttgtaataagaaaaatatggccttgatggtgtagtgcatggacatctacccagataaacaaattgttgactgctgaattaatgtgattttggtctctattgatatttcatagggccctgtcttattcaactttacttttaaaatcagtgatttggatgaaggcatcagaaacatctgatttgaggatggagcaacccaatattgctaatataatagatgacagtggcaactgaaaacagtcccagaatgaccccatcgagatgaaattaaacagattagaaatgtaacatactcatttaaattaaataagttgtataagtttgggctgaagaaacctggccttatatcatttcatataaaaaagacgggattttagttgtcctcaggttcaatatgaaccaagtagtattcatgttgttattatatgataacagaaaaattagtggtacttcaggttttatcagtagaagtgtcacagccatagtcaaaatacccctaacatactgcatttcactctgggtaccaaatttaagcaagatattgatggccactaagtgtgtatccagaagaagagatcagaatgatgagtccagaacccctgtcacacagggaataggtgaaggaactagggatatttaactggagcagagaacatctggagagagagcaagattcctgtccttgagaagttgaagccgtctcatgcagaagagggaatgagcttccattatgctgcagagctggcagcaatggatgaaagttgcaggaagttagttttagttctgtagaaggcaagagtagggtagaccaaatcaaatgctcactggggtcaggctgatggagacagtaacactggcgagcaggtgccccagctcggactatactgctgagttctggtctgttgctgccactctacaggtccagggttgttagatcttctgggtttttgttttgctttttgaaataaggaaaataagcttatcttaagtttatttttccttggatatacctagattccatacagtgacaatacaaatacaaaggaagaacatctggatttcatccttgacctcatttacaaagcaaaaagagatgctggattcagatataaatgtttaattttgcagtgtttaagtcagcaaatcttctgttttttaaaaataagccacatatctagatttttctgtgaaagctctcaattaagtgttgggaactaatttcaagattttaaaaaatgttatgcaggcttaacgtgtctgagagccataaatgacctaacgtttcccgttagtctctgaactaggtgatctcagttctctttcaactccagtactctgtaagtttctgtgacctgtagtgtaccattctcaggtggtgatatggtttggatgttttgtcccctccaaatctcatgttcaaagtgtgacattcagtgttagaggtgggcctagtaggaggtatttgggtcatgggggcggatcccttatgtatgactttgtgccatccccatagtaatgagtgagttctcactctggttgtttatgcaagagctggttgtttaaaagagcctggaacttcctcctctctcgcttgctctctctcaccatgtgacacactggctccccttcaccttctgccatgattgtaagcttcgtgaggccctcaccagaagcagatgccagcgccatgcttcctatacagttctatgcagaacagtgagccaaataaacctcttttctttctaaaaattgtcagtatttccttatagcaatgcaagccgactaacacaggtgattcttagcaaaacagtttgtcaatttttcataaatgctggaccctggctgggcttatgctattgcctagaagagattcccaacttctctcttatttgaatcttagaaaaatcccaaagcccaagcctcatctaagaccaattaagtcacaatccctggaggaagtaaaaggcatatttttaaagttccccaggtgattccaatgtgcagacaagtctagggaccactggcttaggtcctaatagcctagttaccttagaaagttctgactagcttattcccattcccttctaatttccaccccaccttatcatttgatctgctatgttgctcctattagtatgttagtaggatatggtctcttctggatagaatccttcaaagaaagggaactgtagttcctgaggcaggttcccacaccatcctctcctgatcctcaaacccaggttgtccttagttagtaactgagtcagcagagggcagtatgacccaacccaaagaaccatatattaatgcttctacagttgcctccaaggaagtagcaactcatgagtaagttaaggtttcagatgttttacttcatttttcttttattacagatgatgagtacatttggaaaaacaactggttgcatttagctatataactgtattatatctatgagcttctggtgaatgattatcttagggttttttttgtatttatgttattcccagcactcccagacacatatcaaatattgaattagtgaatgcatgaatggaaaatggataattacagattgatgttccaaatacctttttccaaaaaaacaagtcatcacatacctataggattaaatagatttcccttaatattttcaaaggtctctctgcacttacgtccattgtttttaaaacatgaaggaaattaaaacacatggctttcttaatcagtcaacctagaattttttgtctgtaacttagactgacaaatactatctattgtagcaggggtaatgactagcaactccctaaagcaatgttggttgcagagatcaacactgataatcatgattttaggataaccagtttatctacagctacccttgtggtcctgggatgaatggtgggttatatatcagcatatgtaacacatatacccatgtccctgcataagggagaatgcatcacctctctaacatgcatcacacattttcctcaacactgacctaaaatgtttgtcagtgagaattttaagaattcaaaattcaacaaaattattgtttaatgtgaagcagtagaaaaaacagagtcttaacaactccccaaagcaatgtaatacaggcagcctttggttttttaaagtgtagatcataataaaaagatgtctttcactacactccgcagaggccattgatcaaggtagaaataaagggggagtacatggcatgtacttcaggacttcaactaaagggtaattgtggaatgagaatttcaaatacaacatagtaactgaaacactagaaaccaaagtatgtgtctgggatccctgcttgcagaaaaacatttatgaagctagtaaggggcgtcttcaccagcagcaggccaaatgccggcaagtgctctgtaggaggggccacttaggaaagtaccagggctgccttggagtggagaaggaggagtggccaccagagggtatacaagtggttgccctttaaaagaagaggctcaggagcagacatgtctttatgctagcctgaagtcatgcatgtgtggctatacatagcctgtgattcagaagacttttcaactttggttttcataaaaatggcaagcaatgatggattacattttaaaagtgaaagcccttgtagtatgagtaatgattcagttttactaataaaaggatctccgtattgctcagattttcagagaaacaaaatggtcaactggtgtgttattccttcctcgtccctctgataacggtactgacaaactggaaaataatgaaatattagagcaaaagagaaatgtgtaataacacaagagaagtctattaggatataaggaagataagtagacagagcaggcttaaaatgaagcttgaacaagccatctgcagaaacagaaaacagggtagatgggacacccaaacagggtgccacagctttccaacttagatccaggttatgagagaatgagccaagaacacaacctaaaagttttcaatttgaggtatattcactgttgctattctatagtattaatcaaaatattattgactaataatcctgttattattaatcacaacttttggttttgagtcttagttttttaacagcaatattttttgtaacaccaggaaaatcctcacaagttattgccccaggggctggaatctggagctagcgtccctaagagactaatatgggagaatttgaaacatctgctatttctaccataattcttattcccaatcaacattacaccacataccacagcaaaaaggacaattagatactagttttgaattaatttgaaaagtttaaagacaacaaaaagaaacagccctctgtttctgtaacagagtctggaaactgcccaagaattacaacgaagttctttaatgaggtagatgtaataggcatttataccttcatctaggctgtagtcatctaatgaattgcttggatgttgtagtaaaggaaattgtataaaattgttttaaaaagatgtataaaatttaaaagtacgaaaagaaatacaggaacaagaatagatgtagtgaaaacttggcactatttctgacaaagtatttttttcaaagtttattcctaaatgtgagcaaagcagtcataaatgaatgtcagaagcagttgtaaagatggggcatggttagttgtggccagctgttttataaaaaatagattctgtttatacttgcagaaagattctgttaatgagcatttcattgtagctgacaaagtagttgggctaggaggccagtcactatgactttgcacatattacaactgctctaggcctcagttttatcacccatataaatcaa

SEQ ID NO: 5915 - DNA, 3252 bp, Homo Sapiens
  NM_078473
ggcctgaccacgcagttcttgggtctgtgctgctggcctggggttgtggttgaggccgggtctccgctcctgtgcccgggaagatggtgctaggtggttgcccggttagttacttacttctgtgcggccaggcggctttgctgctggggaatttacttctgctgcattgtgtgtctcggagccactcgcaaaatgcgaccgctgagcctgagctcacatccgctggcgccgcccagccggagggccccgggggtgctgcgagctgggaatatggcgacccccactctccggtcatcctctgctcttacctacctgatgaatttatagaatgtgaagacccagtggatcatgttggaaatgcaactgcatcccaggaacttggttatggttgtctcaagttcggcggtcaggcctacagcgacgtggaacacacttcagtccagtgccatgccttagatggaattgagtgtgccagtcctaggacctttctacgagaaaataaaccttgtataaagtataccggacactacttcataaccactttactctactccttcttcctgggatgttttggtgtggatcgattctgtttgggacacactggcactgcagtagggaagctgttgacgcttggaggacttgggatttggtggtttgttgaccttattttgctaattactggagggctgatgccaagtgatggcagcaactggtgcactgtttactaagaagagctgccatcatggcccagggaggcgggtgaaagctccgtcttctgaattcatctctacaggctcaaaactcctctttgatatcagacctgatgttattttccttcttttggagggcatttgtttggttaagaaggcttctttggactttggaatttcaacccagattttaccttgcagacggaatgacaagcaaaaagtgttgtggggaatcaaatttgttcctttcctcatgcacaaaacataaaggatagtggcgagtttacaagctgtggatgggtttccatagtcttcctttctgtacattgctatatcttcagtcctttggagcaagtggacctaacaagttgagcaaaatgaatatttggatccatgttcctcttgtgaccctgagtcttcatgcaaggagatctgaagctgaacaatgaaaatcttcagcagaaatagaaatggccgtggattgtaatacacactgaaattctgactttctgaatttaaatgtagaataaattttaccaacttggagtactgtatgagtattttcagtagggggaataaactcaaaattatatttgttttgcagaaacctagtcatttgaaatgagccatcctattaagccctcttttgtctccattatgttccagaggcagtatatgcagtgcaataattttttcattccacttatgttttgaaagccagcggcatcagatgtgtgagttgagctattcctcctggcagaattgtccaatctaaaaatcagcgtttaccagcccatgctaataaaattaagatttcatacaagtttctgtaaaactattcttcatgattagctctccctgtgggctgcagcagtcagaaagagataacagccacacctctgcattccccggtcaccaggaataaaaggaaatgttccagattgtaagtggttttaaaaactcagttctcatcgtttgcaatctaagttgaaagaactattaaatataaaatcaaaggtgggcaatgtggccaagtcaatggaagaggctttactcagaataacttacaaattctagaaacaaggtagaactcactcagtttacctaataataattgaatttaagaccaaatatcacagttgaaataacttccctggatacattctatcattttgtagctttcctaagaatttcttgctttatcattcctgattaatcactgtttttacattattaaaggtggcaattttctgtaaaaaatttaaaacagatgatcctattctgtcttgaaagttctgtaccacactgaccttaaccttgcttataacataacaattggtaaacttttaattcataatctttataccctaagatagtatttattaaatttttatgggtcatgaagaaactagaccctctccccagaaaaatctacatacacagaatttacatagaacttgggttcatctacacaatttatgcatgaaataaaattgtactggtaccctataaatttatacaaataaaagagtttaagggagttcaaggatgccatatgtatattttaaaaaaatttctaagggaagtctaaaaaacataaattataatattacccaaaataagatgctacttttcacctaaccaagtcctgcctcatttcacactttaacctcctaagtatattcataaccctaccaaaagttgttttctttaaaaaataagaaactttagggccagcgcaatggtgcaagcctgtaatccctgcactttgggaggccgaggcaggtgaatcctttaaggtcaggagttcgagaccagcctggccaacatggtgagacacactcccccacccccgcccagtctctagtaaaaatgcaaaaattagccgggcgtggtggcgtgcacctgtaatcccagctactcgggaggctgaggtaagagaatcacttgaactgaggaggcagagattgcagtgagccgagatcctgccactgcacttcagcctgggcaacagagtgagactctgaccaaaaaagaaattttgcagctccaaggcttgaagtcatttatgttgccaggggtaagagcttggttgaagggctaaaagactagaaactactgaagatgcccttcttactgtcagtaaagctgctggagacaaaagaagttgttctcgctgctagagtggtaatttgagaatcatcagtattcctatgtgacaatccaaaattactggttttcatttgacttgtaaatgacacccatcatccatctgcccacaaacctggccaaatgtgatacaacctgaaaacctgatggactaaaggagtactatttaacaattgattgcctttgcactttattcaggttgtttcttaaattttggtagacagatccatttgtatatgtgtgtgttatatctagtttatggctatagagaaggtttaaaatactacagtgtccttccctcaaggttaaattagaagctgcctgccttttagttgtttcttgcctttaataaaatgttatcagttcccccaga

SEQ ID NO: 5916 - DNA, 5821 bp, Homo Sapiens
  NM_078483
tgaggtccggaagcggctgccgggcagcaaaggaggatggcgaggggctgatactgaacccgggaagggtgggctgtgctgaagccagagccggagccggagctggggccagaacccgagcagtgagttcctccactggctgccggctggcggcgctcgccgccttgggcaggacccacctcgccttcctcccggcgtggcagatgctccagctgccatgtccacgcagagacttcggaatgaagactaccacgactacagctccacggacgtgagccctgaggagagcccgtcggaaggcctcaacaacctctcctccccgggctcctaccagcgctttggtcaaagcaatagcacaacatggttccagaccttgatccacctgttaaaaggcaacattggcacaggactcctgggactccctctggcggtgaaaaatgcaggcatcgtgatgggtcccatcagcctgctgatcataggcatcgtggccgtgcactgcatgggtatcctggtgaaatgtgctcaccacttctgccgcaggctgaataaatcctttgtggattatggtgatactgtgatgtatggactagaatccagcccctgctcctggctccggaaccacgcacactggggaagacgtgttgtggacttcttcctgattgtcacccagctgggattctgctgtgtctattttgtgtttctggctgacaactttaaacaggtgatagaagcggccaatgggaccaccaataactgccacaacaatgagacggtgattctgacgcctaccatggactcgcgactctacatgctctccttcctgcccttcctggtgctgctggttttcatcaggaacctccgagccctgtccatcttctccctgttggccaacatcaccatgctggtcagcttggtcatgatctaccagttcattgttcagaggatcccagaccccagccacctccccttggtggccccttggaagacctaccctctcttctttggcacagcgattttttcatttgaaggcattggaatggttctgcccctggaaaacaaaatgaaggatcctcggaagttcccactcatcctgtacctgggcatggtcatcgtcaccatcctctacatcagcctggggtgtctggggtacctgcaatttggagctaatatccaaggcagcataaccctcaacctgcccaactgctggttgtaccagtcagttaagctgctgtactccatcgggatctttttcacctacgcactccagttctacgtcccggctgagatcatcatccccttctttgtgtcccgagcgcccgagcactgtgagttagtggtggacctgtttgtgcgcacagtgctggtctgcctgacatgcatcttggccatcctcatcccccgcctggacctggtcatctccctggtgggctccgtgagcagcagcgccctggccctcatcatcccaccgctcctggaggtcaccaccttctactcagagggcatgagccccctcaccatctttaaggacgccctgatcagcatcctgggcttcgtgggctttgtggtggggacctatgaggctctctatgagctgatccagccaagcaatgctcccatcttcatcaattccacctgtgccttcatatagggatctgggttcgtctctgcagctgcctacccctgccccatgtgtcccccgttacctgtcctcagagcctcaggtatggtccaggctctgaggaaagtcagggttgctgtgtgggaacccctctgcctggcacctggataccctgggccaggtaacctgagggcaggggagaggtggggtggcagacacgcagaagtgctactagtgacagggctgccatcgctcacctgtacctatttacacccagaactttccagctccccctcatcatgcctcctccttcctacctgcctcccctctgctggtgcacctcgcccaactcattcttactgcacagttcactttatttaacaattttcatgtcccccacctcatgttttcaccttttctgggccaggcatagattaagtaactgggaacgccccctctttataaagctgggcttctttctcatctctctcccaaatgttgtatctcagtattcttcctattcgagtctccagggggtggctggacctacctggtcatttgaaacaggcccccaagctggagtttttaatctggactctctggcttgctgtgacccctaaggcaatgcttctcttccctggattccttagtgtgggtcacagtactgtgttcttagttgctttagctcttaaaacatacgaagtgttgcctaaactgaaaatatttatcttttatttaaaatcagatttttgtttttagactgtcttagatctggggctattacgaatcacttcttcttcagtaaactttgactcaacttctcctgctgaaaagaagctcgctccagatgtctgcatgggtcctcggcactcttggctgaggactcaaaggttttaatcaggatcgtctaaaaatgtacctcggtgaggaggcacagattttgcctcctgttgaccagcctggtttcataccgaaaagacattgaaggactgcagaaatgtatgggtgcaccgggccgagggaagggtggctgagtgagaggcgtataaaatggggctgtgtgcatgcaggcccatgtttcagcctcagcccacgccaggtgaaaggatcagcaatgctctgttgccatcgtgctgggacgacaccagctctattgccaccgatgagtagctgaggtcagtgtgcacagagtttgaaattaagttaatagactttacagcagctggtctgacactacgcgcagtgctcggttgtttacaatcagtggggaaaagggcagaaccagtgcccggccccacactgcctctgtggcctggactttgaaaggaacccactgaacactaattatgagccctgtctttcccccagaatgcctccctgggtttcacaaacagccttgaggttggccctcctcaaggtcagccttcagatttgggagcaaacttcagagaaggcagaggaagatacattgccttgctgtgggctgcctcttctttcctcttggtgtgcgaagtatttcagaaggccattgatgaattccccctctttagctgtgtatttgtgcacgtgtgtgtgtacgtgcgtgtgtgtgtgtgttcctgtgtaagtaacagaccagactccttttctcttctgtcccgtcaccaggctcttgcttcactgcagatacagttcactctgaaagctggttgaaggagagcagcaaaaatgtatcaggggttttgcttctgtgtttcgccaaagctcataagggctgtgacccacccatatggccccagttttttctgtctcttctgttccaaagccaggagagctgacttccaggtgaagggatgggaaaagtggactctcattgtagtgactcccaacctacctaataatttgttaacttaggaatatgctatcattgttgacttgttcttccttaggagaaggacgattttcacccaccctttctgttctatggtggactcttaacaggtgctatgtgaccaggaatctagccgggagtagcagaggccctgtcttctgaagtctcaggcttagaagttaccaaagtgggctcagaaactgtcatctcctggttccaagttcgggctctggcagcccagccgctatcttagctgtctttcccagcggtgctaagagtggtctcagtgagaaggtagatgccaactggagggccagacctgtgtcctgcccatgtcctccttggtggacgtttctgtttactcagagctgctagagaccatcctgcccatccgagttctgagattgggactgtgatgttgggacctgaggactggatggtagaatactggggtcccccagctcttagcaggatgcaggctattgcttccacacccctggccgtgagaacgtggtatgtaggagagttggctgtagctttaggatttctggaagccaatttggcatggcctatttgatctctggcttgtgctcctgctacactgacagactgattgcgtggctctttcagaagacccaggaagggcagctccagccagaggaccttcctggctatgcaggtgcacagctcttaggcatcaagcaaagggtcagccagtcagtagtagtgggaggaagcccttcctcctcttatgcaagcagctcgcagccagcccagaatctcttatgcagcccaaagggcttcttgaggtagagagccctccccagtgtcttcccaggataagtagaaatatgatcacagagcaacggagcaaaggctttcgggagtgtgaggctgcatctgctggagcaaagggaaaccgtgggcttttccggccagatactcttgagctctgtgaccctgctcctgtcaccccaatttctccaagccagaggtagctttctcagagccccttggtggttctgtcctccaaatgctgctgttgggagcgggcttccagctctcagtgggcagtgcacctcctcctaaatgcaggcacttgctaggaagagtgtgagctggcgtcttctgttcaccctgcctagcagttgtcaccattcacaagtggcattatttatgttgtgctgctgtccagctgctaagatcccttcatctgcacaagccctggctagatatgtgtgaatgtgtggcatcatttcacttcagccgcccaattccatctctcctctgcagccagattcactggctgatgctcactgctcactgtctatccccacgaaatttagttttatcagtagtcttaaagtgttgatctcaaacaagtacattagaaaaatcatgtttcttctctctcatcttactttttcttctcagatttctcccttcctagaacattctctctgtttagcactaatgttcacctcgtattttttggaagtgcaaaaatctcaatttgtgtctgtttacagctctctctcctcactgctcacagcaaggggttctgtatcagtggatttcattttgtagctgctgagatgttaaggcaagcctcagcatctgcccctgctgggtgcacaatgctgcttcctcgaagagaagacacagagtccaagtggcaggacttgaggttggcttccactctgccttagaagttaattttccaaagtacattacaaatctctgaggccattaggggaaaaggaaggggtgtggtttgtctttgaaattacggttaatacttttagacagtaagtccggctggttgcagggctatttgccccgacagcatcagcctgtaacatttcttctctttcctttgtgccactgagtcgttccctggccagaggacataaatggtgctggtaggaggttatcagagtaaggaaggtagcagatataggtgcagggtgcctgtcattcactgtgttatttggtttaaatcaaagtgattctgggggaagctatgctctttcagtggataataaaattggtaactctattgtaaaacatgtcaatggtgtgtgaagaaaaatcaaccaatctgtaggtgttgataactagacagtactgtgtatgttacgtgcctgtgtggatgtgcacttccagcatggtatgtgtagcgatgtggatcatgccagagttcgtagatcctgttttggggtttgcacatggatcgtatgttaagctttttcttttcaataaatgaattttatttttatttttgaaaaaaaaaaaaaaaaaaaaaaaaaaaaaaaaaaaaaaaaaaaaaaaaa

SEQ ID NO: 5917 - DNA, 4001 bp, Homo Sapiens
  NM_078487
ggctccccactctgccagagcgaggcggggcagtgaggactccgcgacgcgtccgcaccctgcggccagagcggctttgagctcggctgcgtccgcgctaggcgctttttcccagaagcaatccaggcgcgcccgctggttcttgagcgccaggaaaagcccggagctaacgaccggccgctcggccactgcacggggccccaagccgcagaaggacgacgggagggtaatgaagctgagcccaggtctcctaggaaggagagagtgcgccggagcagcgtgggaaagaagggaagagtgtcgttaagtttacggccaacggtggattatccgggccgctgcgcgtctgggggctgcggaatgcgcgaggagaacaagggcatgcccagtgggggcggcagcgatgagggtctggccagcgccgcggcgcggggactagtggagaaggtgcgacagctcctggaagccggcgcggatcccaacggagtcaaccgtttcgggaggcgcgcgatccaggtagctggggccccagggcctcgccggcagggggcgcgcgaacgcggggcgcggcctcggcggatcggggctggaacctagatcgccgatgtagatttgtacaggagtctccgttggccggaggtcatgatgatgggcagcgcccgcgtggcggagctgctgctgctccacggcgcggagcccaactgcgcagaccctgccactctcacccgaccggtgcatgatgctgcccgggagggcttcctggacacgctggtggtgctgcaccgggccggggcgcggctggacgtgcgcgatgcctggggtcgtctgcccgtggacttggccgaggagcggggccaccgcgacgttgcagggtacctgcgcacagccacgggggactgacgccaggttccccagccgcccacaacgactttattttcttacccaatttcccacccccacccacctaattcgatgaaggctgccaacggggagcggcggaaagcctgtaagcctgcaagcctgtctgagactcacaggaaggaggagccgaccgggaataaccttccatacatttttttctttgtcttatctggccctcgacactcaccatgaagcgaaacacagagaagcggatttccagggatatttaggagtgtgtgacattccaggggtcgtttgcttttcagggttttctgagggaaagtgcatatgaaatccttgactggacctggtggctacgaatcttccgatggatgaatctcccactccagcgctgagtgggagaaggcagtgattagcacttgggtgacggcagtcgatgcgttcactccaatgtctgctgaggagttatggtgaacccacaacttaggccctagcggcagaaaggaaaacctgaagactgaggacaaagtggaggagggccgaggtgggcttcagtaagtccccggcggcgctttagtttgagcgcatggcaagtcacatgcgtaaacgacactctctggaagccctggagaccctcgcccaactccaccagatagcagaggggtaagagaggatgtgcaagcgacgacagatgctaaaatccctggatcacgacgctgcagagcacctttgcacaggatgctggcctttgctcttactacactgaggagagattcccgcgggttccgcaggcagactacacaggatgaggtggtggagtggagtgagagcaattgtaacggttaactgtaacgttttctttcacacacacacacacacacacacacacacatgctaggatgcggaaatccccttatgacttgctactttttgattttgtgatattttgtactttttagttgttcagcaactgtcttatttaatggggagattttaagtaacataactagtggctctcagttaaaatgtgaggaagaactacagctcttaaatgtagcaatggcactgttgcaaactcagtgcaaacgcctagattgctttcttcttaacctatttatttctttgttaaatttttctgattgtttcctttatagagtgtctcagggtgcagaggtcagactaagaaatattccaaatgtcttttagaagatagatgcacttatgcagtaaattatcttgggatagttcccaaaagattgctgaaaaagtagattgagtataaaaacttgaaaatatatgatggctcgtgggatgtcctactatcactgaacaaactaaaggtgcactgctttgggatttaatttccagggttgcttgatcattatatcattggaacaactgatacttcactactttaataaagaattaacagagattgaactccaagaggtgggtaatttggtttaaaaatacatgttcatgggtttaccactaactcctgagaaatgttaaaggttcacaggggttcccttctctcaatgtttgtaataattgctcataagcaataccagcaattcataaaaactgcttacttatgccatagaaaattaaacacaaagtgtatacatgtattatgcttctaaatgctcattctaccagatacacatttaaaagagaaaaaaggaacagaaacaagtcatttgagagtggagacttataagaaggagtacatttgagttgaatacacaaatctttacttctctaccaattcctattcccaaaatgaacatattactggggaaagttagttgagaatcagagcatatgttattggggaaaggatatgtttattgacacataatctgtaccaggtatgcattaaaatatatttgttaatttaatatttaaacctgagagataggtattgtttcccagatgaggacaatgaggcaaagaaatatcaagtaacttgccaaaggttacaagatattcattccatggatgcacaaagaagtgcatctagttccacagctgattatggttgtcttgcttttcttcccattgcaccagcttgtcctccaaaatcatgaatgatacacatgaagataactttttttaaaaaaaagcagaaatacacaatgatctcccttgtaagctcctaaggtggcttttctttctctaacttctagtaaatataaacggtttgtttgaaaactattttaaaatgtcaacaatatggagaataaccccccccaacacacctataaaaacccaaatttttggaacaaagataatggaacctccattttcaaactgaagcacagggacagaaaatatatttctagttatcacttaagcactcaatcattagaggctacaagaataatatttttaaagttacagtattttacaattattagaaaacattctatataaaagaagtcagttgatactttaaaatctcccatttggtttataaaatcccttaatttgacctctatatcttaaattccaagatgtttaaatttgctagttgcattatactgggtcatgaaaaattatcccttgaaatagatatgaaacatgttacttcatttctggtttaaataacttgtggaatctttcctaatgacaacctgatattaagggaaactaaagaaaatgttattgtggatcccacagtactatattacactgttttttttgtttgttttgttagttttttttatttaaagcaaacctcaaacattattgggtatcaattaccacctggttgtattgaaatagtaacttatcaatgccatgtaaaaattaattccattttcgaagccacctggcagacaggtttagctgtttcatcagcagcctaatatatactgttaaatttgttaaggatttcactttgaaggatacatgcaaaacatatagttactattttcatgagtcctgcttctagctccattgtggaatacagaaaattaaatatacctgttaagttcgtatctaaacctaagacattaccaaggtttgtacaaattctactacctgacatttattccaagaagatctggaaagttaaataaatttataaatttaataacaaaaaaaaaaaaaaaaaa

SEQ ID NO: 5918 - DNA, 1932 bp, Homo Sapiens
  NM_078625
atgtaaagtttttccagtgaaacaaaacgtaagaatctgagtttgtttttcaaagatcactaaattttagttatgattatatcacattttccaaaatgtgtggcagtttttgccctccttgctctgagtgttggtgcactggacacttttattgctgcagtatatgagcatgcggtgatattaccaaacagaacagaaacacctgtttcaaaagaagaagctttgctcctgatgaacaagaacatagatgttttggagaaagcagttaagctggcagcgaagcagggtgcacatatcattgtgaccccagaagatggaatctatggttggatcttcaccagggagagcatttacccctatctagaggatataccagaccctggagtgaactggattccatgtagagacccctggaggaagagtaaaaagatgaatgagcctgtttccaaagagctttgctatcactgtcattcagaatgcaatcaatatggccaatggaaattgtataggacttgaaaaaggaagccctacttctgggaccacattttacgaccacctagctgagtgataaatcactaaaatatagtaagtttgaggaaatgtctattgaattagattcggcaacacaccagtgcaacaaagactcagctgcctggccaaggacaactctatctatgtcgtggctaatattggggacaagaagccatgcaatgccagtgactctcagtgtccccctgatggccgttaccaatacaacactgatgtggtgtttgattctcagggaaaactgttggcacgctaccataagtacaatctttttgcacctgaaattcagtttgatttccccaaggattcagaacttgtgacttttgacactccctttgggaagtttggcatttttacttgctttgacattttttctcatgacccagctgtggtggtggtggatgagtttcaattgacagcattctctaccccacagcatggtacaacacgctgcccctcctctcggctgttcccttccattcagcatgggccaaggccatgggagtcaatctacttgctgcaaatacccacaacaccagcatgcacatgacagggagtggaatctacgccccagaagcagtcaaggtgtaccactatgacatggaaacagagagtggtcagctgttgctatcagaactgaagtctcggccccgccgtgagcccacctaccctgcagctgttgactggcatgcgtatgccagcagtgtcaagccattttcctctgaacagtcagattttctggggatgatttattttgatgagtttaccttcaccaagcttaagagaaatacaggaaattacacagcttgccagaaagatctgtgttgtcacttaacttacaagatgtctgagaagcgaacagacgagatctatgccctaggtgcttttgatggactgcacacagtagaaggccaatattacttacagatatgtgcattactgaagtgtcaaaccactgacctggaaacgtgtggagaacctgtggggtcagcttttaccaagtttgaagacttctccctcagtggcacatttggaacgcgttatgttttcccacagatcattctaagtgggagtcagcttgcccctgaaagacattatgagatttcaagagatggacgcttgaggagccgaagtggagcccctttgcctgtcttagttatggccctgtatggaagagtgtttgagaaggaccctccacgcttagggcagggatctgggaaattccagtgatctcctttagcagagcccttttaggattagcctggctaagaaaggaagaaaaaaaagagatccgttagtgtctgtttagaaaagatgttataaacttacagaaacaaatataataaactgaagcagatttgaaaagcaaaaaaaaaaaaaaaaaaa

SEQ ID NO: 5919 - DNA, 1273 bp, Homo Sapiens
  NM_078626
ccttgagtctccacacacactcctcacagagatctgtagcgtaggtacgtgacagctctgcctacatctgacgtccggagtcattaaccaggaatgtatgtgtgtctgtgtgtctctctgtggagtcgtcagaattcttcataggggttaagctaaaaaagcgaggcgaggagcccctctccaatggctcagttttgctgaataatcacgtgtgaatcgaggggcgggcttttggcaggcagatcttactagtatttactaccaagctctactccagattaaccatcccagtccttctgtcagtctccgatgccatcatgcagcctggttaggagcaaaggaaaggggaaaaagaaaaacgactaattcatcttttcctgatcgtcaggaccctaaagaatggccgagccttgggggaacgagttggcgtccgcagctgccaggggggacctagagcaacttactagtttgttgcaaaataatgtaaacgtcaatgcacaaaatggatttggaaggactgcgctgcaggttatgaaacttggaaatcccgagattgccaggagactgctacttagaggtgctaatcccgatttgaaagaccgaactggtttcgctgtcattcatgatgcggccagagcaggtttcctggacactttacagactttgctggagtttcaagctgatgttaacatcgaggataatgaagggaacctgcccttgcacttggctgccaaagaaggccacctccgggtggtggagttcctggtgaagcacacggccagcaatgtggggcatcggaaccataagggggacaccgcctgtgatttggccaggctctatgggaggaatgaggttgttagcctgatgcaggcaaacggggctgggggagccacaaatcttcaataaacgtggggagggctcccccacgttgcctctactttatcaattaactgagtagctctcctgacttttaatgtcatttgttaaaatacagttctgtcatatgttaagcagctaaattttctgaaactgcataagtgaaaatcttacaacaggcttatgaatatatttaagcaacatctttttaacctgcaaaatctgttctaacatgtaattgcagataactttgactttcttctgaatattttatctttccttggcttttcccttgcttccccttttgccaatctcaacacccaagttgaagactttgtttttaaaatggtttgtcctgatgcttttgtctaattaaaacactttcaaaacaggacaa

SEQ ID NO: 5920 - DNA, 3564 bp, Homo Sapiens
  NM_078628
cggccccccccggccacggcgcaccgcctccccgcccccgcccgccctcccccaccgcgcgcgctccgcccgccccggagcctcgccctccgccacgatgagcaaatgagcgcgagcgagggcatgaaatttaaattccactcaggggagaaagtgctgtgcttcgagcctgaccccaccaaggcgcgagtgctgtacgatgccaagattgttgatgttattgttgggaaagacgaaaaaggcagaaagatcccagaatatctgatccattttaatggttggaacagaagctgggatagatgggcagcagaagatcatgtgcttcgtgataccgatgaaaatcgtagattacagcgtaaattggcaagaaaagctgtagctcgcctgaggagcacaggaagaaagaagaagcgctgcaggttgcctggtgtggactctgtcttaaaaggcctccccactgaagaaaaagatgaaaatgatgaaaactcattaagcagttcctctgactgtagtgaaaacaaggatgaagaaataagtgaagaaagtgatattgaagaaaagactgaagtgaaagaagaaccagagcttcaaacaagaagggaaatggaagaaagaacaataactatagaaatccctgaagttctgaagaagcagctggaggatgattgttactacattaacaggaggaaacggttagtgaaacttccatgccagaccaacatcataacgattttggaatcctatgtgaagcattttgctatcaatgcagccttttcagccaatgagaggcctcgtcaccatcacgttatgccacatgccaacatgaacgtgcattatatcccagcagaaaagaatgttgacctttgtaaggagatggtggatggattaagaataacctttgattacactctcccgttggttttactctatccatatgaacaagctcagtataaaaaggtgacttcgtctaaattttttcttccaattaaggaaagtgccacaagcactaacaggagccaggaggaactctctcccagtccgcctttgttgaatccatccacgccacagtccacagagagtcagccgaccaccggtgaaccagccacccccaaaaggcgcaaagctgagccagaagcattgcagtctctgaggcggtccacgcgccacagtgccaactgtgacaggctttctgagagcagcgcttcacctcagcccaagcgccggcagcaggacacatccgccagcatgcccaagctcttcctgcacctggaaaagagtaggttcattctcgggtgccccaggccggggagagccagcgtgtactttgtgtttagtcagtgccaggcatggtgctgaggttacatgtgtgtgtgtacagtgcgtgtgattcccatgtccaaagtgctgtcatgctgcctgctttctggagctgtagaaagttgaaacacctggcgcagattgcagcgcagctgtgttggaggcaggactgggctgtttcctcagcctttcttttttgccatcactctaccacttgtgagcaaattgagttatcagaattctatgtattgtgtagctaggcctaatgaagcattcaaaatgagcaatgctaatgggttgtttagctttttgttttctttgtactctgtctctgtagtctctccattctaaagtttaatttggaaaggtctgtcctgaattatcaaagtaagaatactcagatttccataagctcttctcacctcctcttagcccaactcaaactccatcagatcttctcaccttgattttgagctggaatgtttcaatgagcaaaataaattagacaaaagtttactttctttttttccaaaatacacacaggttgatttgctgtaatataaaacttagaagtaaaccactgctaattaatcattttaaactttcaaaaactgctaaaacaggtgccatgaatcaggtacaattactgtagaaactaacattagctattatacactaaccaggcatttttcccaaattaattacaatctggttgtttagcctatgctaattaagccctcttagtagtagtattcactttacattgaagacctcattcacaaatacagggtgctctgtgcttatatccttccacccttgactgccaaaaatgtgtgaaatggaaagttgatggcagcagggccgacgatgtcacctggtgcctcgcgggctcagtgagttaggaagtcagcagcaggggaggcagcttgcatgcctgtcccccggcacactgtgtggaggtggaaacagagctacgccagcaggcgccaagcacccaactccagagatggaagcctggtggccttcctttcacagagctcagctgctcgcaggctgtgaaatctaagacacccctcataaatatcaaaaacacctccaaagctaacgtcagggtaaaactacttggagtcgaatccccatgccccagtaggtgtatcttgtgtatgacctgtgccctgttcttccctcagcctcgcctgctgtgctgactccttcaggggtccttctaagcatcatcctgttggaactcccaaaagtcatcccagtgccattctgtgttcaggtgcccatttccttgtgtacatcctgtccctgccacatccataagctcctgagagaaaggtctgacttgttgattgtgtcaccccatcacagctcagtgttggtggcatagttccaggtgcgtgaaagtatttgctgattctttgaagattgggaaggctcagaagggcagagttgaagaaggcatacctttaagagaagccctttgaataatcaagtgctaaaacaaaatcaggtgcttttttaaaacagcttgattgagatataatccacataccttaaaattcacacatttaaagtttttagtgtctccagacacagtggttcatgcctgtgagactggggcaggaggatcacttgaggccaggagttcaagatcagcctgggcaatatagtgaaaccccatctcttaaagaaaaagttagccaggtgtgatgatgtgcacctatagtcccagctacttgggaggctgcagctgtggctgtggctgaagctggcggatcgcttgaggcccagagtctaagactgcagtgagctctcattgggccactgcagtcgagcctgggcgacacaaagagaccaccctgtctgatagataactaacaaaatagttttagttgggcaaaattaaagagttgggcaaccatcactgaaatcagtttcagacattttcaccactccaaaaaagaaaccccacatcgactagcagttactcatttgcttctccctatgtcccctgacaaccactaatctatttgtctctatagatttgccagtttggggcatttcatataaatggaatcatctgtatgtaagtggttaataaggattggttgattgaagattgaaaagggtcagctgggaaaatttttaaaaagactgtttttaaaaaggtgctacaaaataaagtgctatctttttctgttaaaaaaaaaaaaaaaaaaaaaaaaaaaaaaaaaaaaaaaa

SEQ ID NO: 5921 - DNA, 2359 bp, Homo Sapiens
  NM_078629
cggccccccccggccacggcgcaccgcctccccgcccccgcccgccctcccccaccgcgcgcgctccgcccgccccggagcctcgccctccgccacgatgagcaaatgagcgcgagcgagggcatgaaatttaaattccactcaggggagaaagtgctgtgcttcgagcctgaccccaccaaggcgcgagtgctgtacgatgccaagattgttgatgttattgttgggaaagacgaaaaaggcagaaagatcccagaatatctgatccattttaatggttggaacagaagctgggatagatgggcagcagaagatcatgtgcttcgtgataccgatgaaaatcgtagattacagcgtaaattggcaagaaaagctgtagctcgcctgaggagcacaggaagaaagaagaagcgctgcaggttgcctggtgtggactctgtcttaaaaggcctccccactgaagaaaaagatgaaaatgatgaaaactcattaagcagttcctctgactgtagtgaaaacaaggatgaagaaataagtgaagaaagtgatattgaagaaaagactgaagtgaaagaagaaccagagcttcaaacaagaagggaaatggaagaaagaacaataactatagaaatccctgaagttctgaagaagcagctggaggatgattgttactacattaacaggaggaaacggttagtgaaacttccatgccagaccaacatcataacgattttggaatcctatgtgaagcattttgctatcaatgcagccttttcagccaatgagaggcctcgtcaccatcacgttatgccacatgccaacatgaacgtgcattatatcccagcagaaaagaatgttgacctttgtaaggagatggtggatggattaagaataacctttgattacactctcccgttggttttactctatccatatgaacaagctcagtataaaaaggtgacttcgtctaaattttttcttccaattaaggaaagtgccacaagcactaacaggagccaggaggaactctctcccagtccgcctttgttgaatccatccacgccacagtccacagagagtcagccgaccaccggtgaaccagccacccccaaaaggcgcaaagctgagccagaagcattgcagtctctgaggcggtccacgcgccacagtgccaactgtgacaggctttctgagagcagcgcttcacctcagcccaagcgccggcagcaggacacatccgccagcatgcccaagctcttcctgcacctggaaaagaagacacctgtgcatagcagatcatcttcacctattcctctgactcctagcaaggaagggagtgctgtgtttgctggctttgaagggagaagaactaatgaaataaacgaggtcctctcctggaagcttgtgcctgacaattaccccccaggtgaccagccgcctccaccctcttacatttatggggcacaacatttgctgcgattgtttgtgaaacttccagaaatccttggaaagatgtccttttctgagaagaatctgaaggctttattgaagcactttgatctctttttgaggtttttagcagaataccacgatgacttcttcccagagtcggcttatgtcgctgcctgtgaggcacattacagcaccaagaacccccgggcaatttattaaaatgttgttggttctgtaagagcaactgctctgtctagtttggcgctctgggttccaggtgaataactaacaaggtggtgggtctttacccacagcgcaaacacaatgcccaccttggggctctgttgtttgagttgcccacatactgcagttattctgttaggaatgattccctgggtgcctgaaagtgctctgacacgacacttgttactttgcaggccatctgtgatggcaaggaaaaagcaactatgttcacagtgaaatattcgtggaataggttaggccatttcagtagacattgcagttagttagcaagaaccacattgtctctttatttgttagcattaaacaaatttttttttgcaaattggttttatttttttgatgaagccgagcaactctgtccaaaaaggtttagtttgtactcggaaaccacaaagtagtctcaaagtattttagagggaatcgatattgatggcaaaagaaaatttgcagctatgcatttgcttctaacggttccctctctgtgaaacattatttttggtgatctaaagaaagcattgcctttcttatttgagattttacagctatactttgttgtgtaatgttatggttccctttctgtaaaatgttatttttggtgatctaaataaagcctgtcttgtttgaaagaaaaaaaaaaaaaaaa

SEQ ID NO: 5922 - DNA, 2260 bp, Homo Sapiens
  NM_078630
cggccccccccggccacggcgcaccgcctccccgcccccgcccgccctcccccaccgcgcgcgctccgcccgccccggagcctcgccctccgccacgatgagcaaatgagcgcgagcgagggcatgaaatttaaattccactcaggggagaaagtgctgtgcttcgagcctgaccccaccaaggcgcgagtgctgtacgatgccaagctgggatagatgggcagcagaagatcatgtgcttcgtgataccgatgaaaatcgtagattacagcgtaaattggcaagaaaagctgtagctcgcctgaggagcacaggaagaaagaagaagcgctgcaggttgcctggtgtggactctgtcttaaaaggcctccccactgaagaaaaagatgaaaatgatgaaaactcattaagcagttcctctgactgtagtgaaaacaaggatgaagaaataagtgaagaaagtgatattgaagaaaagactgaagtgaaagaagaaccagagcttcaaacaagaagggaaatggaagaaagaacaataactatagaaatccctgaagttctgaagaagcagctggaggatgattgttactacattaacaggaggaaacggttagtgaaacttccatgccagaccaacatcataacgattttggaatcctatgtgaagcattttgctatcaatgcagccttttcagccaatgagaggcctcgtcaccatcacgttatgccacatgccaacatgaacgtgcattatatcccagcagaaaagaatgttgacctttgtaaggagatggtggatggattaagaataacctttgattacactctcccgttggttttactctatccatatgaacaagctcagtataaaaaggtgacttcgtctaaattttttcttccaattaaggaaagtgccacaagcactaacaggagccaggaggaactctctcccagtccgcctttgttgaatccatccacgccacagtccacagagagtcagccgaccaccggtgaaccagccacccccaaaaggcgcaaagctgagccagaagcattgcagtctctgaggcggtccacgcgccacagtgccaactgtgacaggctttctgagagcagcgcttcacctcagcccaagcgccggcagcaggacacatccgccagcatgcccaagctcttcctgcacctggaaaagaagacacctgtgcatagcagatcatcttcacctattcctctgactcctagcaaggaagggagtgctgtgtttgctggctttgaagggagaagaactaatgaaataaacgaggtcctctcctggaagcttgtgcctgacaattaccccccaggtgaccagccgcctccaccctcttacatttatggggcacaacatttgctgcgattgtttgtgaaacttccagaaatccttggaaagatgtccttttctgagaagaatctgaaggctttattgaagcactttgatctctttttgaggtttttagcagaataccacgatgacttcttcccagagtcggcttatgtcgctgcctgtgaggcacattacagcaccaagaacccccgggcaatttattaaaatgttgttggttctgtaagagcaactgctctgtctagtttggcgctctgggttccaggtgaataactaacaaggtggtgggtctttacccacagcgcaaacacaatgcccaccttggggctctgttgtttgagttgcccacatactgcagttattctgttaggaatgattccctgggtgcctgaaagtgctctgacacgacacttgttactttgcaggccatctgtgatggcaaggaaaaagcaactatgttcacagtgaaatattcgtggaataggttaggccatttcagtagacattgcagttagttagcaagaaccacattgtctctttatttgttagcattaaacaaatttttttttgcaaattggttttatttttttgatgaagccgagcaactctgtccaaaaaggtttagtttgtactcggaaaccacaaagtagtctcaaagtattttagagggaatcgatattgatggcaaaagaaaatttgcagctatgcatttgcttctaacggttccctctctgtgaaacattatttttggtgatctaaagaaagcattgcctttcttatttgagattttacagctatactttgttgtgtaatgttatggttccctttctgtaaaatgttatttttggtgatctaaataaagcctgtcttgtttgaaag

SEQ ID NO: 5923 - DNA, 1162 bp, Homo Sapiens
  NM_079421
agagcagaccccgcccggcgaggaggagggagggccgccagtgtcgacatgctgctggaggaggttcgcgccggcgaccggctgagtggggcggcggcccggggcgacgtgcaggaggtgcgccgccttctgcaccgcgagctggtgcatcccgacgccctcaaccgcttcggcaagacggcgctgcaggtcatgatgtttggcagcaccgccatcgccctggagctgctgaagcaaggtgccagccccaatgtccaggacacctccggtaccagtccagtccatgacgcagcccgcactggattcctggacaccctgaaggtcctagtggagcacggggctgatgtcaacgtgcctgatggcaccggggcacttccaatccatctggcagttcaagagggtcacactgctgtggtcagctttctggcagctgaatctgatctccatcgcagggacgccaggggtctcacacccttggagctggcactgcagagaggggctcaggacctcgtggacatcctgcagggccacatggtggccccgctgtgatctggggtcaccctctccagcaagagaaccccgtggggttatgtatcagaagagaggggaagaaacactttctcttcttgtttctcctgcccactgctgcagtaggggaggagcacagtttgtggcttataggtgttggttttgggggtgtgagtgtttgggggacgtttctcatttgtttttctcactccttttggtgtgttggacagagaagggctcctgcaggccacagccacctaaacggttcagtttcttctgcgcctcaggctgctggggcctcagacgagacccaagggcagagcatttaagagtgaagtcatgacctccagggagcctagaagctggtggccttggccggctgtgctcagagacctgaagtgtgcacgttgcttcaggcatggggggtggggggagcgtcccaaatcaataagaaggtagaatgagttatgagttattcatattctgttggaagcttgttttccagtctcttgtacagcgttttaaaagaaatggattctatttattatgctttattggaaaaaatgttgtaataatttaatgtttttacccattaaattaagacttgtgcatgatcaaaaaaaaaaaaaaaaaa

SEQ ID NO: 5924 - DNA, 2548 bp, Homo Sapiens
  NM_079834
ggtgggttgggccgggccggttgctaagacttggcgaagcgctgcgctcgcgcccggatccctcaggcggctgcaggcttcagcctgcgctggttggtgaaacagagatgtcagaaaaggagaacaacttcccgccactgcccaagttcatccctgtgaagccctgcttctaccagaacttctccgacgagatcccagtggagcaccaggtcctggtgaagaggatctaccggctgtggatgttttactgcgccaccctcggcgtcaacctcattgcctgcctggcctggtggatcggcggaggctcggggaccaacttcggcctggccttcgtgtggctgctcctgttcacgccttgcggctacgtgtgctggttccggcctgtctacaaggccttccgagccgacagctcctttaatttcatggcgtttttcttcatcttcggagcccagtttgtcctgaccgtcatccaggcgattggcttctccggctggggcgcgtgcggctggctgtcggcaattggattcttccagtacagcccgggcgctgccgtggtcatgctgcttccagccatcatgttctccgtgtcggctgccatgatggccatcgcgatcatgaaggtgcacaggatctaccgaggggctggcggaagcttccagaaggcacagacggagtggaacacgggcacttggcggaacccaccgtcgagggaggcccagtacaacaacttctcaggcaacagcctgcccgagtaccccactgtgcccagctacccgggcagtggccagtggccttagagggagcctgccctgcccccaccgcccaccacctcctccccttcattcctgctgctacccctggtcccgagggctgggagtacctggggccccatccccccagctgggatggtggaagccggtggtggccacggaccgcccccctcctgccagggccacagaacccgtgttcatctcatccgagagcggagttcctcacaagcactccccagcagcccttggcctctgccgtccacaggacgccctcttgctcccggaaacgtgtggtcacccgccgtccactgcacggctggtacggccttgtcttcaggtctcgaggcctgactccgggggacaggtggcagcaggtcggccgccctcccgtcctcccagagctgctggcgctgaggtcagagcgggtctgatggggagctccgtctcaccggccacccgccgtcaccatggcagatgcccttggccggaactaataagaggcgtcggggccagcttccggtcccctgcagtgatagagggcttggtgcctagctgagtcctcgctgtccccgccatcccctgatctgtgcggctccagcctcgccccctccccacgtgcaccatacctggggagttcctggtccagggtatcctggggccaccctccctgcctccaaaacagggatccctggcaggctgtctttccacgcccctgagttcagagtcggggacccaggccaggtcgggagcacagccgctccccaaacccagcaaaccggcagagagccggtttcccagcagccggagccctgcaggagaggcctttgtgttttgttttgttttgttttttctcttttgagacaagagtttcactctgtcgcccaggctggagtgcagtggtgtgatctcggctcactgcaacctctgcctcccgtgttcaagcagttctcctgcctcagcctcccaaatagctgggattacagttgcctgccaccacgcccagctaatttttatatttttagtacagatggggtttcaccatgttggccaggctggtctcgaactcctgacctcaagtgatccacccgccttggcctcccaaagtgctgggataataggtgtcagccaccgcgcccagcctggagtggccttttatgagaggggacccgtcaaatctgtgccttatggaggggtccggcagcggccacaattgtcttgtcccctcaccccccaactccccctggaacacctctcccaggcaagacattttcacagcaccattcacaacggttgggccaaaaagaaacttttccttcatcatttcctgcactcgctgaccacaactttggacaccccaggctgccacccctccccacccgttcacccccaggatgctgttgctgtaggacgcctgctgccctggagccctccccaggatgtgagccagtcccctcgctggtacggaatgccgctgggtgcccggaggcggccatggtgtctcgatggacggcagccaggatggagcacccatgggtctcacggccatgcttcagggtcttcaggtcctgcccccggccagtctgccaagaggcacccccttccccagcctctcgcctgcactgatgcagacaaaatctcacctggcaggcccaacccccccccacccctcccccgccgtgtgtggcccctcgccgcatcgttggggttttgttatgtgaaaatatcctggaaataaatacatgtttctgcacttagaaaaaaaaaaaaaaaaaaaaaaa

SEQ ID NO: 5925 - DNA, 2296 bp, Homo Sapiens
  NM_079837
gcagagcggcggcttctctcgcgaggacggacgccattatcgcatctccccgacaaacaccacgagaattccgcagcccacacggtgaccaaaagccagccccactgtgagttgaactctttcgtgttgaccggccactctccgtgctctggatgatgtcggaacacgacctggccgatgtggttcagattgcagtggaagacctgagccctgaccacccagttgttttggagaatcatgtagtgacagatgaagacgaacctgctttgaaacgccagcgactagaaatcaattgccaggatccatctataaagtcattcctgtattccatcaaccagacaatctgcttgcggttggatagcattgaagccaaattgcaagccctggaggctacttgtaaatccttagaagaaaagctggatctggtcacgaacaagcagcacagccccatccaggtccccatggtggccggctcccctctcggggcaacccagacgtgcaacaaagtgcgatgcgctgtgcctgggcgtcggcagaacaccattgtggtgaaggtgccgggccaagaagacagccaccacgaggacggggagagcggctcggaggccagcgactctgtgtccagctgtgggcaggcgggcagtcagagcatcgggagcaacgtcacgctcatcaccctgaactcggaagaggactaccccaatggcacctggctgggcgacgagaacaaccccgagatgcgggtacgctgcgccatcatcccctccgacatgctgcacatcagcaccaactgccgcacggccgagaagatggcgctcacgctgctggactacctcttccaccgcgaggtgcaggctgtgtccaacctctcggggcagggcaagcacgggaagaagcagctggacccgctcaccatctacggcatccggtgtcaccttttctataaatttggcatcacagaatccgactggtaccgaatcaagcagagcatcgactccaagtgccgcacggcgtggcggcgcaagcagcggggccagagcctggcggtcaagagcttctcgcggagaacgcccaactcgtcctcctactgcccttcagagccgatgatgagcaccccacctcctgccagcgagctcccgcagccacagccgcagccgcaggccctgcactacgcgctggccaacgcacagcaggtgcagatccaccagatcggagaagacggacaggtgcaagtaatcccacagggacacctccacatcgcccaggtgccgcagggggagcaagtccagatcacgcaggacagcgagggcaacctccagatccatcacgtggggcaggacggtcagcttctagaggccacccgcatcccctgcctcctggccccatccgtcttcaaagccagcagtggccaggtgctgcagggtgcacagctgatcgccgtggcctcctcggaccccgcggcggcgggcgtggatgggtcgccactccagggcagcgacatccaggttcagtacgtgcagctggcgccagtgagtgaccacacggccggggcacagacggccgaagccctgcagcccacgctacagccggagatgcagctcgagcacggggccatccagattcagtgagcggtgcccatggcaccaggagcccctcgccggctccgcctacggcccggcccccacgcgccctgctctcacggcctcggcacaggcagcggctgcacgtgttctgctgaagtgcgtctgaaggccgctgcctccgcggggaacagcatcctatcaactgaaagagcagccgccgccgcccccagccggagacccctttcgtttgagtcctgctgttggtgtcggagcacgaggggaggcacggtgcggagagcgtcgcatatgcgcgggaaatcaagaactatgatatttttctgtttaaacagctttttttaatttgctatggtgtttataacaaaaaagaaaatttgaaaaaaaaaatcccaggggagtagcaggagccctttgctgtgtgctctgtccagtgtcatgagacgggagccctttgctgtgtgctctgtccagtgtcatgagacgggagccctttgctgtgtgctctgtccagtgtcatgagacgggagccctttgctgtgtgctctgtccagtgtcatgaggcaggtgtttgcaaagccagctctcggttccgatggggtattgctgacctacttttctaggggaaatgctcttaaacactgtaattatgcatttctaatgaaataaaatgtatttatgaccacaaaaaaaaaaaa

SEQ ID NO: 5926 - DNA, 1973 bp, Homo Sapiens
  NM_080387
ctttgaaaaagacttcttttgagctaactttcttatactggtacctttctaatctcactacaatatgtaacattggtgttcgatctcaagtatttctgaatatattcccctatccacagaaatatactctgggggaaaaaaaatagaacaaattcttgccgtcctgaccattgaacaagagactaattagacaatggggctagaaaaacctcaaagtaaactggaaggaggcatgcatccccagctgataccttcggttattgctgtagttttcatcttacttctcagtgtctgttttattgcaagttgtttggtgactcatcacaacttttcacgctgtaagagaggcacaggagtgcacaagttagagcaccatgcaaagctcaaatgcatcaaagagaaatcagaactgaaaagtgctgaagggagcacctggaactgttgtcctattgactggagagccttccagtccaactgctattttcctcttactgacaacaagacgtgggctgagagtgaaaggaactgttcagggatgggggcccatctgatgaccatcagcacggaagctgagcagaactttattattcagtttctggatagacggctttcctatttccttggacttagagatgagaatgccaaaggtcagtggcgttgggtggaccagacgccatttaacccacgcagagtattctggcataagaatgaacccgacaactctcagggagaaaactgtgttgttcttgtttataaccaagataaatgggcctggaatgatgttccttgtaactttgaagcaagtaggatttgtaaaatacctggaacaacattgaactagaaactcagaaagtggtccttgtgatggaaagagaaaagaaaaaccaattagaataaggcagaatgtacgtgcgtcattggaacacagaaaacatgctggttcatacagcgtttttagtcataatggtcttttttattttgtttgattcattcgagacaacatgtgtgtatgtgtgtgtgtgtgtgtgtagataatgtggtttttgtatggtgtttgatggaaggaataatctttctttgctttcttagtagtatttcaaggtgtttacttttcaattggtgtgcactgaatgcatgtatggaagaatagcgtgaataatgcaatctctttgtcatttttccccttctcagactcttagctcttaaaattcaaagatgggatattctaactggtagtggtgcatcatttttaacccaaatattgcaagcactttaaagatttgaaaccacatttttattgtttgatgtttcattttcagactttttaatgtcagtcattacaattacattgcatgaggaaaatttttccagaacaacagtgtggaatagttctgaattatgctgttctacagatagaaaaaaagtccaaatgcctttaaaaatttacttcttactccacccaacacgtttttgcaaagcaagaagtctttgtaagacaccttaaacaaagtccttcaattctacagcagaggaaataaaatcccccagaagccaaagggctcaccttcacattgttagttcatgacagacccaggtgtgcttcattagagataacatacattccctttggtatcacaggaagttactggggattactcgacctcattacttagctaacgactggataaaatttcttaattgtttgaagtaacattgtattcgtgtttgcattattaatttgaatagaaaataatcacattttcaacccatttatacaaattgttaatgtttctttagagctgtataactatagtttgaactagcaaggaagttattgttttgacaaccagaaattatgcttttctggtgcatgaaacattaattgcaaagggcagtcacatccaactttaataaaatatggtggtctttcttaaaaaaaaaaaaaaaaaaaaaaaaaaaaaaaaaaaaaaaaa

SEQ ID NO: 5927 - DNA, 1794 bp, Homo Sapiens
  NM_080429
agacagagggagcagtgaatagcaatagggtgtttccaccatggtcttcactcaggccccggctgaaatcatgggccacctccggatacgcagcctcctggcccggcagtgcctggcagagtttctgggtgtgtttgtactcatgctcctcacccaaggagctgtggcccaggctgtcaccagtggagaaaccaaaggcaacttcttcaccatgtttctggctggctctctggccgttacgatagccatctacgtgggtggtaacgtctcaggggcccacctgaatccagccttctccctggccatgtgcatcgttggacgcctcccctgggtcaagctccccatttacatcttggtgcagttgctgtctgctttctgtgcttcgggagccacctatgttctctaccatgatgccctacagaactatacaggtgggaacctgacagtgactggccccaaggagacagcctccatttttgccacctatcctgccccctatctgtccctgaacaatggcttcctggatcaggttctgggcactgggatgctgattgtggggctcttggccatcctggacagacggaacaagggagtccctgcgggtctggagcctgtggtggtggggatgctgatcctggccctcgggttatccatgggtgccaactgcgggattccactcaaccctgcccgggacctgggcccacgtctcttcacctacgtggctggctggggtcctgaagtcttcagtgctggtaatggctggtggtgggtgcctgtggtggcccctctggtgggggccaccgttggcacagccacttaccagctgttggtggctctgcaccaccctgagggcccagagccagctcaggatctggtgtctgctcaacacaaagcctcagagttggaaactcctgcctcagctcagatgctggagtgtaagctatgattaggacaaccctcacttcactcatggaccctggagccagccactgaccccgcctgggaacaacagtcattcttcctctttgttaatgtgccagaacctgggaggcttctctgtttatctgtttggcatcccttcctcctaaactaagaaggatcctggacagggagaagtggaggaggataaggtaccaggactcaggcttctcatcccctcctcccgcaaagcggttttctgaccctcagggcctctcggaatgtagttgctcgaggtaaccgctagagggtgcgcacctggatgctggatggggacggctgcgggcatctgcagggtggagggggccaccatccagtgtagggcacaaccctggggactgccctccatagcctgtcccgactgccgactcctagctctcatcgcctcggcgcctcccaccttcaccctctcggggatgcctccccaagagggtagttaggggtggggaagccgcctccacccagggggcgtggtgggggcggagggaaggagggcggcggggcacagagacagagagcaaggctgtgaaactgaggcaccgttcctagacatctcggtgctgtgtcgttcattcaaggagagttgagatacagtgaaatgagccagggcgaggagggagggtgaaggaacggagggcgggcggctccgaggagcgagagtcgggctgagggcaacctggcgccagggaaaattctggttattcaccacttctacagctctcctgccgctccctgcagaggatgctcgttttgcagagaaggcagtgttcctctattcccttcttccgaattaaaaataccccctcagagcgaaaa

SEQ ID NO: 5928 - DNA, 739 bp, Homo Sapiens
  NM_080430
cgtggcgcagcgactcggaggttcgcctccagcttgcgcatcatctgcggccgggtcccgatgagcctcctgttgcctccgctggcgctgctgctgcttctcgcggcgcttgtggccccagccacagccgccactgcctaccggccggactggaaccgtctgagcggcctaacccgcgcccgggtagagacctgcgggggatgacagctgaaccgcctaaaggaggtgaaggctttcgtcacgcaggacattccattctatcacaacctggtgatgaaacacctccctggggccgaccctgagctcgtgctgctgggccgccgctacgaggaactagagcgcatcccactcagtgaaatgacccgcgaagagatcaatgcgctagtgcaggagctcggcttctaccgcaaggcggcgcccgacgcgcaggtgccccccgagtacgtgtgggcgcccgcgaagcccccagaggaaacttcggaccacgctgacctgtaggtccgggggcgcggcggagctgggacctacctgcctgagtcctggagacagaatgaagcgctcagcatcccgggaatacttctcttgctgagagccgatgcccgtccccgggccagcagggatggggttggggaggttctcccaaccccactttcttccttccccagctccactaaattccctcctgccttaaaaaaaaaaaaaaaaaaaaaaaaaaaaaaaaaaaaaaaaaaaaaaaaaa

SEQ ID NO: 5929 - DNA, 1833 bp, Homo Sapiens
  NM_080476
acgcagcttgaggcgcccgctttccgtcgctccggcccgcctcgccgcaaggctttctgggagccgtagtccccacgtctggcctctccggcgccagcggcagcgcgcgcccacccgcggaactacagagcgtggcgcacagcgcgcgaggctcctccgcctcgccttccctccccgcccgcgcgcccgccccagttatcatggcggctcccttggtcctggtgctggtggtggctgtgacagtgcgggcggccttgttccgctccagtctggccgagttcatttccgagcgggtggaggtggtgtccccactgagctcttggaagagagtggttgaaggcctttcactgttggacttgggagtatctccgtattctggagcagtatttcatgaaactccattaataatatacctctttcatttcctaattgactatgctgaattggtgtttatgataactgatgcactcactgctattgccctgtattttgcaatccaggacttcaataaagttgtgtttaaaaagcagaaactcctcctagaactggaccagtatgccccagatgtggccgaactcatccggacccctatggaaatgcgttacatccctttgaaagtggccctgttctatctcttaaatccttacacgattttgtcttgtgttgccaagtctacctgtgccatcaacaacaccctcattgctttcttcattttgactacgataaaaggcagtgctttcctcagtgctatttttcttgccttagcgacataccagtctctgtacccactcaccttgtttgtcccaggactcctctatctcctccagcggcagtacatacctgtgaaaatgaagagcaaagccttctggatcttttcttgggagtatgccatgatgtatgtgggaagcctagtggtaatcatttgcctctccttcttccttctcagctcttgggatttcatccccgcagtctatggctttatactttctgttccagatctcactccaaacattggtcttttctggtacttctttgcagagatgtttgagcacttcagcctcttctttgtatgtgtgtttcagatcaacgtcttcttctacaccatccccttagccataaagctaaaggagcaccccatcttcttcatgtttatccagatcgctgtcatcgccatctttaagtcctacccgacagtgggggacgtggcgctctacatggccttcttccccgtgtggaaccatctctacagattcctgagaaacatctttgtcctcacctgcatcatcatcgtctgttccctgctcttccctgtcctgtggcacctctggatttatgcaggaagtgccaactctaatttcttttatgccatcacactgaccttcaacgttgggcagatcctgctcatctctgattacttctatgccttcctgcggcgggagtactacctcacacatggcctctacttgaccgccaaggatggcacagaggccatgctcgtgctcaagtaggcctggctggcacagggctgcatggacctcagggggctgtggggccagaagctgggccaagccctccagccagagttgccagcaggcgagtgcttgggcagaagaggttcgagtccagggtcacaagtctctggtaccaaaagggacccatggctgactgacagcaaggcctatggggaagaactgggagctccccaacttggacccccaccttgtggctctgcacaccaaggagccccctcccagacaggaaggagaagaggcaggtgagcagggcttgttagattgtggctacttaataaatgttttttgttatgaagtctaa

SEQ ID NO: 5930 - DNA, 2905 bp, Homo Sapiens
  NM_080539
cacacgcacacacacacacacaaacacacgcgcacgcaaacagcagtgaggaagagaaaagcagagataagcaaggctccgcagcagcctcctttctaacttgaccctcgccagaccctggccagcatggttgtcctgaatccaatgactttgggaatttatcttcagcttttcttcctctctatcgtgtctcagccgactttcatcaacagcgttcttccaatctcagcagcccttcccagcctggatcagaagaagcgtggtggccacaaagcatgctgcctgctgacgcctcctccaccaccactgttcccaccaccattcttcagaggtggccgaagtccgggtccaccggggcttcctggcaagacaggaccaaagggagaaaagggggagcttggccgaccaggaaggaagggtagacctggccccccaggtgttcctggcatgcctgggcccatcggttggccaggccctgaaggacccaggggtgaaaaaggtgacctgggtatgatgggcttgccagggtcaagaggaccaatgggctccaagggctaccctggatccagaggggaaaagggatccagaggtgaaaagggtgacctgggtcccaaaggagaaaagggtttcccaggatttcctggaatgttggggcagaaaggtgaaatgggtccaaaaggtgaacctgggatagcaggacaccgaggacccacaggaagaccaggaaaacgaggcaagcagggacagaaaggggatagtggagttatgggcccaccaggcaagcctgggccttctggtcaacctggccgtccggggcccccaggccccccacctgcaggacaacttataatgggacccaaaggggaaagaggatttcccgggcctccaggaagatgtctttgtggacccactatgaatgtgaataacccttcctacggggaatctgtgtatgggcccagttccccgcgagttcctgtgatttttgtggtcaacaaccaggaggagcttgagaggctgaacacccaaaacgccattgccttccgcagagaccagagatctctgtacttcaaggacagccttggctggctccccatccagctgacccctttctaccctgtggattacactgcagaccagcacggcacctgtggggatgggctcctgcagcctggggaggagtgtgacgacggtaacagcgatgtgggtgacgactgcatccgctgtcaccgtgcctactgtggagatggtcaccggcatgagggtgtggaggactgtgacggctctgactttggctacctgacatgcgagacctatctccctgggtcatatggagacctgcaatgcacccagtactgctacatcgactccacgccctgccgctacttcacctgagggccgtgaggagaaggtgggctgcgccccacagaactggcagcagcttctccactgtcatcaaactggccatgtcctggccccgtctccaccaacctttgtgtgacaaaaacaaggacaaattcctgctactaagacatgctgttaactcagtctgactggaagaatttaggaccactgcatcctgtcttaatccaaggtactggaaaaccttccacatgcccaacctgagacctgttccccatcgctaccatttggccaaacaaccggctacaatgctcttcctcttctggaatgttgctgacccaggccgtggacttggctgagcactgttagacacacacagacctgcaggctgttttagaatgttttgatctctttggggaatctggagtacaggcctctccgcccctgaccaccgaaacgtgcaggcattctcactcacactgggcagcccgctgtcgggtctctctaggcctatgaaccacaaagcagggaagtgggcacgttctctcggggtggctcacagctttgaacctgccaaaggacccctcgactggccacagcccagcccagcctgacgtggatgtggctgcccaggaaaagacttaactgtgaaaaagtactgagaacccacctgacccaggcttgccccaagcagaggctagagaagaggctcctcttctcagtgtttcccaaaggggcggctcttgtggtttcaaaatctctggcaccatcttgacctcttggctctctctgcactttgccccctgtctcaaaaatgtccctcatgtccatttcctgtccaggagactcatgaggactgtgtgacctgcacaagcccacacctgggcaggctgttggtgtctccttggtccttaggcagatactcccctgagtccccgatctagggccagctgcagagggctctctctaggcagagcgttcctggccagagctctacctctttgcctcctgctgacccctgacagcgtcccgtggcatttctttcatgtctgcatattgcatagccttgtcctcctgtgtgcctgagctcctcccttttcaataagattattagtcgtgcatgtctgtgagctgcctttcatcaccatttttcctgagtagggcttagttttattctggaaagacatctccaaggtgaggtccacccccacagcagacctcaagtagaaattgcccaatttttaccagctggagggacacccttgggtttttgtacgaagctatttaatgagcctgtgtcttggggactcagcaggctggagcttggggcctggtggaccatcacctggtgtctgtaggtggacccggtctcccacaggtgacatcaacctgagggtggcgtctttagagacaggcacatgggcagccctgttcccttcgcctctactgcgaggcctggggagatgttgttttcatgctgcttccaccatcacactggggtttctggatgggaaataaaaaaataaaggcagttcatttccccaaa

SEQ ID NO: 5931 - DNA, 2523 bp, Homo Sapiens
  NM_080544
cacacgcacacacacacacacaaacacacgcgcacgcaaacagcagtgaggaagagaaaagcagagataagcaaggctccgcagcagcctcctttctaacttgaccctcgccagaccctggccagcatggttgtcctgaatccaatgactttgggaatttatcttcagcttttcttcctctctatcgtgtctcagccgactttcatcaacagcgttcttccaatctcagcagcccttcccagcctggatcagaagaagcgtggtggccacaaagcatgctgcctgctgacgcctcctccaccaccactgttcccaccaccattcttcagaggtggccgaagtccgcttctctccccagacatgaagaatctcatgctggaactggagacctcgcagtccccgtgcatgcaaggctcgctaggctcccctgggcctcccggcccccagggtccaccggggcttcctggcaagacaggaccaaagggagaaaagggggagcttggccgaccaggaaggaagggtagacctggccccccaggtgttcctggcatgcctgggcccatcggttggccaggccctgaaggacccaggggtgaaaaaggtgacctgggtatgatgggcttgccagggtcaagaggaccaatgggctccaagggctaccctggatccagaggggaaaagggatccagaggtgaaaagggtgacctgggtcccaaaggagaaaagggtttcccaggatttcctggaatgttggggcagaaaggtgaaatgggtccaaaaggtgaacctgggatagcaggacaccgaggacccacaggaagaccaggaaaacgaggcaagcagggacagaaaggggatagtggagttatgggcccaccaggcaagcctgggccttctggtcaacctggccgtccggggcccccaggccccccacctgcaggtcatatggagacctgcaatgcacccagtactgctacatcgactccacgccctgccgctacttcacctgagggccgtgaggagaaggtgggctgcgccccacagaactggcagcagcttctccactgtcatcaaactggccatgtcctggccccgtctccaccaacctttgtgtgacaaaaacaaggacaaattcctgctactaagacatgctgttaactcagtctgactggaagaatttaggaccactgcatcctgtcttaatccaaggtactggaaaaccttccacatgcccaacctgagacctgttccccatcgctaccatttggccaaacaaccggctacaatgctcttcctcttctggaatgttgctgacccaggccgtggacttggctgagcactgttagacacacacagacctgcaggctgttttagaatgttttgatctctttggggaatctggagtacaggcctctccgcccctgaccaccgaaacgtgcaggcattctcactcacactgggcagcccgctgtcgggtctctctaggcctatgaaccacaaagcagggaagtgggcacgttctctcggggtggctcacagctttgaacctgccaaaggacccctcgactggccacagcccagcccagcctgacgtggatgtggctgcccaggaaaagacttaactgtgaaaaagtactgagaacccacctgacccaggcttgccccaagcagaggctagagaagaggctcctcttctcagtgtttcccaaaggggcggctcttgtggtttcaaaatctctggcaccatcttgacctcttggctctctctgcactttgccccctgtctcaaaaatgtccctcatgtccatttcctgtccaggagactcatgaggactgtgtgacctgcacaagcccacacctgggcaggctgttggtgtctccttggtccttaggcagatactcccctgagtccccgatctagggccagctgcagagggctctctctaggcagagcgttcctggccagagctctacctctttgcctcctgctgacccctgacagcgtcccgtggcatttctttcatgtctgcatattgcatagccttgtcctcctgtgtgcctgagctcctcccttttcaataagattattagtcgtgcatgtctgtgagctgcctttcatcaccatttttcctgagtagggcttagttttattctggaaagacatctccaaggtgaggtccacccccacagcagacctcaagtagaaattgcccaatttttaccagctggagggacacccttgggtttttgtacgaagctatttaatgagcctgtgtcttggggactcagcaggctggagcttggggcctggtggaccatcacctggtgtctgtaggtggacccggtctcccacaggtgacatcaacctgagggtggcgtctttagagacaggcacatgggcagccctgttcccttcgcctctactgcgaggcctggggagatgttgttttcatgctgcttccaccatcacactggggtttctggatgggaaataaaaaaataaaggcagttcatttccccaaa

SEQ ID NO: 5932 - DNA, 4540 bp, Homo Sapiens
  NM_080546
aggagacgcgtagccgccgtcgccgccgccgggggatgtggccggcgcctgcctctagccgcgccgcctcttgagtaccagccgccgctgcagccgccgccgccgcctagccgtgcggtgccaggccgcgccctccccgggcgcccgccggctcgcatgccgaggggctccggggcgtagctgcgcgcccggcgccgcctccgggctccttcggccccgccatgggctgctgcagctccgcctcctccgccgcgcagagctccaaacgagaatggaagccgctggaggaccgtagctgcacagacataccatggctgctgctcttcatcctcttctgcattgggatgggatttatttgtggcttttcaatagcaacaggtgcagcagcaagactagtgtcaggatacgacagctatggaaatatctgtgggcagaaaaatacaaagttggaagcaataccaaacagtggcatggaccacacccagcggaagtatgtattctttttggatccatgcaacctggacttgataaaccggaagattaagtctgtagcactgtgtgtagcagcgtgtccaaggcaagaactgaaaactctgagtgatgttcagaagtttgcagagataaatggttcagccctatgtagctacaacctaaagccttctgaatacactacatctccaaaatcttctgttctctgccccaaactaccagttccagcgagtgcacctattccattcttccatcgctgtgctcctgtgaacatttcctgctatgccaagtttgcagaggccctgatcacctttgtcagtgacaatagtgtcttacacaggctgattagtggagtaatgaccagcaaagaaattatattgggactttgcttgttatcactagttctatccatgattttgatggtgataatcaggtatatatcaagagtacttgtgtggatcttaacgattctggtcatactcggttcacttggaggcacaggtgtactatggtggctgtatgcaaagcaaagaaggtctcccaaagaaactgttactcctgagcagcttcagatagctgaagacaatcttcgggccctcctcatttatgccatttcagctacagtgttcacagtgatcttattcctgataatgttggttatgcgcaaacgtgttgctcttaccatcgccttgttccacgtagctggcaaggtcttcattcacttgccactgctagtcttccaacccttctggactttctttgctcttgtcttgttttgggtgtactggatcatgacacttctttttcttggcactaccggcagtcctgttcagaatgagcaaggctttgtggagttcaaaatttctgggcctctgcagtacatgtggtggtaccatgtggtgggcctgatttggatcagtgaatttattctagcatgtcagcagatgacagtggcaggagctgtggtaacatactattttactagggataaaaggaatttgccatttacacctattttggcatcagtaaatcgccttattcgttaccacctaggtacggtggcaaaaggatctttcattatcacattagtcaaaattccgcgaatgatccttatgtatattcacagtcagctcaaaggaaaggaaaatgcttgtgcacgatgtgtgctgaaatcttgcatttgttgcctttggtgtcttgaaaagtgcctaaattatttaaatcagaatgcatacacagccacagctatcaacagcaccaacttctgcacctcagcaaaggatgcctttgtcattctggtggagaatgctttgcgagtggctaccatcaacacagtaggagattttatgttattccttggcaaggtgctgatagtctgcagcacaggtttagctgggattatgctgctcaactaccagcaggactacacagtatgggtgctgcctctgatcatcgtctgcctctttgctttcctagtcgctcattgcttcctgtctatttatgaaatggtagtggatgtattattcttgtgttttgccattgatacaaaatacaatgatgggagccctggcagagaattctatatggataaagtgctgatggagtttgtggaaaacagtaggaaagcaatgaaagaagctggtaagggaggcgtcgctgattccagagagctaaagccgatggcttcgggagcaagttctgcttgaacctagccgacggttatggaaacccattgacattccaaaacaatatatacacataactatgtatttgtgtgtgtgggtgtgtgtatatatgtatatgtatgtgtgtatatatgtatatgtatatacacacacacacataaatcagccaaaatcagagaaaaggaacagggatttaataccttttttatgcttatttttgtcaaacatgtactcctttcatacgggtggcttttacaaggcaacttccgtcatttaatgttttcaactgtaattgtcttaatggaaatgttaaaattcatatctgattaacatttttaataacttagaggagattttaactttatttaaaaataggtaaaattattgtacctaattatgtctaaagtttattcaggggtaatttccctgatgtctgtataaaatcaagatcttattttactgatgcataagtcctagtgggtcaagactaggcatatgctttcagataaataaggaattactccaatcagttttccccaatcaaagaagccatgtcattttacttttagaaacatacaattgggcccaatatgggaattttcataatagttcatacatttgtcagccaacattaaaaggtaaccaactcctcaggtatttgtagtttaccctaacgcttctttaaaagaaagtaggtaaaaaaagaaaagggtagataatctttcgtatgcaaacttttcccttatattttgtctttctttcctttttgactttagtagcatcctccacacatttgtgtgcctgatttgaaaggaagctggggcacccagcgagtttagcctttaagtttctgtgtattgatttgcagattaagtaatgctgggaggaataaagaagggacagaaacatggaacataaagcattgaaaattccggtgcttgggcttcggcttcagagtaacgtcagtggcttagggttaaacggccattttattcaaatgcttgctatacaatctgaaaacacactggcaggtgctcctctccttggcaattcattgagtatccagagttctacgatgtttaactgaagaattggctaatgttttgatcctccagtgtgactgttgtttttgtttgggggtgggtttggggttttttgcttttttattcctgaagcttaccagatatgaatggctaatactccattgttctgcttgttgtaatggtgaatgctttaagaaaaaaaagtgtaatttgctaagaataattcatgatctgtttatgcgataactcctttttgttacaatttttttaaaaaaagctatttttgttaatgtaaagtaaatatttcagagcaaattttttaaacttattgcactaaatacaggctctgtacaaaaaaaaaaaaaaaaaaaaagcctcagcattttatcattccatggaaggagaatcttttgaaagaaagcattgcctcctaccagaactagacagtgaattagatcggtattatggaaatgcatacaagtaatgtcactagggcttaataagcagccgtttgctaatgtgcttcctttcaaagggttggacctttaaattgctgcaaaaggtaaattgtatttttttttaagtattggtgttctttactctagctaggctaaaatttgctaaatgccttggtttcttttaaaagttcatgtaatatttctgatttttcagaatatttgcaataagagtctggattttaaaaaacacatgcatacacacaattaagagctcatgtcttagcaagatctgggaaaccaacattgcgagagtagctattttgaaagaataattctccagaagttaacatctaatatctagtatcaccaaacagtatcgctgttctcttttattcatttgaaatgaatataattatataactaacaattgtccaaatagatgagagagcaaatcatgtgagaaaattcagaataccatctgtttcatagccgcacagattttggactttcacaaacattgggaactaaatttagaattggcaaaagtctagaagatgggtatcaaaacagaagacattccaggagctagcaattttaagaggtgtccctccaaagtgacctgatggaagtcctgaacttggaaattaggttctactcacttggacatccctgcatcatggactgttgctgctccctgttccatatgctcgcaatctcagctatttggaagctaccaggaatgctttctaattatcatttgcaactagaactgtaatcagaaagaaattttgtatttttgtataacttgattgtgtgccattttatataacaggtcctgttttacaaataaattttgttttactaa

SEQ ID NO: 5933 - DNA, 2234 bp, Homo Sapiens
  NM_080548
attggcctggcaggcaggatcgaggaggaagtggctgattactgagcggttcttcctcacctggcttgggccactgtgcacagctgtgccgctggctcagccccgccccctgcggccctctgccgtggcttccccctccctacagagagatgctgtcccgtgggtggtttcaccgagacctcagtgggctggatgcagagaccctgctcaagggccgaggtgtccacggtagcttcctggctcggcccagtcgcaagaaccagggtgacttctcgctctccgtcagggtgggggatcaggtgacccatattcggatccagaactcaggggatttctatgacctgtatggaggggagaagtttgcgactctgacagagctggtggagtactacactcagcagcagggtgtcctgcaggaccgcgacggcaccatcatccacctcaagtacccgctgaactgctccgatcccactagtgagaggtggtaccatggccacatgtctggcgggcaggcagagacgctgctgcaggccaagggcgagccctggacgtttcttgtgcgtgagagcctcagccagcctggagacttcgtgctttctgtgctcagtgaccagcccaaggctggcccaggctccccgctcagggtcacccacatcaaggtcatgtgcgagggtggacgctacacagtgggtggtttggagaccttcgacagcctcacggacctggtggagcatttcaagaagacggggattgaggaggcctcaggcgcctttgtctacctgcggcagccgtactatgccacgagggtgaatgcggctgacattgagaaccgagtgttggaactgaacaagaagcaggagtccgaggatacagccaaggctggcttctgggaggagtttgagagtttgcagaagcaggaggtgaagaacttgcaccagcgtctggaagggcagcggccagagaacaagggcaagaaccgctacaagaacattctcccctttgaccacagccgagtgatcctgcagggacgggacagtaacatccccgggtccgactacatcaatgccaactacatcaagaaccagctgctaggccctgatgagaacgctaagacctacatcgccagccagggctgtctggaggccacggtcaatgacttctggcagatggcgtggcaggagaacagccgtgtcatcgtcatgaccacccgagaggtggagaaaggccggaacaaatgcgtcccatactggcccgaggtgggcatgcagcgtgcttatgggccctactctgtgaccaactgcggggagcatgacacaaccgaatacaaactccgtaccttacaggtctccccgctggacaatggagacctgattcgggagatctggcattaccagtacctgagctggcccgaccatggggtccccagtgagcctgggggtgtcctcagcttcctggaccagatcaaccagcggcaggaaagtctgcctcacgcagggcccatcatcgtgcactgcagcgccggcatcggccgcacaggcaccatcattgtcatcgacatgctcatggagaacatctccaccaagggcctggactgtgacattgacatccagaagaccatccagatggtgcgggcgcagcgctcgggcatggtgcagacggaggcgcagtacaagttcatctacgtggccatcgcccagttcattgaaaccactaagaagaagctggaggtcctgcagtcgcagaagggccaggagtcggagtacgggaacatcacctatcccccagccatgaagaatgcccatgccaaggcctcccgcacctcgtccaaacacaaggaggatgtgtatgagaacctgcacactaagaacaagagggaggagaaagtgaagaagcagcggtcagcagacaaggagaagagcaagggttccctcaagaggaagtgagcggtgctgtcctcaggtggccatgcctcagccctgaccctgtggaagcatttcgcgatggacagactcacaacctgaacctaggagtgccccattcttttgtaatttaaatggctgcatcccccccacctctccctgaccctgtatatagcccagccaggccccaggcagggccaacccttctcctcttgtaaataaagccctgggatcactgtgaaaaaaaaaaaaaaaaaaaaaaaaaaaaaaaaaaaaaaaaaaaaaaaaaaaaaaaaaaaaaaaaaaaaaaaaaaa

SEQ ID NO: 5934 - DNA, 1532 bp, Homo Sapiens
  NM_080590
acagtgcattcatgcagctgggccccaccccatctccagaggcaccttccactagcaacagtctccccaggcacaacacagctaacacaaggccccgcaggcaggactctgggacagacgcaggccagctgcccagagcccagaccaagcatggacgccgtggatgccaccatggagaaactccgggcacagtgcctgtcccgcggggcctcgggcatccagggcctggccaggtttttccgccaactagaccgggacgggagcagatccctggacgctgatgagttccggcagggtctggccaaactcgggctggtgctggaccaggcggaggcagagggtgtgtgcaggaagtgggaccgcaatggcagcgggacgctggatctggaggagttccttcgggcgctgcggccccccatgtcccaggcccgggaggctgtcatcgcagctgcatttgccaagctggaccgcagtggggacggcgtcgtgacggtggacgacctccgcggggtgtacagtggccgtgcccaccccaaggtcacactggcggaattccaggactactacagcggcgtgagtgcctccatgaacacggatgaggagttcgtggccatgatgaccagtgcctggcagctgtgagcagctccggctcagccctgctgccctggcctgtcactccccacccctgccggagacctcccttccctgggccccttctctcctgggcagccacaccacagagcggggaggggcaggtgggggaatggaggctgcaggactggctagaccaggtccctgccggtccaccaggcggaggtgggacaaaggtcctaacaggagtcactggctcaggaccccagggagaaacgctctccccacccacgccatgctgaccagagatcttgcagcccctgtggatgcccccgccgaggtcccccgatccccgcacccggactgctgctccctgcccctcccttgcgggtcccccaggaagccaggtgaccccaggtgggaggctgtgtgtggaggccatcctggaaggaagtttagacctgcccaggtgtggagcgaggggcacaggggcatcctaacctcagaaactgaaataaagcctttgaaaaaaaaatctgtaaaacatcaacccccaatcagaagatggcaaatggggaataaaaatagcaggtaacatgtccagcgggcccagtatctacattctggtgagcggcccgaggctgggagctctgggcgggggcagaccggcggggccttgcagcaggggtgggggtaaagtgcgggtggtggtggagagaacagggctgtggctggaccccagcactggtgacacgctgggtgggagcatgaggccccaggctgctggaggtcctcgcccggggaggtggaggccgttcctggtcaggggcttcctgaggcccctggggcatgcagaggccagggttttagttaaaagtttaatgtagttcccaaatacatttcatatgacaatcttacataaatgttccaaaacacaaaaa

SEQ ID NO: 5935 - DNA, 1278 bp, Homo Sapiens
  NM_080592
ggaggggcccgagtttctgcgaagccgcgacctcggcgtccggacgcggggaacaccgggctgagggagtctgcagtcggctccgggaagccgcgcggcgacgggggaggccttcactaaaggggaaaaggaagagggggtcggccagtatccccgaaagagggctagggcgcatgaagaccagcgcagagctccacgagcaggaaaagcccccaagcagccccagggcgactggaccgggccgcttaggccacgcccggggaagagggcctgacgcgctgcggggcggggccgcggggccgggtcgcgcgagcagcggagcaccaagggaacggaaaatggcgcctcacgacccgggtagtcttacgaccctggtgccctgggctgccgccctgctcctcgctctgggcgtggaaagggctctggcgctacccgagatatgcacccaatgtccagggagcgtgcaaaatttgtcaaaagtggccttttattgtaaaacgacacgagagctaatgctgcatgcccgttgctgcctgaatcagaagggcaccatcttggggctggatctccagaactgttctctggaggaccctggtccaaactttcatcaggcacataccactgtcatcatagacctgcaagcaaaccccctcaaaggtgacttggccaacaccttccgtggctttactcagctccagactctgatactgccacaacatgtcaactgtcctggaggaattaatgcctggaatactatcacctcttatatagacaaccaaatctgtcaagggcaaaagaacctttgcaataacactggggacccagaaatgtgtcctgagaatggatcttgtgtacctgatggtccaggtcttttgcagtgtgtttgtgctgatggtttccatggatacaagtgtatgcgccagggctcgttctcactgcttatgttcttcgggattctgggagccaccactctatccgtctccattctgctttgggcgacccagcgccgaaaagccaagacttcatgaactacataggtcttaccattgacctaagatcaatctgaactatcttagcccagtcagggagctctgcttcctagaaaggcatctttcgccagtggattcgcctcaaggttgaggccgccattggaagatgaaaaattgcactcccttggtgtagacaaataccagttcccattggtgttgttgcctataataaacacttttttctttttttttcctctctttctttttaaaaaaaaaaaaaaaaaaaaaa

SEQ ID NO: 5936 - DNA, 863 bp, Homo Sapiens
  NM_080593
cccattacttcccgttttctcgatctgctgctcgtctcaggctcgtagttcgccttcaacatgccggaaccagcgaagtccgctcccgcgcccaagaagggctcgaagaaagccgtgactaaggcgcagaagaaggacggcaagaagcgcaagcgcagccgcaaggagagctactccgtatacgtgtacaaggtgctgaagcaggtccaccccgacaccggcatctcctctaaggccatgggaatcatgaactccttcgtcaacgacatcttcgaacgcatcgcgggtgaggcttcccgcctggcgcattacaacaagcgctcgaccatcacctccagggagatccagacggccgtgcgcctgctgctgcccggggagttggccaagcacgccgtgtccgagggcaccaaggccgtcaccaagtacaccagcgctaagtaaacttgccaaggagggactttctctggaatttcctgatatgaccaagaaagcttcttatcaaaagaagcacaattgccttcggttacctcattatctactgcagaaaagaagacgagaatgcaaccatacctagatggacttttccacaagctaaagctggcctcttgatctcattcagattccaaagagaatcatttacaagttaatttctgtctccttggtccattccttctctctaataatcatttactgttcctcaaagaattgtctacattacccatctcctcttttgcctctgagaaagagtatataagcttctgtaccccactggggggttggggtaatattctgtggtcctcagccctgtaccttaataaatttgtatgccttttctcttaaaaaaaaaaaaaaaaaaaaaaaaa

SEQ ID NO: 5937 - DNA, 2258 bp, Homo Sapiens
  NM_080594
ggaaaggggcggggcacgggcgcgttaacaccctccgcgccggaggacgagcctcggtcatcgcgctgccctcccaggttcaacaggctacccatgtgcccgctccagtaagcgtgcaaccagcccggtcagtcccagggactttaccggctaggagacaccttgaacgtccccagcgcgactcccacaaactgccttgactctttaacgcttcctcgctggcgcccattgggccaggcgtttacgtcatcgctgcgcgccgggcggcggcgacttcccgctccttgactctgacgtcagagcggcgccggcctcggcggctgaggaaagcaggaggaggtggcggcggcgggaagatgctgctctttggcgtaaattgcaatcgattagggatcgtttctcagaatcaagttagaagtgagagttcagataagtgaggccgccattgctgctttgaacacctcagaaggggagaatggatttatcaggagtgaaaaagaagagcttgctaggagtcaaagaaaataataaaaagtccagcactagggctccttcacctaccaaacgcaaagaccgctcagatgagaagtccaaggatcgctcaaaagataaaggggccaccaaggagtcgagtgagaaggatcgcggccgggacaaaacccgaaagaggcgcagcgcttccagtggtagcagcagtaccaggtctcggtccagctcgacttccagctcaggctccagcaccagcactggctcaagcagtggctccagctcttcctcagcatccagccgctcaggaagctccagcacctcccgcagctccagctctagcagctcttctggctctccaagtccttctcggcgcagacacgacaacaggaggcgctcccgctccaaatccaaaccacctaaaagagatgaaaaggagaggaaaaggcggagcccatctcctaagcccaccaaagtgcacattgggagactcacccggaatgtgacaaaggatcacatcatggagatattttccacctatgggaaaattaaaatgattgacatgcccgtggaaaggatgcatccccatctgtccaaaggctatgcgtacgtagagtttgagaatccagatgaagccgagaaggcgctgaagcacatggatggaggacaaattgatggccaggagatcactgccaccgccgtgctggccccctggcctaggccaccccccaggagattcagccctcccaggagaatgttgccaccaccgcctatgtggcgcaggtctcccccacggatgaggagaaggtcccgctccccgaggcgcaggtcccccgtgcgccggagatcacggtccccgggccgccgccgccacaggagccgctccagctccaactcctcccgataaacaggccactgaagctctcgcccctgtaacttataccccacccagctcagttttgtcacttttctagccaaaggaagaccagtaggaaagcaaacccttgactctggcaggatttgcaggcagcaggcagcacccctctgccagccgggccccggctgcagaagtgctgttggtttggatgctgtgtgcctgtcaagattccctccggttttctggctagaaagctcatccgtttccggtttctaagagtcagttcagtggcagagccaccagggaaaagtgaggctcttgggggtggtttgaccctgcttacctgggagcacacttttcccttccccgatgacctgggatggtggccaggccgtgcccttgctgttgctgggcagtgtccttttggaaagggagctgccccaggctttagtgcagctgccaaccctgttaggcctggcctctcgaggcctcttctgacctcaagggtcacaccccctcaaagatcctctcacccatggtagttgctgctcgtggttctgtctgtccgtgcaccgatgcacacaccgcaccccaccactgtactctgaaattggcgagtgagtggagagccagctctgcggagtcatcacgcagccatggttgtgcctgccgttcatggtggtctttcaggttatcttggcaacatgtacattgcttttattttttttcttttttgctttcattgtacagtcagtactataaaatttctcttttgagttttatacctttgtagcattttagatgacattgtgtttgtactttgttgtgtagagtggaagaattgtgttgaataaacccaagatcggaatgcaaatctagttctgggttcactgcc

SEQ ID NO: 5938 - DNA, 2783 bp, Homo Sapiens
  NM_080604
agatgacgcgacacgccaagtgcgtggggattcccgcggccctggccactacccggcctgccccgcggcaagatggcggcctgaacgcagctggcagcggcggaaagcttagatcagcctttccacagctgttagcagcatctgccccaatttcagctgaagattcaggtgccccagggactggaagaaattacagtgcctacttggaaagaagaagagatagcgacttgccccagtccaaccccagagcgggagctgtggctaaaggaagtggaggggccgtgggatgcggagagccgagggctaactcccggacagcggaacagagagagctgccgacaaacagacgtccagagtccttctggccacatctctgagcctgcctccttcttgcttctcagcaggcggaggagccgtcacctcccagaatgactagtgccgcccctgctaagaaaccctaccgtaaggcaccaccagagcatcgggagctgcgtttggaaattcctggatcccggcttgagcaggaggaacccctgactgatgcagaaaggatgaagctcttacaggaggagaatgaagagcttcgccggcgcctggcctccgccaccagacgcactgaggccctggaacgtgagctggaaattgggcaggactgcctggagctggagctgggccagagccgcgaggagctggacaaatttaaggataagttccgcaggctgcagaacagctacacggcttcccagcggaccaaccaggagttggaggacaagctgcacacactgatcaagaaggctgagatggataggaagacgctggactgggagattgtggagctgaccaacaagctgctggatgccaagaacaccatcaacaagctggaagagctcaatgagcggtaccggctggactgcaacctggctgtacagctcctcaagtgcaacaagtcccacttccgaaaccacaagtttgccgatctgccctgtgagctacaggacatggttcggaaacatttgcacagtggtcaagaggccgccagcccaggtcctgctcccagcctagccccaggggctgtggtgcctacctcagtcattgcccgagtgttagagaagccggagtctctactgctcaattcagcccagtcaggcagcgccgggcgccccttggctgaggatgtctttgtgcatgtggacatgagtgagggtgtcccaggtgatccagccagtcccccggcccctggcagccccaccccacaacccaatggggagtgccactctctgggtactgccaggggctccccggaggaagagctgcccctgccagcctttgagaagctgaacccctacccaaccccgtctccaccacacccactgtatcctggccgcagggtaatagagttctctgaggataaggttcggatcccccgcaacagccccctgcccaactgcacttacgctacccgccaggccatttccctgagcctggtagaggaggggagtgagcgggcccgccccagcccagtgcccagcacccctgcctcagcccaggcctcaccccaccaccagcccagcccagcacccctaacactcagtgccccagctagctctgccagctctgaagaggacctgctggtcagctggcagcgggcatttgtggaccgtactccaccacctgctgctgtggcccagcgcacagcctttggacgcgatgccctccctgagctgcagcgccattttgcccatagccccgctgacagagatgaggtggtccaggcaccttctgcccgacccgaagagagtgagcttttgctacccacagaacctgactctggctttcccagggaggaagaagagctgaacctgcctatcagtcctgaggaagagcgccagagcctgctgcccattaacaggggcacagaggaggggccaggcacttcccacaccgagggcagggcctggccactccccagctccagtcgcccccagcgcagccccaagaggatgggggttcaccacctgcaccgcaaggacagcctgacccaggcccaggagcagggcaacctgctcaactagggcccctgctggccttcctgccattgctgcaccaggactgcaaggagtccccacaccttggcagctcagggtccccagtccaagcccttgacctctcctctatccagacccgcacagctgtttcctgtgtggatggggtcaggttgtgggccatgccaggcctgtcagctgcgttgactgactgcagcagcttgcctcatggttttccctttttcttagaatatttattcttcagaggtaacatgcagttgggtctcaagacctttcctccaatcagcccaacccagcccagactgggcttttctggggagctgaggagtttatcagtattcatcttccatcctttcatagtcacaagttttgttattttgtttttttttgggggtgatggtgtaattgttaacctcatttccgtttcctacctgtttgcttccccccccagtcctccgcatgagctgttgccctccaggggcctggcacagctggccttggggacgagggagaggactgattcagggccccctcagctgtctcctccctccctctggaaaggagggtggggctcaggggcctcaagctgggctctgtgtgaggcctggcccccactcccaaccttggctctagactgttactcttaagctttgagaaattttcacattgatgactattttaaaatcaaataaaactattttactggtatgaaaaaaaaaa

SEQ ID NO: 5939 - DNA, 2793 bp, Homo Sapiens
  NM_080605
ggcctgggccgccggcccggcgcgggcgccatgaagctgctgcggcgggcgtggcggcggcgggcggcgctaggcctgggcacgctggcgctgtgcggggcggcgctgctctacctggcgcgctgcgcggccgagcccggggaccccagggcgatgtcgggccgcagcccgcctccccccgcgcccgcgcgcgccgccgccttcctggcagtgctggtggccagcgcgccccgcgccgccgagcgccgcagcgtgatccgcagcacgtggcttgcgcggcgcggggccccgggcgacgtgtgggcgcgctttgccgtgggcacggccggcctgggcgccgaggagcggcgcgccctggagcgggagcaggcgcggcacggggacctgctgctgctgcccgcgctgcgcgacgcctacgaaaacctcacggccaaggtgctggccatgctggcctggctggacgagcacgtggccttcgagttcgtgctcaaggcggacgacgactccttcgcgcggctggacgcgctgctggccgagctgcgcgcccgcgagcccgcgcgccgccgccgcctctactggggcttcttctcgggccgcggccgcgtcaagccgggggggcgctggcgcgaggccgcctggcaactctgcgactactacctgccctacgcgctgggcggcggctacgtgctctcggccgacctggtgcactacctgcgcctcagccgcgactacctgcgcgcctggcacagcgaggacgtgtctctgggcgcctggctggcgccggtggacgtccagcgggagcacgacccgcgcttcgacaccgaataccggtcccgcggctgcagcaaccagtacctggtgacgcacaagcagagcctggaggacatgctggagaagcacgcgacgctggcgcgcgagggccgcctgtgcaagcgcgaggtgcagctgcgcctgtcctacgtgtacgactggtccgcgccgccctcgcagtgctgccagagaagggagggcatcccctgagccgccgcggcccggccctccgggacacctgcttcacccggcggcgccttggggcaggtgccgagcgggcgcactacgcccgggccccaaggcccccgtcccgcagccacgcttgtggtcgctgcgtcccggtctgcgtttgggagacccctgggggttgccggggcagcgcgccgtgtccaggtggaggtgcccgttcctggacctcagcgagcctgagccgggcccggccgcacgctgacccccgtgctgtccccgaccggctcacggggctgggctccgatcttccgtgtctcttatcagtggcgtttctcacgtctgcgtctcagatctaacgtggtttcacatcaatccgctttcatgggattttggtctctgtccagtgacttcgtggtaaatgtaactcagtgtttgcttgcgacttatttataaatattgtaagtttgtgtcgatgagtgtaagttggcagtgcgcacgtctcggtttttttacatgatttaaggaaagacttttatgtcagaacttggtgcctgtaccgtcaaccccgctgctgcccgtgtttaaacgcaggagaactttaaaactggccatctatcttttcagtgtacaagtcactgaacccattgtttctttctgaagagactttcctttcaaggcttcccatgggtccgcgccacacagggccggtgctgctttatttcagactctgccccaggttccaggaatccgaaccccggagtgctgacgcggttccccaacttccgccttaagaaaacaggaccagccggcaccaggcccgtctctcacgtactttaacacatccttgaaagcccctcgtttaatgagaaaagcgaacactgcggtccttgccaaagtaaaatgaagctgccccaggacaaggggttaccatgagctccctggagtccgacgcgggttttctctctgggggacctgggtggtccccgctgtggtctttgttgtcccactttgggaccgggtccagtctggggtctagtctcgagcatcagggtcaggctcggggcagggctgggttaggctccgggtcagtcttgccatgggtttgggagcaggtttgggttacttgcgtttgaaggcagcagtggtctcaggaggaagaaacgggggcgggagagagtggtgatctgtggtcagtgggtcagtgacctgcacggtgattctcccacctccaaaaggtaggggtgggactggaggcgtccctaggtcaggccgttgagttcgagctccgatgggccaccttgaatccaggactgaccgcccgtgtgtgcacagtttgttcttggacgaggactcgtgaggatcgagggctggggaccccggtgtgagcaggatggggccctgccctcccgtgggagttgtggactcgagcccaggggctgcccgtcacagcggtgtcccaggtccctgccatccgattttacctgggatgtcttctctggagtttggaattgcttgaggaaccctgcgtgtgcttggagaggccagagggcttgctgagaaccccatggacagtggagagcgggattcgaaccaagggctggactcccacacctctggcctgcgtcgcccagttctttgtggctctgaagaattggccgctgtggaaaagagcaaatgtccgagacccccaacaggaagagtctaaaaatccagtttgcaaccacttctgacctacaaaaaaatggaaatttagtgtttttcagcctaagacattaaatttcatatcagaacaaa

SEQ ID NO: 5940 - DNA, 2196 bp, Homo Sapiens
  NM_080621
acacagggctcggcggcaggtgcctcgtcgcgcacactcgcgggccgcggggaccggctcgggcgcggggccggctggggcggggcggggcggcggcgcgcgttccccgccggccacaccggccgccctgcactcggcgaggggcgtgtgcgcgggcctggcacccgcgggccccatgttcaccgagctgaggtccaagctgagccccccgcgtggccgcgccggggccgtgcgcgcgggcttcggggagcgccgggatgtggacgccactgcccacttcagcttctgccggaccctcctggagcacacggtgtcagctgagagcatcccctgccacttgcctcggacacctggcaccagcctcacgtggcatgactcccgcagccagagggcggccagcagcaggccaatcaagctcctgcagcagcccggcacagacaccccccagggccggctgtactctgaccactatggcctgtaccatacaagcccctcgctgggtggcctgacccggcccgtggtcctgtggagtcagcaggacgtctgcaagtggctcaagaagcactgtccccacaactacctcgtctacgtggaggccttctcccagcatgccatcaccggccgggcactgctgcggctgaatgcggagaagctgcagcggatggggctggcccaggaggcccagaggcaggaggtgctgcagcaggtgctccgcctgcaggtgcgtgaggaggggcggagcctgcagctgctcagccaagcttccttcgggaaaatgtcctagctgctgctgaggcttgaacccagaccccagcactgtgatgggagtccacggctagggaggaggccaagctggccccgcagcgcctcttggaccctgcgggatgccggggcggccaggctggcccaacggacagacaggaccaggatcacacctccaggcgcctctggttggacattccaggtcgtgccctggggctgggtgggtagggggctgcttgagtgtggccccacctcctgggacctgagcccaagccctcccctggtgcagctggcagcatgtggggcagctgcctggagccagaaccggtttggatgtcccccctagactcccagggagtctgtttatttacattcccctctccacgtgatgtcggtcccccatcgcctgctgagtcacttgtctgtccacccacccagcccagttctaggtcgttccccagcacctccaggttggcccacacaggtaccataagctgcctcggctccctgtggcttgtgcccatgcacctgccagggcccagcaggccaacccatcatctagagtagtggccatcagcacccgcctaacgggcaccatgccaagcactttcatcattatttatacatcgtcaccacaccccctctattcatgagaagtaaagctgagaaaggaccagattgaccaagcgccagagacaaaatgtggcacaacgagaaccccagccctgtccaggtggctccgcgcccagggcccaggcttagcagtgctccctgccctatctttgggaaaatcttgcttttatggtcttcccccctcgccctcaagaacaagggccttgtgcgtgggccttcccattgctgctttcccaagaaggcctggattcaggggagaggccttcccagggccactccccttacaccctcccagaggcctgagcaacccctctctgggtggtttggggctggtgctgcctggcggaaggacagtgagggcggccctagccgcctccaccctcttgcgcctctgccctctcccagtccccctgtggcttctgaaaatctcagggacagatgaggctgagcccctagtcccctctgtgtgctttgagcctccagactcgaggctggtcactgcaggtcccaggtggaatttggacaactggcctggccgctcccatcctgtaagcccccaccacggggagaccctcatccctgcccctgtgtggctgcgcaagtattctgcccgcctcccaccatcagccttcgcccaaggggcccttctgcctctgcttccctcccttctcctctgtcttgccctggcccacgcacgcctgtctcgtcttccttgttttgctgcactcacttttttatactctgacaaaaaaaaaaaatcagaaataaagctggttcccaagtgctaaaaaaaaaaaaaaa

SEQ ID NO: 5941 - DNA, 2532 bp, Homo Sapiens
  NM_080625
gggacatttcaccatggaatatgaagtcaagaaagggaagaagggctttgtatcccccatccgaaggctggtgttccccaaggccgggcgccgggcagcctgtaggagcagcgtgagccgccggcccctgcactcgatgcccctttatccccccgactacctcatcgacccccagattctgctgtgtgactacctggagaaagaggtcaagttcctgggccaccttacctgggtgacttcctcactgaacccctccagtcgggacgagctcctgcagctgctagacaccgccaggcagctgaaggagctgccgctgaagaccacggcggagcaggacagcatcctgagcctgtctgcccgctgcctgctgctcacctggcgcgacaatgaagagctcattctgcgaatccctacgcacgagatcgccgccgcctcctacctgcaggacgacgcgctgcacctgctagtgctcaagaccggtctgggtgtggacccggtgccggccggcgtggatgccagcccaggcggcgcaggacgcgaccccggcccgccaggcggggcgcccgagaagcggcgggtgggcaccgcggagcggcgccacaccatctgcagcctggactggcggatggggtggggtgggggcgccgcggaggcccgggccgggggaggcggcggcggcagcttggagcgccagcgcgccggggcgcgggcgtcgggcagctgggagcgacggcagacgttcagcggcagctgggagcggcggcacggaggcggcggcggcggcggcggcgcgggaaagccgggcggtagctgggagcggaggcaggcgggcagcggcgggggaggcagctgggagcggcgccaccccggccccaacccgctcgacccgcaggaccccagccccgacgcctactgcaacctggtcatcctggctgtagccaacagggacgctgcagaggagtcctgcgcactcatctgtcaggtcttccagatcatctacggggaccagagtattgagtgtgtggaccgggctggctaccactacacatccacacctgaacggccatggctctgcagccgcataatggctcccaggacacctttgaagcatgttacagcggcacgtccacaccttctttccatggctcccactgcagcggcagcgaccacagcagtctgggcttggagcagttacaggattacatggtcacgttgcggagtaagctggggcccctcgagatccagcagtttgcgatgctgctgcgggagtaccggctggggctgcccatccaggactattgcacaggcctgctgaagctctacggagaccggcgcaagttcctcctccttgggatgcggcccttcatcccggaccaggacatcggctacttcgagggcttcctggagggcgtgggcatccgcgagggcggcatcctcactgacagcttcggccgcatcaagcgcagcatgagctccacgtcggcctccgcagtgcgcagctacgatggcgcggcgcagcggcccgaggcacaggccttccaccggctgctggctgacatcacgcacgacatcgaggcgctggcccccgatgacgacgacgacgacgaggatgagccccggggctccaggggcgggagcgacgccgcagaagacaactacctgtagccaccgcccctgcggacggcgtggctcagcagcccacctctgagtctcagctttgcttcggggaccctatccccagggcccccccatcacacctggcggggccggggggtcttcactccagggtctcgctccctgcccttggggcccggggccatgcagtacctggagtgtcctgcagggggaaagcgaagccgggccctgaagtccggggcagtcacccggggctcctgggccgctctgccgggctggggctgagcagcgatcctgctttgtcccagaagtccagagggatcagccccagaacacaccctcctccccgggacgccgcagctttctggaggctgaggaaggcatgaagagtgggctccacctgctggccgactgagaaaagaatttccagaactcggtcctattttacagattgagaaactatggttcaagaagagaggacggggcttgagggaatctcctgattctccttatatgacctcaaactgaccatactaaacagtgtagaaggtctttttaaggctctaaatgtcagggtctcccatcccctgatgcctgacttgtacagtcagtgtggagtagacggtttcctccacccagggttgactcagggggatgatctgggtcccattctggtcttaagaccccaaacaagggttttttcagctccaggatctggagcctctatctggttagtgtcgtaacctctgtgtgcctcccgttaccccatctgtccagtgagctcagcccccatccacctaacagggtggccacagggattactgagggttaagaccttagaactgggtctagcacccgataagagctcaataaatgttgttcctttccacatcaaac

SEQ ID NO: 5942 - DNA, 1272 bp, Homo Sapiens
  NM_080626
ggcgcagcagcggcggcggcggctgtgggtaaaggcgcggcgcgcggcccccgagcgcgccaaccttgccctagccggagcccgctgcggcccagcgcacggccctcaccccgcatcgcgaccccgcgccccgccggccgagcatgggcgcgcgcgcctcaggcgggcccctggcccgggccgggctcctgctgctgctgctgctgctgctgctgctcgggctgctggccccgggcgcgcagggggcgcggggccgcggcggcgcggagaagaacagctaccgccgcacggtcaacaccttctcccagagcgtcagcagcctgttcggcgaggacaacgtgcgcgccgctcagaagttcttggccaggctgactgagagatttgtgctgggagtggatatgttcgtggagacactgtggaaagtctggaccgagctcttggatgttcttggacttgacgtctccaacctgtcccagtatttcagcccagcctcggtgtccagcagcccggcccgcgcgctcctgctggtcggcgtcgtcctcctggcctactggttcttgtccctgaccctgggcttcactttcagcgtcctgcacgtggtgttcggccgcttcttctggatcgtgcgggtcgtcctgttttccatgtcctgcgtgtacatcctgcacaagtacgagggcgagccggagaacgcggtgctgccgctgtgcttcgtggtggccgtctacttcatgaccgggcccatgggcttctactggcgaagcagtcccagcggccccagcaaccccagcaaccccagcgtggaggagaagctggagcacctggagaagcaggtcagactgctcaacatccgtctcaaccgggtgctcgagagcctggaccgctccaaggacaagtgaaggtcagccggccgggcgggtccacagttaccagcacgctgtctcagaaaacgaaaacggaggaaaaaaaccccaaaccccaaacaatcttaataaacacgactgagcaagaaagtggcgctgtgtagggctatttccacccacccggcagctcttaggacacattcccagaagagcggaaagatcattgacgtggaactacacacgaagtgtaattagtgggggaaaaaatattttttaaacaaaggatataaccatatttagttgtacagtaagagaaatttatctgtgcatagagcataaagttaattttttcaagcatttaaatacatcttttgtaaggttttttaataaaggcagattgagtcaagtt

SEQ ID NO: 5943 - DNA, 2404 bp, Homo Sapiens
  NM_080632
gcatttgttgggggcggagctttgacgggagcttcccgggagccgtttgtgcccggggtaaccccgttccggccaagccgcttcagcgggggacgtagccatgaaggaagagaaggagcacaggcctaaggagaagcgagtaaccctgttaacccccgccggggccacaggcagcggtggtgggacctcgggggacagctccaagggggaagataagcaggatcgcaacaaggagaagaaagaagcgctgagcaaggtggtaattcgaagattacctcccactttgaccaaggagcagcttcaggaacatcttcaacctatgcctgagcatgattattttgagtttttttctaatgatacgagtttgtatcctcatatgtatgccagagcatacatcaactttaaaaaccaagaggacattattttgttcagggatcgctttgatggttatgtattccttgacaataaaggtcaggaatatcccgctatagtagaatttgcaccttttcaaaaagctgcaaaaaagaagactaagaaaagagataccaaagtcgggactatcgatgatgatccagaatatagaaagtttttggaaagttatgccacagataatgagaaaatgacatctactccagagacactgctagaggaaatagaagcaaaaaatagagaattaatagctaaaaagacaaccccacttttgagcttcctgaaaaacaagcagagaatgagagaagaaaagagagaagaaaggaggaggagagaaatagaaagaaaaagacaaagagaagaagagaggaggaaatggaaagaagaagagaaacgaaaaaggaaagatatagaaaagctaaagaagatagacagaattccagaaagggacaaattaaaggatgaaccaaagattaaggtacacaggtttctgttacaagctgtgaatcagaaaaatctgctcaagaagccagaaaaaggagatgaaaaagaattggacaaaagagaaaaagccaagaaattggacaaagagaatctcagtgatgaaagagccagtgggcaaagttgtacattgcccaagcgttctgatagcgaacttaaagatgaaaaaccaaagagacctgaagatgagagcggcagagactatagggagagggaacgggaatatgaacgagatcaggagcgcatacttcgagaaagagagaggctgaagcggcaagaagaagagcgccgtaggcagaaggagcgctatgagaaagagaagacttttaagagaaaagaagaagaaatgaaaaaagagaaagacacacttcgggataaaggaaagaaggctgaaagtacagaatcaataggcagctcagaaaaaactgaaaagaaagaagaagtggtcaagagagatcgaataagaaacaaggatcgtccagcgatgcagctttaccaaccaggagctcgaagccgaaatcgactctgtccccctgatgacagcaccaagtctggagattcagcagcagaaaggaagcaggaaagtggtattagccatagaaaagaaggaggagaggagtgataagtccagatggccttaggtgtcctgactgtctaggcagccaaagagcacacgttaagcaatccagaggtgccttcagggcaaagaatagagagaaagggagccgctgtgctggtggggtacactgcagaggagtaagtcttgtgtcaaagcaggaatctgatcagaggttcagaattggaagtacaatttcattgcttttgcaatttctacaaattaattttaaagtgtcagaaaaaggtgacggcaaggacatgcattgcaatttgcagggggaattgtcaagtgaggacttcatcacatatgacacgagagaaaagtaagagctggttctaaaatcaaaagctgttgttcatcctgaattgaattttctgaatttgggtggagcagagtcgctttgaagccttgttccgatctaattctattgtattgttgatgataagtgttgacattgggtagtgtagaagcaacaagcatgtccttgtagtacaggtacagtgaaggatagaacacactttcgttgatacaaaaatttaaatagttatgttacttctgtatccagtgtcctaaagttttaggattagttttagttttttgtttgcttatatgagcttagcgtaaagaatatttttaaacttcgtgttttgtcatcagcatcttttctattaagaggtaaaatgtagtccttgtttgactcttgacaatccagtgtgtttgatcttaggtctcatgatctgagtgcataccctctccaggaaggaaactgcaccagtgtctattcctgttaaatagcaacttttagtctcagcttgtttcgttttgatgtcaataaatagtaacagcattcaagtg

SEQ ID NO: 5944 - DNA, 1511 bp, Homo Sapiens
  NM_080649
cagacagaccaatcacgcgcattcttcggccacgacaagcgcgcctctgatcacgtgaccaggtccgctacccacgtgggggctcagcgtgcacccttctttgtgctcgggttaggaggagctaggctgccatcgggccggtgcagatacggggttgctcttttgctcataagaggggcttcgctggcagtctgaacggcaagcttgagcaacgcggtaaaaatattgcttcggtgggtgacgcggtacagctgcccaagggcgttcgtaacgggaatgccgaagcgtgggaaaaagggagcggtggcggaagacggggatgagctcaggacagagccagaggccaagaagagtaagacggccgcaaagaaaaatgacaaagaggcagcaggagagggcccagccctgtatgaggaccccccagatcagaaaacctcacccagtggcaaacctgccacactcaagatctgctcttggaatgtggatgggcttcgagcctggattaagaagaaaggattagattgggtaaaggaagaagccccagatatactgtgccttcaagagaccaaatgttcagagaacaaactaccagctgaacttcaggagctgcctggactctctcatcaatactggtcagctccttcggacaaggaagggtacagtggcgtgggcctgctttcccgccagtgcccactcaaagtttcttacggcataggcgatgaggagcatgatcaggaaggccgggtgattgtggctgaatttgactcgtttgtgctggtaacagcatatgtacctaatgcaggccgaggtctggtacgactggagtaccggcagcgctgggatgaagcctttcgcaagttcctgaagggcctggcttcccgaaagccccttgtgctgtgtggagacctcaatgtggcacatgaagaaattgaccttcgcaaccccaaggggaacaaaaagaatgctggcttcacgccacaagagcgccaaggcttcggggaattactgcaggctgtgccactggctgacagctttaggcacctctaccccaacacaccctatgcctacaccttttggacttatatgatgaatgctcgatccaagaatgttggttggcgccttgattactttttgttgtcccactctctgttacctgcattgtgtgacagcaagatccgttccaaggccctcggcagtgatcactgtcctatcaccctatacctagcactgtgacaccacccctaaatcactttgagcctgggaaataagccccctcaactaccattccttctttaaacactcttcagagaaatctgcattctatttctcatgtataaaactaggaatcctccaaccaggctcctgtgatagagttcttttaagcccaagattttttatttgagggttttttgttttttaaaaaaaaattgaacaaagactactaatgactttgtttgaattatccacatgaaaataaagagccatagtttcaaaaaaaaaaaaaaaaaaaa

SEQ ID NO: 5945 - DNA, 2139 bp, Homo Sapiens
  NM_080650
gctgcggcgcgacctcctggctcccgcccgcgctcgccgcacgcacgcgcactgcgcccagcatgagggtcgcggctctgatcagtggtgggaaggacagctgctataatatgatgcagtgcattgctgctgggcatcagatcgttgctttagcaaatctaagaccagctgaaaaccaagtggggtctgatgaactggatagctacatgtatcagacagtggggcaccatgccattgacttgtatgcagaagcaatggctcttcccctctatcgccgaaccataagaggaaggagcttggatacaagacaagtgtacaccaaatgtgaaggtgatgaggttgaagatctctatgagcttttgaaacttgttaaggaaaaagaagaagtagaggggatatcagtaggtgctatactttctgactatcagcgtattcgagtggaaaatgtgtgtaaaaggcttaatctccagcctttagcttatctttggcagagaaaccaggaagatttgctcagagagatgatatcatctaacattcaagcaatgatcatcaaagtagcagctttgggtttagatcctgataagcatcttgggaaaaccctggatcaaatggagccttatctcatagagctttctaagaagtatggagtacatgtttgtggagaaggtggagagtatgaaactttcactttggattgccctctatttaagaagaaaataattgtggattcatcagaagtagtcatacattcagctgatgcatttgcacctgtggcttatctacgctttttagaattgcacttggaggacaaggtgtcctcagtgcctgacaactacagaacatctaattatatatataatttttgaaaagtgttttggaacattgttcattaaaccaccatttctatacaaaaaaattgcatagtattttctcagttactatgactagtttatttttttctcatgactcttatttttttagagaaacatactttcactagaagaggttagtggaaccatttattaattgggaaaatgtcgacggcatgttcattaatagtgccaactttcttggaattcactctttctctttcgttaacacatcttccctatgaccttttttttcttttatttcatctataaaccccatttctgtagcatttctttttttatcacactagtttcttttcctccttctctctttcttgctccaatccctaccaataatgtcatgatgcagaggcatttgaaaatgaagatgaaaagatggtcactttatttagccagtcaagcttattctactgggtgtcgccaaagcgatttatcatttttattttaaatatattcatggttgaagtgtttcaacgttattggacaattaggaagaatgtccttaactcttacaagttattttataactgatttttaaaatgctgtttttcagtattaactatgttgaccttagaaaacttttacaaaaaatagactttatgttttagaacagttttaggttcacagcaaaaatggagcagaaaatgcagagatttcccatataccctctacctccacacattcacagcctcccctaccgtcaatgtcttataatagagtggtacatttgttacaactgatgaacctacattgacacattattatcacccaaagtccatagtttacgtgagggttcactcttggtgttgtacataatatgggttttgacaaatgtgtaatgacatttgtcaaccgttatagtattatacagaataatttcactgccttaaaaaatcctctgtgttttacttattcatccctccctctcctttaacccttagcaactgatcttttcactgtgtacatagttttgcttttaccagaatgtaatgtagttgaaatcatacagtatatagcttttcatgcagtatatagcttttcagattggcttctttcatgtattaatatgcatttaggtttctctgtatcttgtcatgtatatgtagctcattttttttttagtgtagaataaaattttattgtctggttctaccacaaaaaaaaaaaaaaaaaaaaaaaaaaaaaaaaaaaaaaaaaaaaaaaaaaaaaaaaaaaaaaaaaaaaaaaaaaaaaaaaaaaaaaaaaaaaa

SEQ ID NO: 5946 - DNA, 2840 bp, Homo Sapiens
  NM_080652
agtgaacgtgctccgcgggctcagtccgcccgccgctgcgtcccggagtgcaagtgagcttctcggctgccccgcgggccggggtgcggagccgacatgcgcccgcttctcggcctccttctggtcttcgccggctgcaccttcgccttgtacttgctgtcgacgcgactgccccgcgggcggagactgggctccaccgaggaggctggaggcaggtcgctgtggttcccctccgacctggcagagctgcgggagctctctgaggtccttcgagagtaccggaaggagcaccaggcctacgtgttcctgctcttctgcggcgcctacctctacaaacagggctttgccatccccggctccagcttcctgaatgttttagctggtgccttgtttgggccatggctggggcttctgctgtgctgtgtgttgacctcggtgggtgccacatgctgctacctgctctccagtatttttggcaaacagttggtggtgtcctactttcctgataaagtggccctgctgcagagaaaggtggaggagaacagaaacagcttgttttttttcttattgtttttgagacttttccccatgacaccaaactggttcttgaacctctcggccccaattctgaacattcccatcgtgcagttcttcttctcagttcttatcggtttgatcccatataatttcatctgtgtgcagacagggtccatcctgtcaaccctaacctctctggatgctcttttctcctgggacactgtctttaagctgttggccattgccatggtggcattaattcctggaaccctcattaaaaaatttagtcagaaacatctgcaattgaatgaaacaagtactgctaatcatatacacagtagaaaagacacatgatctggattttctgtttgccacatccctggactcagttgcttatttgtgtaatggatgtggtcctctaaagcccctcattgtttttgattgccttctataggtgatgtggacactgtgcatcaatgtgcagtgtcttttcagaaaggacactctgctcttgaaggtgtattacatcaggttttcaaaccagccctggtgtagcagacactgcaacagatgcctcctagaaaatgctgtttgtggccgggcgcggtggctcacgcctgtaatcccagcactttgggaggccgaggccggtgattcacaaggtcaggagttcaagaccagcctggccaagatggtgaaatcctgtctctaataaaaatacaaaaattagccaggcgtggtggcaggcacctgtaatcccagctactcgggaggctgaggcaggagaattgcttgaaccaaggtggcagaggttgcagtaagccaagatcacaccactgcactccagcctgggtgatagagtgagacactgtcttgacaaaaaaaaaaaaaaaaagagaaaaaaagaaaatgctgtttgtattttgtggtctaataaggagttcgggatagcctgttgtatttgcctcatgccagcccctgagctgccttgggagaagatgctgattgtccttgtccagagtactgcttttgcagagtgacaggctgctgggacagatgtcctcctgttgcatctttgtggatgtttagtaccaatgatgacacgggaactcacatcactgacaccgctcttcatcttctgttagtctcttgaagagcatttttttgtacttctttgctgatgacctacctcttcataagccaagtgaaacaagttgacgaactgcctaggacttccacgtgttgctcacatacatgatgatttctgtcacgctcttgtgttcagacacactgacattaccatgtatgtcagacctccttatgatcgcatgtcctgacagttaagctgattgcaaacagactattaaatatgaatggagcaaacgctgtatgtcatggatatgttctggagaaattcttacccatctggatggggcagggcccttgactcacctgaatcatgaccaggcaaacattttatctgtcctttctgcaggaatccgttctgtgtcatgctaggagaatgggttcagtatatggggccatcaggcagtataccctctgaatgtttttcattgttgtatttgcttagagtaactaaacaattgtatcttttaatttatcttttaattcaaagaggaaaccttggcttctgataactttgttgtgttgtatcttaatggcctatagctgtcattacttcctgtagctgcagtacagaattgttacagacctggattaatgcttccaaagacagaaggaccttggcacctaaactgaccagccctgtgatcctgcaccccacaggagtaactcatcaggacttaccagactgctgcttttgggcatcatctgctgggttgatgatttggtttggccaagagtcttgccaagactttaatctatgcctcttgttctacatgaattcttgggaattactcacgttccataggaagagtgcatccccaggtgatggtttttggttatggtatgatcctttcacaccgaggatttcattgtttaaaacgtgtttctttaaaagaagccttgataacgagagtgggggaaggaggcagcagactttgaagactgtggcctttggtgttctggagtagggggagggaaggagaaacatgttttccacatcatcgcaagtgtgtgccctttgccccttttcaggatccttagagttgcctccctccctccaccccgacagttttgcaataatgtgccttatcagttgtgagtttacaggtgaagcaatttcccaaataaatggatgtaagtgttcaaaaaaaaaaaaa

SEQ ID NO: 5947 - DNA, 2025 bp, Homo Sapiens
  NM_080653
ggagaggagggtcaccaactccaggcagggctgctaagtttattacaaacaggcaagactagaatatgtttccactttagtgagtggaaacctaatcattcataggtatcctgtacacacagaacaactatgatgaagagtgaggcctaaatcagaggagacgaggacaataatagtagtagtggtcatgatgataataataactaccagacatgaagattaaccatgcctaacattgtgttaaacgtctcacttctttcatttaatccttacaataatccaatgatgtagctgctattatttttattatacagatgaagaaactgagggcttgaggggtatactgctttgccaaagtcgtacaaatggtaagtgcagaaccaggatctgaattccgtcagtctgactgcagagcccacgccgacaccgtggaagctggtgatgcccattaggccctgtctgggcatgaagaggatgccctccctcatgagctggaacacagcatcccctgttgtgggtgtggctctcttaaagaccatctggtgaattttgcttgtgctggtttcttattaaacaaccttcagatttggcttcacgtgcaactcacatagagggaaaggagaccatgatccgccaacatgacagctgtatttttcattagtaaattagcaaactggctgcctgggtcaccatgcatacctgttaaggtgagcccgccccagagctaaaggctaccatgtgccaacttaactgagattctgagtgtgcaaggataacccccgtcatggccccgggtgccaaggaaatcccttttagcctcctcttggcagacttggccagccttccccagtgacagcctggctctttggattcaagctgcctggtcagactgcaagggtcatctgtacaaagaaggaagcaacagtgccaggttccagcgtgcgttccaagttccacattctgtgtgcagactcccaacgccagagcaaaggcaggcccctggcaggggactgctgagaaagtggaactccagagacactcctgaaattgtcctaagtcaaaggagccaaacggtgtacgagctccctctctgccgtcccctctgagagcagccatggccctgagtgatgtcgatgtgaaaaagcagattaagcacatgatggctttcattgagcaggaagccaatgagaaagcagaggaaatcgatgccaaggctgaggaagagtttaacattgagaaaggacgcctcgtgcaaacccaacgactgaagattatggagtattatgagaaaaaggagaagcagatagagcagcagaagaaaatcctgatgtccaccatgaggaatcaggcgaggctgaaagtcctgagagcccgaaatgacctcatctcagatttgctcagtgaggcgaagctgagactcagcaggattgtggaggacccagaggtctaccaggggctgctggataaactggtgctccagggtctgctccgactgctggaacctgtgatgattgtacgctgccggccacaagacctcctcctggtggaggctgctgtacaaaaagccatccccgagtacatgacaatttcccagaaacatgtggaggtccagattgataaagaggcatacctggctgtgaatgcagctggaggtgtggaggtctacagtggcaatcagagaataaaggtttcaaataccttggaaagccgactggatctctcagccaagcaaaagatgccagaaatacgaatggccttgtttggtgctaacaccaacagaaagttctttatataagcctctgggaagtgaagctagtgttgaaccactaaaccataaaagtttaagttttttggggaaaggaaactagtagtgtttcctcctctttgatgctctgatactgttctgtttttcttcacgaaataccctttggatagctaaagtgttaactttgaaataaagcccaaattaatgctcagaaaaaaaaaaaaaaaaaaaaaaaaaaaaaaaaaaaaaaaaaaaaaaaa

SEQ ID NO: 5948 - DNA, 1143 bp, Homo Sapiens
  NM_080662
ggagttgccatggcgtcgctgagcggcctggcgtcggcgctggagtcgtacaggggccgggaccgcctgatccgagtgctggggtactgctgccagctggttggtggagttctggttgaacagtgtcccgccaggtccgaagtggggacacgtctgttggtggtgtccacccaactcagccactgcaggaccatcttgcgactctttgatgacctggccatgtttgtctacactaagcaatatggcctgggggcacaggaggaggacgcctttgtccgctgtgtctccgtcctagggaacctggctgaccagctctactacccctgtgagcacgtggcctgggcggctgatgcccgggtcctccacgtggactcttctcggtggtggacgctgagtacaaccctgtgggccctctctctgctcctgggggttgccaggtccctgtggatgctgctgaaactgagacagaggctgcggagccccacggcgcccttcaccagcccgctgccccggggcaagcggagggccatggaggcgcagatgcagtcggaggcgctgtcacttctcagcaacctggccgacctggccaacgccgtgcactggctgccccggggcgtgctgtgggccggccgcttcccgccgtggctagtgggcctcatgggcaccatctcctcaatcctcagcatgtaccaggcggcccgggccggcggccaggccgaggccactaccccctgacactgccggaagagcacagggacacagccagagcccacggagggcccttcccgcaaagcagaagccgccagggcaggggccggggctctcatggagctgcctgtggtgaaacccatgggcagggtgggtggagggactgatgcgaggtcccccaggcctcagcctggagctcctgagccgtgacagttttcaggggccgtgcagggcttcagcagcacctcctgcctgccagctggcgtcttgtatccaaatcaagatgaggaagagggggcctgtcgtgccttgagaaagctggaacgggaatcaattaaacattgtggtgctggcaaaaaaaaaaaaaaaaaaaaaaaaaaaaaaaaaaaaaaaaaaaaaaaaaaaaaaaaaaaaaaaaaaaaaaaaaaaaaaaaa

SEQ ID NO: 5949 - DNA, 1315 bp, Homo Sapiens
  NM_080667
gggccgcggtctagggcggctacgtgtgttgccatagcgaccattttgcattaactggttggtagcttctatcctgggggctgagcgactgcgggccagctcttcccctactccctctcggctccttgtggcccaaaggcctaaccggggtccggcggtctggcctagggatcttccccgttgcccctttggggcgggatggctgcggaagaagaagacgaggtggagtgggtagtggagagcatcgcggggttcctgcgaggcccagactggtccatccccatcttggactttgtggaacagaaatgtgaagtttttgatgatgaagaagaaagcaaattgacctatacagagattcatcaggaatacaaagaactagttgaaaagctgttagaaggttacctcaaagaaattggaattaatgaagatcaatttcaagaagcatgcacttctcctcttgcaaagacccatacatcacaggccattttgcaacctgtgttggcagcagaagattttactatctttaaagcaatgatggtccagaaaaacattgaaatgcagctgcaagccattcgaataattcaagagagaaatggtgtattacctgactgcttaaccgatggctctgatgtggtcagtgaccttgaacacgaagagatgaaaatcctgagggaagttcttagaaaatcaaaagaggaatatgaccaggaagaagaaaggaagaggaaaaaacagttatcagaggctaaaacagaagagcccacagtgcattccagtgaagctgcaataatgaataattcccaaggggatggtgaacattttgcacacccaccctcagaagttaaaatgcattttgctaatcagtcaatagaacctttgggaagaaaagtggaaaggtctgaaacttcctccctcccacaaaaagacctgaagattcctggcttagagcatgcgagcattgaaggaccaatagcaaacttatcagtacttggaacagaagaacttcggcaacgagaacactatctcaagcagaagagagataagttgatgtccatgagaaaggatatgaggactaaacagatacaaaatatggagcagaaaggaaaacccactggggaggtagaggaaatgacagagaaaccagaaatgacagcagaggagaagcaaacattactaaagaggagattgcttgcagagaaactcaaagaagaagttattaataagtaataattaagaacaatttaacaaaatggaagttcaaattgtcttaaaaataaattatttagtccttacactgagaaaaaaaaaaaaaaaa

SEQ ID NO: 5950 - DNA, 2599 bp, Homo Sapiens
  NM_080668
gaaaagactcggggttccgagggccgcagaccgctagccctacgtcacttccgcttcctttcccgcagggcgggtaattcgaacgttttttgcagcgagtggccttcccggttggcgcgcgcccggggcggcggcgctggaggagctcgagacggagcctaagttatgtctgggaggcgaacgcggtccggaggagccgctcagcgctccgggccaagggccccatctcctactaagcctctgcggaggtcccagcggaaatcaggctctgaactcccgagcatcctccctgaaatctggccgaagacacccagtgcggctgcagtcagaaagcccatcgtcttaaagaggatcgtggcccatgctgtagaggtcccagctgtccaatcacctcgcaggagccctaggatttcctttttcttggagaaagaaaacgagccccctggcagggagcttactaaggaggaccttttcaagacacacagcgtccctgccacccccaccagcactcctgtgccgaaccctgaggccgagtccagctccaaggaaggagagctggacgccagagacttggaaatgtctaagaaagtcaggcgttcctacagccggctggagaccctgggctctgcctctacctccaccccaggccgccggtcctgctttggcttcgaggggctgctgggggcagaagacttgtccggagtctcgccagtggtgtgctccaaactcaccgaggtccccagggtttgtgcaaagccctgggccccagacatgactctccctggaatctccccaccacccgagaaacagaaacgtaagaagaagaaaatgccagagatcttgaaaacggagctggatgagtgggctgcggccatgaatgccgagtttgaagctgctgagcagtttgatctcctggttgaatgagatgcagtggggggtgcacctggccagactctccctcctgtcctgtacatagccacctccctgtggagaggacacttagggtcccctcccctggtcttgttacctgtgtgtgtgctggtgctgcgcatgaggactgtctgcctttgagggcttgggcagcagcggcagccatcttggttttaggaaatggggccgcctggcccagccactcactggtgtcctgtctcttgtcgtcctgtccttcctatctccccaaagtaccatagccagtttccagatgggccacagactggggaggagaatcagtggcccagccagaagttaaagggctgagggttgaggtgagaggcacctctgctcttgttgggaggggtggctgcttggaaataggcccaggggctctgccagcctcggcctctccctcctgagttgccttctgttggtggctttcttcttgaacccacctgtgtaaagaggttttcagttccgtgggtttcccctttgattctgtaaatagtcccagagagaattcgtgggctgagggcaattctgtcttggaggaagaagctggacattcagcctgtggagtctgagttttgaaggatgtagggagccttagttgggtctcagaccataagtgtgtactacacagaagctgtgttttctagttctggtctgctgttgagatgtttggtaaatgccaggttgatagggcgctggctgcttggagcaaagggtgcatttcagggtgtggccaccaggtgctgtgagtttctgtggctcatggcctctgggctggtcccttgcacagggcccacgctggagtcttaccactctgctgcaggggtggaaggtggcccctcttgtcacccatacccatttcttacaaaataagttacaccgagtctacttggccctagaagagaaagttgaagagtcccagacctactagcattttgcaactatgcttgtaaagtcctcggaaagtttcctcgcgtaccagacagcggcgggggctgatagcaattttagtttttggcctccctatcctctcacatgagaacactgcctggatgcatctcatgatctctggagaatttccccatctttctcttctttccatcgtgtggattcaatagtgtggatttgaaggctgccctgcccccgactctcctgccgcacccctggccattgtaccttttgatgtttagaagttcgtggaagtagacgctgaggtgtgcagaggagctggtggataacagagaatgccagggaagatgagtgctgggtcagggtacttggatgaaacggtgcaggccaggcgggccctaataaaaccctctgccaggtctgggagtcccaggccatctgctcaacgctctgtggtttgtcagacctgcaagcaagccccctgctggggaagcctaggtgtccttgagctgaaccgcactgaagaactcttgtcctcactggctgatgcagcagaactcttgggaaatgtcttagtcctgcagaatcaggagtcaccagatgatgcagagttgagatcatcattgcaaagttctctgttcctgaggaactaaatttaaggaaaaaatgggattttgttttagagttggaaaaaaagcctgattaaagagtttctgcctgttaaaaaaaaaaaaaaaaaaaaaaa

SEQ ID NO: 5951 - DNA, 1366 bp, Homo Sapiens
  NM_080678
gcgtctcgcagcagccgcccggaccgggcatggtgttgggcgccgggcccgcctcgcctgtctcggggagcccagggtaaaggcagcagtaatgctaacgctagcaagtaaactgaagcgtgacgatggtctcaaagggtcccggacggcagccacagcgtccgactcgactcggagggtttctgtgagagacaaattgcttgttaaagaggttgcagaacttgaagctaatttaccttgtacatgtaaagtgcattttcctgatccaaacaagcttcattgttttcagctaacagtaaccccagatgagggttactaccagggtggaaaatttcagtttgaaactgaagttcccgatgcgtacaacatggtgcctcccaaagtgaaatgcctgaccaagatctggcaccccaacatcacagagacaggggaaatatgtctgagtttattgagagaacattcaattgatggcactggctgggctcccacaagaacattaaaggatgtcgtttggggattaaactctttgtttactgatcttttgaattttgatgatccactgaatattgaagctgcagaacatcatttgcgggacaaggaggacttccggaataaagtggatgactacatcaaacgttatgccagatgataaaaggggacgattgcaggcccatggactgtgttacagtttgtctctaacatgaaacagcaagaggtagccccctctcccgtcctcatgctccctctcagtcccctggattgccccagtcctgtgaccatgttgccctgaagaagaccatcttcatgactgctcattgtagatggagaattcaacataaatacagcaagaaaatgtgtttgggcttctgaagagttgtctgcttaccttaacatgtttacttttttgaacttgtactgtataggctgttggtgaaattcttaagaagttgtaatgaactcaaaattgaggccagagcttgctttcccttttcccaaacaaaattggttttctgcacaagcgatgctaatgatgtgttcagtgtaactcgcagattggcaataagatacccgctacaaactgtgattggatgcaaaatctcttagcttctttcacgaatgttggccctgcctagatgttgtgaagcctcccagaatgcatagagtcattcactgtagatctcttattgaaatgcgtattttatttaatgtaagtatattttggaacagatttgtaatttgtacaattcaatgctttaattattttttctattctcatttagtttgtattttcattgtatagagcagacagaaagatgttgggtcaagcaactattgaagagaaatacaaagaaaaaaaaaaaaaaaa

SEQ ID NO: 5952 - DNA, 2282 bp, Homo Sapiens
  NM_080687
cgggggctggcggctgcggctcggcggagagtgcggcatgcgctcggaaaaggagggggccggaggccttcgggcggccgttgccgcgcggggcccgagcgggagggagaagctgtcggccctagaagtgcagttccaccgcgactcgcagcagcaggaggctgagacgccgccaacttcgtcctccggttgcgggggcggtgcgggcaaacctcgcgaggagaagaggacggccctgagcaaggtggtcatccgccgcctgcctccgggcctcaccaaggagcagctggaggagcagctgcgcccgctgccagcacacgactacttcgagttcttcgccgccgacctgagtctttatcctcatctctactcaagagcatacattaattttaggaatcctgatgacatccttctttttagagatcgttttgatggatatatcttccttgacagcaaagatccagaatataagaagtttttagaaacctactgtgtggaggaagagaagaccagtgccaaccctgagactctgctgggggagatggaggcgaagacaagagagctcattgctagaagaaccacacctcttttggaatatattaaaaatagaaaattagaaaagcagagaattcgagaagagaagcgagaagaacggaggaggagagagttagaaaagaaacgtttgcgggaagaggaaaaaagaagaagaagagaagaagaaagatgcaaaaaaaaagagacagataaacagaagaaaattgcagagaaagaagtaaggattaagcttcttaagaaaccagaaaagggagaggaaccaaccacagagaaaccaaaagaaagaggagaggagattgatactggaggtggcaagcaggaatcctgtgcccccggtgcagtcgtaaaagccaggcccatggaaggctcgctggaggagccccaggagacgtcacacagcggcagtgataaagagcacagggatgtggagagatctcaagaacaagaatctgaagcacaaagataccatgtggatgacggcaggaggcacagagctcaccacgagcctgaacggctttccagaaggagtgaggatgagcagagatgggggaaaggacctggccaagacagagggaagaaggggagccaggacagcggggctccgggggaggccatggagagactgggaagagcgcagaggtgtgacgacagtccagcacccagaaaagagcgactggcaaacaaggaccggccagccttgcagctgtatgatccaggagctcgcttccgagcgcgagagtgtggcggaaacaggaggatctgcaaggcagaaggttcggggactggtcctgagaagagggaagaggcagagtgagtcactgcacgcacctggcctccatggacgagcaagggcatcccagaaacgtgtaaatgaccccgagtgtgactgggaaggagaacttattccttaccaggaaactggaagctaaaaatacagagggtgacgtagaaacacgcagaaaccattctaaagaaagtagtgatcttgtattaaattgagcagaattctcacagattttaccattcctgttataaactagtatttgttgtttagccaaaacagaaaatgatttccactggacagtagaaaaatatgtgtaaaatagggaagaaagttagtattggatcagtgtgagtcctgaagcactttcagtgctgtgagaacgacatccactttgggtttcattcgtttgtaagcagaggagctgtcagtcactcgtgcttctcggtggcctctgagccatggtgtcgagtgaagagtagttcttgtttgttacaacctttgtgagtcagccatgcccgcaaagcgtgctgtgttttagtcctggtaggaatatttatcagagttcacactatataaaacccaacagcttcaactattgccctttcaacagttttgccactgaccggatagaaacggtttcagtctctggatggatgtgtttgtggtttgtaaccattacggtttaaaccatggtttaagaatttgcccaaataacagaaattttgttcgggaagggataaactagatatagcatacagagcctgtttttgagttttagatactttatttgtaaataacttaaaatagctttctgaaaccgtgcattctgtagtttcttcctttcagtgaaattgctaaatgtcaatgtatttttggcactgcgattttaaccatttattaaataaaaattttgttaaagaaaaaaaaaaaaaaaaaaaaaaaa

SEQ ID NO: 5953 - DNA, 4117 bp, Homo Sapiens
  NM_080705
gcagagtgtgcagtatagattcagcgtttgtcgactgactgaatgatagcacaatcccggctgcttcctgttggctgggtttggttggactgggacccgtcagaggaaaaggcaacgccgctgacaaagaacattgccgaaaggttcatgggaggctccggctaacaggttgcacactgggccacagaggatccagcaaggatgaagaaatggagcagcacagacttgggggcagctgcggacccactccaaaaggacacctgcccagaccccctggatggagaccctaactccaggccacctccagccaagccccagctctccacggccaagagccgcacccggctctttgggaagggtgactcggaggaggctttcccggtggattgccctcacgaggaaggtgagctggactcctgcccgaccatcacagtcagccctgttatcaccatccagaggccaggagacggccccaccggtgccaggctgctgtcccaggactctgtcgccgccagcaccgagaagaccctcaggctctatgatcgcaggagtatctttgaagccgttgctcagaataactgccaggatctggagagcctgctgctcttcctgcagaagagcaagaagcacctcacagacaacgagttcaaagaccctgagacagggaagacctgtctgctgaaagccatgctcaacctgcacgacggacagaacaccaccatccccctgctcctggagatcgcgcggcaaacggacagcctgaaggagcttgtcaacgccagctacacggacagctactacaagggccagacagcactgcacatcgccatcgagagacgcaacatggccctggtgaccctcctggtggagaacggagcagacgtccaggctgcggcccatggggacttctttaagaaaaccaaagggcggcctggattctacttcggtgaactgcccctgtccctggccgcgtgcaccaaccagctgggcatcgtgaagttcctgctgcagaactcctggcagacggccgacatcagcgccagggactcggtgggcaacacggtgctgcacgccctggtggaggtggccgacaacacggccgacaacacgaagtttgtgacgagcatgtacaatgagattctgatgctgggggccaaactgcacccgacgctgaagctggaggagctcaccaacaagaagggaatgacgccgctggctctggcagctgggaccgggaagatcggggtcttggcctatattctccagcgggagatccaggagcccgagtgcaggcacctgtccaggaagttcaccgagtgggcctacgggcccgtgcactcctcgctgtacgacctgtcctgcatcgacacctgcgagaagaactcggtgctggaggtgatcgcctacagcagcagcgagacccctaatcgccacgacatgctcttggtggagccgctgaaccgactcctgcaggacaagtgggacagattcgtcaagcgcatcttctacttcaacttcctggtctactgcctgtacatgatcatcttcaccatggctgcctactacaggcccgtggatggcttgcctccctttaagatggaaaaaactggagactatttccgagttactggagagatcctgtctgtgttaggaggagtctacttctttttccgagggattcagtatttcctgcagaggcggccgtcgatgaagaccctgtttgtggacagctacagtgagatgcttttctttctgcagtcactgttcatgctggccaccgtggtgctgtacttcagccacctcaaggagtatgtggcttccatggtattctccctggccttgggctggaccaacatgctctactacacccgcggtttccagcagatgggcatctatgccgtcatgatagagaagatgatcctgagagacctgtgccgtttcatgtttgtctacatcgtcttcttgttcgggttttccacagcggtggtgacgctgattgaagacgggaagaatgactccctgccgtctgagtccacgtcgcacaggtggcgggggcctgcctgcaggccccccgatagctcctacaacagcctgtactccacctgcctggagctgttcaagttcaccatcggcatgggcgacctggagttcactgagaactatgacttcaaggctgtcttcatcatcctgctgctggcctatgtaattctcacctacatcctcctgctcaacatgctcatcgccctcatgggtgagactgtcaacaagatcgcacaggagagcaagaacatctggaagctgcagagagccatcaccatcctggacacggagaagagcttccttaagtgcatgaggaaggccttccgctcaggcaagctgctgcaggtggggtacacacctgatggcaaggacgactaccggtggtgcttcagggtggacgaggtgaactggaccacctggaacaccaacgtgggcatcatcaacgaagacccgggcaactgtgagggcgtcaagcgcaccctgagcttctccctgcggtcaagcagagtttcaggcagacactggaagaactttgccctggtcccccttttaagagaggcaagtgctcgagataggcagtctgctcagcccgaggaagtttatctgcgacagttttcagggtctctgaagccagaggacgctgaggtcttcaagagtcctgccgcttccggggagaagtgaggacgtcacgcagacagcactgtcaacactgggccttaggagaccccgttgccacggggggctgctgagggaacaccagtgctctgtcagcagcctggcctggtctgtgcctgcccagcatgttcccaaatctgtgctggacaagctgtgggaagcgttcttggaagcatggggagtgatgtacatccaaccgtcactgtccccaagtgaatctcctaacagactttcaggtttttactcactttactaaacagtttggatggtcagtctctactgggacatgttaggcccttgttttctttgattttattcttttttttgagacagaatttcactcttctcacccaggctggaatgcagtggcacaattttggctccctgcaacctccgcctcctggattccagcaattctcctgcctcggcttcccaagtagctgggattacaggcacgtgccaccatgtctggctaattttttgtatttttttaatagatatggggtttcgccatgttggccaggctggtctcgaactcctgacctcaggtgatccgcccacctcggcctcccaaagtgctgggattacaggtgtgagcctccacacctggctgttttctttgattttattctttttttttttttctgtgagacagagtttcactcttgttgcccaggctggagtgcagtggtgtgatcttggctcactgcaacttctgcctcccgggttcaagcgattcttctgcttcagtctcccaagtagcttggattacaggtgagcactaccacgcccggctaatttttgtatttttaatagagacggggtttcaccatgttggccaggctggtctcgaactcttgacctcaggtgatctgcccgccttggcctcccaaagtgctgggattacaggtgtgagccgctgcgctcggccttctttgattttatattattaggagcaaaagtaaatgaagcccaggaaaacacctttgggaacaaactcttcctttgatggaaaatgcagaggcccttcctctctgtgccgtgcttgctcctcttacctgcccgggtggtttgggggtgttggtgtttcctccctggagaagatgggggaggctgtcccactcccagctctggcagaatcaagctgttgcagcagtgccttcttcatccttccttacgatcaatcacagtctccagaagatcagctcaattgctgtgcaggttaaaactacagaaccacatcccaaaggtacctggtaagaatgtttgaaagatcttccatttctaggaaccccagtcctgcttctccgcaatggcacatgcttccactccatccatactggcatcctcaaataaacagatatgtatacatataaaaaaaaaaaaaaaaaaaaaaaaaaaa

SEQ ID NO: 5954 - DNA, 2580 bp, Homo Sapiens
  NM_080725
ggtatggcccggccggagttaaggccggggggaggcggcgagtcccgcggcggcggcgacgatggggctgcgtgcaggaggaacgctgggcagggccggcgcgggtcggggggcgcccgaggggcccgggccgagcggcggcgcgcagggcggcagcatccactcgggccgcatcgccgcggtgcacaacgtgccgctgagcgtgctcatccggccgctgccgtccgtgttggaccccgccaaggtgcagagcctcgtggacacgatccgggaggacccagacagcgtgccccccatcgatgtcctctggatcaaaggggcccagggaggtgactacttctactcctttgggggctgccaccgctacgcggcctaccagcaactgcagcgagagaccatccccgccaagcttgtccagtccactctctcagacctaagggtgtacctgggagcatccacaccagacttgcagtagcagcctccttggcacctgctgccaccttcaagagcccagaagacacacctggcctccagcaggctgggccatgcagaagggatagcaggggtgcattctctttgcacctggcgagagggtctgactctgggcacccctctcaccagctacaaggccttggactcactgtacagtgtgggagccccagttcccacctctgtgacaataggatcatggccttacccttgaagcattaccgagaaggagaacagagatgggcttgaagagccacgtgctgccggctccaaattcccaaggacaaggatccctctgcatttttgtctatgtaacctcttatatggactacattcagctgcaaggaaaggaaaaccttgattgcagtggtttaaacaaacagaagattgtttttccacatagcatggattctggagatgggtggctaatggtattggttcaacaactccacgaaggtaggggtcacgtcttggatccttttgccttaatctcagtgctcgttacttcatggtcccaagatggctgctgtatccccaagaatcatgtctgcgttcaaggaaggaggggtggaggaagaggaagggccaaactagctggacccgtcaccttctatcagaaagtaaaacctcgtcagaagtctgtttcctgctctctccctctgcatatcttcacttagatgcccttggcccgagccagctaccattgcacctctagctgcaaacaaagctaagacagcagggaacagaattgtcatggctgaatagaccaatcgtgttccatctactgagactggcacactgcctcctgcaataaaactgggatcccattaccaagagagaaatgcagaattgtgtaccagttagcttttgctgtgtaacaaaccatccccaaacttggcagctagaaacaaaccctgtattttcccacaatcctatgggttggcaatttgggctgggctcaacagggcagttctgctgctcacacctgggatccctcatggagctaaggtcagctgttacctcagctgggcctggatggtctaggatagccttactcacttgcctggcaggtgacaggctgttggctggaattgcttggttctcctccatgtggcctctccagcaggctagctcaggcttattcacatgatggcttcaggattccaaagagagtgagagtagaagctgaaagacttcttgagttcttggcctggaactgggactaggacagtgtcacttctgctaagttcttttggtcagagcaaatcacaaggctttacccagattcaagggatgagaaacagactacatgtcttgatgaggggaaccacaaagagcttgtggccatttttcacctatcacaaataattttggatgggtatttatttggataaaggtatttccctcttccccctttctctctgtctcatggggcctcactctgccaagttggaaggcactaagacattgtcctggccctcagggtctaggggaagaggtgttggggcaggaagtgagtctctccatgggctggacccactgtagtaggagtgcctccttgtctgcactgctggtatggggttaggccaggtaggacattccagaggggcttctgaaaaccaagagtccctggggaaagggaacagagtaaggcaggccttgttctcactgccctctaagggaacttggtcactcggcacttttaagcctcagtttctccagttcaataataaggacaagagcttttcccatgcattctctttccccgggaaagttgactgaggtgaccagtaatagaattgaaaagggagagtgtcttcagtgcaatgtggcatcctggattgggtcttggaacaaaaacaggacattagtgggaaaattggaaatctgaaaaaagtctgaattttagttaatataccaatttcagtctcttggttttgacagatgtaccatggtgatgtaagatgttgaccttggggtaggctgggtgaagggtatacaggaactctttgtactatctctgcaacttctctgtaaatctagtatcattccaaaataaaagtttatttaatttaaaaaaaaaaaaaaaaa

SEQ ID NO: 5955 - DNA, 2716 bp, Homo Sapiens
  NM_080730
gccttccatccctgctcctgcaccggtctgcatctcccagcagaaggcgcagccatgaatccgttattcggccccaacctcttcctcctgcagcaggagcagcagggcctggccgggccactgggggactcactgggaggcgaccacttcgccgggggaggagacttgcccccggcgcctctctcgccggccggccctgctgcctactcgccgcccgggccgggcccggccccgcctgccgccatggccctccgcaatgacctgggctccaacatcaacgtgctcaagaccctgaacctccggttccgctgcttcctggccaaggtgcatgagctggagcgccggaaccggctgttggagaagcaactgcagcaagcgctggaggagggtaagcagggccggcggggcctgggtcgtcgcgaccaggcagtgcagaccggcttcgtcagccccatccggcccctggggctgcagctgggcgcccggccggccgctgtctgcagcccttcggcgcgcgtgctgggctcgcccgcgcgctccccggccggccccctcgcgccctccgcggccagcctctcgtcgtcctccacctccacctccaccacctattcctcgtcggcccgcttcatgcccggcaccatctggtcgttctcgcacgcccgccggctcgggccgggactggagcccactctggtgcaagggcctggcttgtcgtgggtgcacccggatggggtgggcgtccagatcgacaccatcacgcccgagatccgcgctctctacaacgtgctggccaaagtgaagcgggagcgggacgagtacaagcggaggtgggaagaggagtacacggtgcggatccagctgcaagaccgtgtaaatgagctccaggaggaagcccaggaggctgatgcctgccaggaggagctggcactgaaggtggaacagttgaaggctgagctggtggtcttcaaggggctcatgagtaacaacctgtcggagctggacaccaagatccaggagaaagccatgaaggtggatatggacatctgccgccgcatcgacatcaccgccaagctctgcgatgtggctcagcagcgcaactgcgaggacatgatccagatgttccagaagaagctggtcccatccatgggggggcggaagcgggagcgcaaggctgccgtcgaggaggacacctccctgtcggagagtgaggggccccgccagcccgatggggatgaggaggagagcacagccctcagcatcaacgaggagatgcagcgcatgctcaaccagctgagggagtatgattttgaggacgactgtgacagcctgacttgggaggagactgaggagaccctgctgctttgggaggatttctcaggctatgccatggcagctgcagaggcccagggagagcaggaagatagcctggagaaggtgattaaagatacggagtccctgttcaaaacccgggagaaggagtatcaggagaccattgaccagatagagctggagttggccacggccaagaacgacatgaaccggcacctgcacgagtacatggagatgtgcagcatgaagcgcggcctggacgtgcagatggagacctgccgccggctcatcacccagtctggagaccgaaagtctcctgctttcactgcggtcccgcttagcgacccgccgccgccgccaagcgaggctgaggactccgatcgcgatgtctcatctgacagctccatgagatagagacctgcctcccccttgcacccgaggccctcgcagcagggagctcagcgaggcagagggtggggctgcacagaggggaacatcagctgcagctctgcaccaggccggtccctggggactggggcgctcctccctcaggctttctccctcagtcttggcttctccagggctctggggtgtctggagctaggcttggccctaccattctggggccatttccaccacagttggggctctcctgccttcacgcgtgggtgtctgctacttccccatctttaaaatgctgccagagcgattgcggcccctcaccttgtccacgtatcaggaatgtgaatgtgggacctttcctccatccctgttgtccggagccagctcactgtcttccacactggtgctaactggcccaggcactggagtggaatagaatgcagctggaggctacgcatggcctctgcagcacacgcagctggagagggcttctgtccctgtcagcggcagagggcgttggggctggccggggcaccttgtccctgctatggtccacgtgctcacgctgtccacctgccaggtggagtgtatgtggctgtggccctccctcgtggaggtgccgtgctttaaagaggccttagtgcccgggatgggcacagtgttttgaagggaggtgggagctcttgctctcctggtcactgcagaatgacagagaaggtgaagctccatgcatgtgtgcgcgggtgtatgtgcgctcagggtctctgtttaagtatcagctaaagatgtgcttcctccgtgtctgtcatacactgagaccaacaggctacagtgtccctgattcttggaaaagcctggagaagctggggagatgcggttcacaatgcctcggtataggaggctgtgttgagctgacattcaaatggattctttaataataatgaaactggcgagtatttattgtgcaaaaaaaaaaaaaaaaaaa

SEQ ID NO: 5956 - DNA, 3936 bp, Homo Sapiens
  NM_080737
agtcaccttttcgtgggttcctctcacagcgctcggccgtcgagcggggtcgctaacccgcactctcttcggacctacgacatcgcggcttctctggcgttggccagtcagccacagggaactagtaaaaaaagaaaaagaaaaaataaagtgaaagaggcgtgttgtctagtttcaaaggagaggagagaagagactgagtcgccctgtgttgcccaggctggtcttgaactcctaggctcaagagatcctcctgcctcagcctcccaaagtgctgggattacaggcaactctggtagctctccttgtctggttgttttgaagaaagaagagtagaagaaaaagttgagtaaatcatgtcggagttactggacctttcttttctgtctgaggaggaaaaggatttgattctcagtgttctacagcgagatgaagaggtccggaaagcagatgagaaaaggattaggcgactaaagaatgagttactggagataaaaaggaaaggggccaagaggggcagccaacactacagtgatcggacctgtgcccggtgccaggagagcctgggccgtttgagtcccaaaaccaatacttgtcggggttgtaatcacctggtgtgtcgggactgccgcatacaggaaagcaatggtacctggaggtgcaaggtgtgcgccaaggaaatagagttgaagaaagcaactggggactggttttatgaccagaaagtgaatcgctttgcttaccgcacaggtagtgagataatcaggatgtccctgcgccacaaacctgcagtgagtaaaagagagacagtgggacagtccctccttcatcagacacagatgggtgacatctggccaggaagaaagatcattcaggagcggcagaaggagcccagtgtgctatttgaagtgccaaagctgaaaagtggaaagagtgcattggaagctgagagtgagagtctggatagcttcacagctgactcggatagcacctccaggagagactctctggataaatctggcctctttccagaatggaagaagatgtctgctcccaaatctcaagtagaaaaggaaactcagcctggaggtcaaaatgtggtatttgtggatgagggtgagatgatatttaagaagaacaccagaaaaatcctcaggccttcagagtacactaaatctgtgatagatcttcgcccagaagatgtggtacatgaaagtggctccttgggagacagaagcaaatccgtcccaggcctcaatgtggatatggaagaggaagaagaagaagaagacattgaccacctagtgaagttacatcgccagaagctagccagaagcagcatgcaaagtggctcctccatgagtacgatcggcagcatgatgagcatctacagtgaagctggtgatttcgggaacatctttgtgactggcaggattgccttttccctgaagtatgagcagcaaacccagagtctggttgtccatgtgaaggagtgccatcagctggcctatgctgatgaagccaagaagcgctctaacccatatgtgaagacttaccttctgcctgacaagtcccgccaaggaaaaagaaaaaccagcatcaagcgggacactattaatccactatatgatgagacgctgaggtatgagatcccagaatctctcctggcccagaggaccctgcagttctcagtttggcatcatggtcgttttggcagaaacactttccttggagaggcagagatccagatggattcctggaagcttgataagaaactggatcattgcctccctttacatggaaagatcagtgctgagtccccgactggcttgccatcacacaaaggcgagttggtggtttcattgaaatacatcccagcctccaaaacccctgttggaggtgaccggaaaaagagtaaaggtggggaagggggagagctccaggtgtggatcaaagaagccaagaacttgacggctgccaaagcaggagggacttcagacagctttgtcaagggatacctccttcccatgaggaacaaggccagtaaacgtaaaactcctgtgatgaagaagaccctgaatcctcactacaaccatacatttgtctacaatggtgtgaggctggaagatctacagcatatgtgcctggaactgactgtgtgggaccgggagcccctggccagcaatgacttcctgggaggggtcaggctgggtgttggcactgggatcagtaatggggaagtggtggactggatggactcgactggggaagaagtgagcctgtggcagaagatgcgacagtacccagggtcttgggcagaagggactctgcagctccgttcctcaatggccaagcagaagctgggtttatgagtccctgtcctcttctgcaggtccagccctggcgagggcaggtcagaggaagtgaagaaatcaagagcaaagatttataatttaatgtgtatgtgtgtatgtgtgtatgtgtgtgtgtgtgtgtgtgtgtgtatgtgtacaaacatgtattttctgcaaatctcattatgctggctagagtgatgcagacttgttcttctttttaaagcagtctcaagaataagcatttctttaaaatgtttctgtgtataatctagtttattttcagagtccattttttcttatgtctttataaggttcacttaacttaaaaacagcttttaaaacaactttttatcttctgtcttgctatcattgttcctacttccctaggaagccctggctacctttcgcattaggaccagtctgggttttaaggctctgggaagcagggttggttagtaaagacaggaatgttggggagaggtgagtagttccttcctctttctcctctccaatttatgcttttaacttattttctacctggataaacttctggaacttggcttttaaatttaacttttctagtttttaagcagtttccaccttgctttggtctaatgcttttctttgaaatgctaacagaattcccaagctttttccagttctagatatctttactagacctttgggggactcttataatggagctgcttttgaaaagcactttaattagataatgtattttgactaaatcacgaggatgcccagtgagagcttctagctgatctcagaggaccagagtgactgagggtaaagtgtctcacagcccatgctgaattttctgcattttaaactgatactgcagtcattggagagagagctcctcatttctcgaatgaaagatgagatatattcatcctcatgtaccacatctgtcttagtgtttgcgtctggggtgtgttatcaaacagagcatggtctacatcccactgtgtcaaccagaagagccaagtgttatctcaattggcccagtgtttctccaggctggggactgttaagggctctaagggaatgtagacagagtctccctgttattctgacttcctgcttgatgagctttcagttcctgtttttgctattgtttcctaaatttgacctacatattacatgggtgtagtgtgttgaggcttttcaaagaagggtctagtgagctaagtttcatcttctggtactcattgatcaaactgacctttctattctcataagcgtttctacccaaagttgtgtgtggaaggagtgtatagcagagaggaaatccctttcaacagagtcagctgctaactgatttcctataagcacactggattaagggcagccacagtggtttctactgtatgtatgaaccgaatggaggaatgttttcaaagattgatttggtgtggattgcaattgtaatggaaggcataacttgggatcccgggctgtaacttgctcttttgtttcccacccccctgacatgtatgtgtgctttaataaagctttctcacttgtcaaaaaaaaaaaaaaaaaaaaaaaaaaaaaa

SEQ ID NO: 5957 - DNA, 838 bp, Homo Sapiens
  NM_080746
ggacgaggggcaacgtatataaatgcgcgcaggcgtagttaagagagcgcattttgacttcgaggcaccgccgacgttactgtgtcgccatggggcgccgtccagctcgctgttaccggtattgtaagaacaagccgtacccaaaatctcgtttctgccgaggggttcctgatgccaagatccgcatctttgacctgggtagaaagaaggcaaaagtggatgagttcccactcggtggccacatggtgtctgatgaatatgagcagctgtcttctgaagccctggaggccgcccgtatttgtgccaacaaatacatggtgaaaagttgtggcagagatggctttcacatgcgagtgcggctccatcccttccatgtcatccgcatcaacaagatgttgtcctgtgctggggctgacaggctccagacaggtatgcgaggtgcctttggaaaaccccagggtactgtagcccgggtccacattggtcaagtcatcatgtccatccgcaccaagcttcagaacgaggagcatgtgattgaagccttgcgcagggccaagttcaagttccctggacgccagaagattcatatctccaagaagtggggcttcacgaagtttaatgctgacgaatttgaagacatggtggccaagaagtgcctcatccctgatggttgtggagtcaagtacgttcccagtcatggccccttggacaagtggcgggttctgcactcatgaaggttttggcagtactgtctccttgggccatgctggtctgacttatgcttactaataaattctgtttactggcaaaaaaaaaaaaaaaaaaaaaaaaaaaaaaa

SEQ ID NO: 5958 - DNA, 2030 bp, Homo Sapiens
  NM_080747
atttaaggggcgagctgggccgagaacgcagcggctgtttgcgccccttctgcctcccgcgcggccagcaccggtacttgcgagccatgagccgccaactgacccatttcccccgcggggagcgcctgggcttcagcggttgctccgcggtcctctctggcgggatcggcagcagctccgcctcattccgggcccgggtcaagggctcggcctcctttggcagcaagagcctctcctgccttgggggcagccgaagcctggcgctcagcgctgctgcacggcggggcggcggccgcctgggcggcttcgtgggcaccgccttcggcagcgccgggctggggcccaagtgtccctccgtgtgcccacccgggggcatccctcaggtcaccgtcaacaagagcctcctggccccgctcaacgtggagatggaccccgagatccagagggtgcgcgcccaggagcgggagcagatcaaggcgctaaacaacaagttcgcctccttcatcgacaaggtgcggttcctggagcagcagaatcaggtgctagagaccaagtggaacctcctacagcagctggacttgaacaactgcaggaagaacctggagcccatttatgagggctacatcagcaacctgcagaagcagctggagatgctgtctggggacggggtgaggctggattcggagctgaggaacatgcaggatttggtggaggactacaagaagaggtatgaggtggagattaacagacgcacagctgctgagaatgagtttgtggtgctcaagaaggacgtggatgctgcttacatgaataaggttgagctccaggccaaggtggactccttgacagatgagattaaattcttcaagtgcctttatgaaggggagatcactcagatccagtcccacatcagcgacacgtccatcgtcctgtcaatggacaacaaccgggatctggacctggacagcatcattgccgaggtccgtgcccagtacgaggagattgccctaaagagcaaggccgaggctgagaccctgtaccagaccaagatccaggagctgcaggtcacagcaggccagcatggggatgacctcaagctcaccaaggctgaaatctctgagctcaaccgcctgatccagaggatccgctcagagatagggaatgtgaagaagcagtgtgccgatctggagacggccatcgccgacgctgaacagcggggggactgcgccctgaaagatgcccgggccaagctggatgagctggagggcgccctgcaccaggccaaggaggagctggcacggatgctgcgtgagtaccaggagctcgtgagcctgaagctggccctggatatggagatcgccacctaccgcaagctgctggagagcgaggagtgcaggatgtctggcgaatatccaaattctgtgagcatctccgtcatcagcagcaccaatgctggggcaggaggggctggcttcagcatgggctttggcgcctcaagcagttatagctacaaaactgcagctgcagacgtcaagaccaaaggcagctgtggcagtgagctcaaggatccccttgccaaaacctcggggagcagctgtgccaccaaaaaggcctccagatgatggacaagtggttggctctgtgagcagaaggcttcccaactcacccgtctcctccctctccttccctgggctccctttccaagtcaagaaatgctttgtctgtcactacagtcccaaccccatttcctctccctgttgtcctcaaggtgtgatgcttcgatgcaaggagtccagtcaggagctctctcagtggcctccttcttggtcccgtttcgttgggtcattgcctgaaatgcaaagacaacacttacccaggatgtttccccaaggccagctacaagcccctctgcccccatgcctttcttgggccttcactaccaagggactctcttcatcttctgattgggattgtgtccagtcctctgcttcttctgcaataaatgattaaatctgaaaaaaaaaaaaaaa

SEQ ID NO: 5959 - DNA, 477 bp, Homo Sapiens
  NM_080748
cttccgaagccgctgcagtcctgggccccaggctcccggaagtgctgcccggcgctccggaagcgattcatcgggccgcgagcgccctccccgtcgttttccgtgagagacgtagagctgagcgacccagcccgcgagcgaggtgagatgccggtggccgtgggtccctacggacagtcccagccaagctgcttcgaccgtgtcaaaatgggcttcgtgatgggttgcgccgtgggcatggcggccggggcgctcttcggcaccttttcctgtctcaggatcggaatgcggggtcgagagctgatgggcggcattgggaaaaccatgatgcagagtggcggcacctttggcacattcatggccattgggatgggcatccgatgctaaccatggttgccaactacatctgtcccttcccatcaatcccagcccatgtactaataaaagaaagtctttgagtaaaaaaaaaaaaaaaaa

SEQ ID NO: 5960 - DNA, 5246 bp, Homo Sapiens
  NM_080759
atctttgatcaatgtacttgccagggagagcccaagtccttcaaacctcctccttttcaccttcatccttaactttgtgctagagcgagacccacacaacaacagccgaccctccccgccccacccccacccccaaaccagccctcgatcccagcccccggagaggactcgcatttcgacttgcgggacacttttgtgcgttcctctccagagcgcctctcgtgctcgcccctcttgcgctcgctctttattaccttcacctccttttctcccccttctctccctttctccttctcgttctctcccggagttgttgttgcccccctcgctccttctccccccttttttccccttcccctcccgggggtgtgtggcaacttttcctctcgcttctcctccgtctgtttccccttatatgtgaccatggcagtgccggcggctttgatccctccgacccagctggtcccccctcaacccccaatctccacgtctgcttcctcctctggcaccaccacctccacctcttcggcgacttcgtctccggctccttccatcggacccccggcgtcctctgggccaactctgttccgcccggagcccatcgcttcggcggcggcggcggcggccacagtcacctctaccggcggcggcggcggcggcggcggcggcggcagcggaggcggcggcggcagcagcggcaacggaggcggcggtggcggcggcggcggtggcagcaactgcaaccccaacctggcggccgcgagcaacggcagcggcggcggcggcggcggcatcagcgctggcggcggcgtcgcttccagcacccccatcaacgccagcaccggcagcagcagcagcagcagtagcagcagcagcagcagcagcagtagtagcagcagcagcagtagcagcagcagctgcggccccctccccgggaaacccgtgtactcaaccccgtccccagtggaaaacacccctcagaataatgagtgcaaaatggtggatctgaggggggccaaagtggcttccttcacggtggagggctgcgagctgatctgcctgccccaggctttcgacctgttcctgaagcacttggtggggggcttgcatacggtctacaccaagctgaagcggctggagatcacgccggtggtgtgcaatgtggaacaagttcgcatcctgaggggactgggcgccatccagccaggagtgaaccgctgcaaactcatctccaggaaggacttcgagaccctctacaatgactgcaccaacgcaagttctagacctggaaggcctcctaagaggactcaaagtgtcacctccccagagaactctcacatcatgccgcattctgtccctggtctcatgtctcctgggataattccaccaacaggtctgacagcagccgctgcagcagctgctgctgctaccaatgcagctattgctgaagcaatgaaggtgaaaaaaatcaaattagaagccatgagcaactatcatgccagtaataaccaacatggagcagactctgaaaacggggacatgaattcaagtgtcggactggaacttccttttatgatgatgccccaccctctaattcctgtcagcctacctccagcatctgtcaccatggcaatgagccagatgaaccacctcagcaccattgcaaatatggcagcagcagcacaagttcagagtcccccatccagagttgagacatcagttattaaggagcgtgttcctgatagcccctcacctgccccctctctggaggaggggagaaggcctggcagtcacccatcatcacatcgcagcagcagcgtgtccagctcccctgctcggactgagagctcttctgacagaatcccggtccatcagaatgggttgtccatgaaccagatgctgatgggcttatcaccaaatgtacttcctgggcccaaagagggagatttggccggtcatgacatgggacatgagtcaaaaaggatgcatattgaaaaagatgagaccccgctttctacaccaaccgcaagagacagccttgacaaactctctctaactgggcatggacaaccactgcctccaggttttccatctccttttctgtttcctgatggactgtcttccatcgagactcttctgactaacatacaggggctgttgaaagttgccatagataatgccagagctcaagagaaacaggtccaactggaaaaaactgagctgaagatggattttttaagggaaagagaactaagggaaacacttgagaagcagttggctatggaacaaaagaatagagccatagttcaaaagaggctaaagaaggagaagaaggcaaagagaaaattgcaggaagcacttgagtttgagacgaaacggcgtgaacaagcagaacagacgctaaaacaggcagcttcaacagatagtctcagggtcttaaatgactctctgaccccagagatagaggctgaccgcagtggcggcagaacagatgctgaaaggacaatacaagatggaagactgtatttgaaaactactgtcatgtactgaatctttcctgttgaagaaatccatgttatagaaaagaactttgcagtcagacattcgtcatgggaaagttcagaaaaaaataaagtccttttaagggaacttcctgaattttgtgtattaatgttctttaaaagtttaagtattctacaaaaaaaaaaaaagttttctccattgattttcacctgtggttcataccagagacctgagaatgtttgtaaatgtacaagtatcaaagttcttacagttaattactgcaacttgctgctggacaattgtatacagagttaaaggcaggtctgaataagacctagctttgtttttttctaatggaatgaaccattttcctcttctgaaaattctgtatctgagcacatcaagagactcttgtagcagtggttacccagacttacagaattatgtcctccagaaaccagcaagaacacttggaatgaacgaatgaacttgtagggggcatagaggattcttgaaaaaaaaaaatgcaagagtgattttctgttacattcaatttcaaactctctaattgtgggttttctcctgaagaattttttttcacatactttccaaaagaccaacaaatggatgttgacaacaacccaatgaaataacattttgcatatctgaaaagaagcattgaatataagccaaaagctttcactgaaggtttttttttcttaaaaataaaaaaaaatatataagtgtaacatgttttcattccaaactggtagtggtatatagaattaaagataataatgttgcttcttattcaaactgttggtcatatgtacagtatataaacataaaacacacaaggaaggtattatgtatgcagtagtatactagagtttaggaaaatgaaaattttagaaaatatgttttgtcaccctgttggtcagaaagatgtctttctggttttaacgcatgcaggcatgtaaatatttgtctggagtcacagtattaatgaatgagatcttaagcatctggtgacatcagaactctgtgtcagccacttttatttgtatattgaaccctagctagtgccccaagctgcactattgggaatggattgtggctgaacagcaaatcaaaacaccagaaatatttttatatgttaacgtcatattatgttaatgttgctgaaaacaaaacctaacaaaccttgatgtaccagtccaataccatgtagcgctgagtgataaagttaaaatgtgctgtgcttcccacccttgtcagagggaagggtggctatgtgttattttcactgtctttttgaaagttacagtatgtgttttcactttcgtgcagataactggaagtaaagcggcaaacagtgcttattacatgctaaagttaccttctctttgttttttgcatatctggaattacacctttaaagactgatatgaatcagtacggtcactatacattttatgatttttctgtcatcttaaaattgtatgatcgtaacattatttattaccacaaaacagcaaaatcttcaatgtctaagaaaactagcttaaaatgtttaaatatagttctgattgggtattaattacttgattaagaaaaaattaacattatagatactctggcattacgcttctataccttttaggtcttccttgcaatactggaacataattcttttgtgtagctcactattagccagctaagttcatctttttaataccataaaaaggttatatgtacagttcctattttagcttgcttacaaagggagcattatttttatttaaagtattgctagtaaatgatttgtagaaacttggttttctaagcatagttcttccataaccaccttttgttgtttgagcacaagggattcttttcctagttctatgtgtttgtttccctatatgcagtctttaaaggattacaacacttaaaattgaatggacttgtgtcaagctttttgcatcatacattttttgaaagatttttaaaaaagcctacaacttacatatgtagtagaatcagccattgctctgctcctggcatagagtcacctgtttgttatgtggattaaatagttttaaaatacatatttgaagacctttgagaatgctttagtgtttgatttgaaataaaaggaaattttagcaaggattaaagaaaaaagctatcagctgtatgttaagagagactcttactaacatgttgtaaatattacaattcatgaaatgttattgtaagtctgtaacttaattttttccctgttttagttatacaggttggtttggaaatttgtgttttggcataaacaagtaaaatgtgcccattttatggtttccatgcttttgtaatcctaaaaatattaatgtctagttgttctatattataaccacatttgcgctctatgcaagcccttggaacagaacatactcatcttcatgtaggacctatgaaaattgtctatttttatctatatatttaaagttttctaaaaatgataaaaggttattacgaattttgttgtacaaaatctgtacaaaaatctgtttttacatcataatgcaagaattggaaatttttctatggtagcctagttatttgagcctggtttcaatgtgagaaccacgtttactgttattgtatttaattttcttttccttttcaacaatctcctaataaaactgtctgaaatctcaaaaaaa

SEQ ID NO: 5961 - DNA, 4802 bp, Homo Sapiens
  NM_080760
atctttgatcaatgtacttgccagggagagcccaagtccttcaaacctcctccttttcaccttcatccttaactttgtgctagagcgagacccacacaacaacagccgaccctccccgccccacccccacccccaaaccagccctcgatcccagcccccggagaggactcgcatttcgacttgcgggacacttttgtgcgttcctctccagagcgcctctcgtgctcgcccctcttgcgctcgctctttattaccttcacctccttttctcccccttctctccctttctccttctcgttctctcccggagttgttgttgcccccctcgctccttctccccccttttttccccttcccctcccgggggtgtgtggcaacttttcctctcgcttctcctccgtctgtttccccttatatgtgaccatggcagtgccggcggctttgatccctccgacccagctggtcccccctcaacccccaatctccacgtctgcttcctcctctggcaccaccacctccacctcttcggcgacttcgtctccggctccttccatcggacccccggcgtcctctgggccaactctgttccgcccggagcccatcgcttcggcggcggcggcggcggccacagtcacctctaccggcggcggcggcggcggcggcggcggcggcagcggaggcggcggcggcagcagcggcaacggaggcggcggtggcggcggcggcggtggcagcaactgcaaccccaacctggcggccgcgagcaacggcagcggcggcggcggcggcggcatcagcgctggcggcggcgtcgcttccagcacccccatcaacgccagcaccggcagcagcagcagcagcagtagcagcagcagcagcagcagcagtagtagcagcagcagcagtagcagcagcagctgcggccccctccccgggaaacccgtgtactcaaccccgtccccagtggaaaacacccctcagaataatgagtgcaaaatggtggatctgaggggggccaaagtggcttccttcacggtggagggctgcgagctgatctgcctgccccaggctttcgacctgttcctgaagcacttggtggggggcttgcatacggtctacaccaagctgaagcggctggagatcacgccggtggtgtgcaatgtggaacaagttcgcatcctgaggggactgggcgccatccagccaggagtgaaccgctgcaaactcatctccaggaaggacttcgagaccctctacaatgactgcaccaacgcaagttctagacctggaaggcctcctaagaggactcaaagtgtcacctccccagagaactctcacatcatgccgcattctgtccctggtctcatgtctcctgggataattccaccaacaggtctgacagcagccgctgcagcagctgctgctgctaccaatgcagctattgctgaagcaatgaaggtgaaaaaaatcaaattagaagccatgagcaactatcatgccagtaataaccaacatggagcagactctgaaaacggggacatgaattcaagtgtcgatgagaccccgctttctacaccaaccgcaagagacagccttgacaaactctctctaactgggcatggacaaccactgcctccaggttttccatctccttttctgtttcctgatggactgtcttccatcgagactcttctgactaacatacaggggctgttgaaagttgccatagataatgccagagctcaagagaaacaggtccaactggaaaaaactgagctgaagatggattttttaagggaaagagaactaagggaaacacttgagaagcagttggctatggaacaaaagaatagagccatagttcaaaagaggctaaagaaggagaagaaggcaaagagaaaattgcaggaagcacttgagtttgagacgaaacggcgtgaacaagcagaacagacgctaaaacaggcagcttcaacagatagtctcagggtcttaaatgactctctgaccccagagatagaggctgaccgcagtggcggcagaacagatgctgaaaggacaatacaagatggaagactgtatttgaaaactactgtcatgtactgaatctttcctgttgaagaaatccatgttatagaaaagaactttgcagtcagacattcgtcatgggaaagttcagaaaaaaataaagtccttttaagggaacttcctgaattttgtgtattaatgttctttaaaagtttaagtattctacaaaaaaaaaaaaagttttctccattgattttcacctgtggttcataccagagacctgagaatgtttgtaaatgtacaagtatcaaagttcttacagttaattactgcaacttgctgctggacaattgtatacagagttaaaggcaggtctgaataagacctagctttgtttttttctaatggaatgaaccattttcctcttctgaaaattctgtatctgagcacatcaagagactcttgtagcagtggttacccagacttacagaattatgtcctccagaaaccagcaagaacacttggaatgaacgaatgaacttgtagggggcatagaggattcttgaaaaaaaaaaatgcaagagtgattttctgttacattcaatttcaaactctctaattgtgggttttctcctgaagaattttttttcacatactttccaaaagaccaacaaatggatgttgacaacaacccaatgaaataacattttgcatatctgaaaagaagcattgaatataagccaaaagctttcactgaaggtttttttttcttaaaaataaaaaaaaatatataagtgtaacatgttttcattccaaactggtagtggtatatagaattaaagataataatgttgcttcttattcaaactgttggtcatatgtacagtatataaacataaaacacacaaggaaggtattatgtatgcagtagtatactagagtttaggaaaatgaaaattttagaaaatatgttttgtcaccctgttggtcagaaagatgtctttctggttttaacgcatgcaggcatgtaaatatttgtctggagtcacagtattaatgaatgagatcttaagcatctggtgacatcagaactctgtgtcagccacttttatttgtatattgaaccctagctagtgccccaagctgcactattgggaatggattgtggctgaacagcaaatcaaaacaccagaaatatttttatatgttaacgtcatattatgttaatgttgctgaaaacaaaacctaacaaaccttgatgtaccagtccaataccatgtagcgctgagtgataaagttaaaatgtgctgtgcttcccacccttgtcagagggaagggtggctatgtgttattttcactgtctttttgaaagttacagtatgtgttttcactttcgtgcagataactggaagtaaagcggcaaacagtgcttattacatgctaaagttaccttctctttgttttttgcatatctggaattacacctttaaagactgatatgaatcagtacggtcactatacattttatgatttttctgtcatcttaaaattgtatgatcgtaacattatttattaccacaaaacagcaaaatcttcaatgtctaagaaaactagcttaaaatgtttaaatatagttctgattgggtattaattacttgattaagaaaaaattaacattatagatactctggcattacgcttctataccttttaggtcttccttgcaatactggaacataattcttttgtgtagctcactattagccagctaagttcatctttttaataccataaaaaggttatatgtacagttcctattttagcttgcttacaaagggagcattatttttatttaaagtattgctagtaaatgatttgtagaaacttggttttctaagcatagttcttccataaccaccttttgttgtttgagcacaagggattcttttcctagttctatgtgtttgtttccctatatgcagtctttaaaggattacaacacttaaaattgaatggacttgtgtcaagctttttgcatcatacattttttgaaagatttttaaaaaagcctacaacttacatatgtagtagaatcagccattgctctgctcctggcatagagtcacctgtttgttatgtggattaaatagttttaaaatacatatttgaagacctttgagaatgctttagtgtttgatttgaaataaaaggaaattttagcaaggattaaagaaaaaagctatcagctgtatgttaagagagactcttactaacatgttgtaaatattacaattcatgaaatgttattgtaagtctgtaacttaattttttccctgttttagttatacaggttggtttggaaatttgtgttttggcataaacaagtaaaatgtgcccattttatggtttccatgcttttgtaatcctaaaaatattaatgtctagttgttctatattataaccacatttgcgctctatgcaagcccttggaacagaacatactcatcttcatgtaggacctatgaaaattgtctatttttatctatatatttaaagttttctaaaaatgataaaaggttattacgaattttgttgtacaaaatctgtacaaaaatctgtttttacatcataatgcaagaattggaaatttttctatggtagcctagttatttgagcctggtttcaatgtgagaaccacgtttactgttattgtatttaattttcttttccttttcaacaatctcctaataaaactgtctgaaatctcaaaaaaa

SEQ ID NO: 5962 - DNA, 5733 bp, Homo Sapiens
  NM_080764
aattataacagctggccttctggtgggcaaaccatcccctgatggactggaagcctaccccccaccccaagccctggctgcgacagctctggaaccctgactgcctgggtgcccctcagctctggaaccctgactgcctggatgctcctcagctctggaaccctgactgcttggataccccctcagctctggaaccctgactgcctggaaccgtgatccggaacccaagatcctttcaaggcctcaggggtattgctgctgccctcctccttctcaatttaaccccgcgtccagccgtcgccaccaggggcgtcagagcgcgcgcatgctcctagctcggagccgcgccgatctcgcgccggcacctggcagccaatcgcaggtctccactggacgcgcgcgtgtggaggcgtgcgcgtcggcggcgccgggggcctgaggaggcgtagtcgccgccggctgtgccccgggagcgcctccggggctggtgcgtggccggcagctcgcgaacagcagctgatccggactggatgtgaccttctgcctggaatagctcaagttcttaaaagttgcgttgtaataaacctgaggctgggaagttcaagatcaagatgctggacgatttggttccttagtgaaggctctcttcctggctggtggatgacagccttcttgctgtgttctcacatgacagaaagaggaagcaaggtggcagtttatataaaggaagcattgggacttgtggccccaccattcaggaataaaaaaattagaaaatggaacaatcatgtgaggaagagaaagagcctgaaccacagaagaacatacaagaaaccaaacaagtagatgacgaagatgctgagctcatctttgttggtgtggaacatgtaaatgaagatgctgagctaatctttgttggggtgacttcaaattcaaaaccagtcgtttcaaacattttgaacagagtcaccccgggttcatggtcaaggagaaaaaagtatgatcaccttagaaaagatactgctcgcaaattgcagcctaaaagtcatgagaccgttacatcagaagcagtgaccgtcctgccagcttcccaacttgaatcgagatcaacagatagtcctattattattgagcctttgtctaaacctgattatagaaatagttcaccacaagttgtgcctaataactcttcagaattaccttctcctttgattacattcacagattcattgcatcatccagtaagtacagcactttcagtaggaggtataaatgaaagtcctcgtgtatcaaagcaactttccactttcgaagtaaacagcataaatcccaaaagggctaaactcagggatggaattatagaaggaaattcttcagcttcgttcccttcagatacctttcatacaatgaatactcagcaaagtacaccctcaaataatgttcatacctcattaagccatgttcagaatggagcaccttttccagcagcttttccaaaggacaatatccatttcaagcctataaatacaaatcttgatagggaaaatgaattggcaaaaacagacattttgagtctaacaagtcaaaacaagacctttgatcccaagaaagaaaatcccattgtgttacttagtgacttttactatggacagcataaaggagaagggcagccggaacagaagactcacaccacctttaaatgcctcagctgcgtgaaagttctaaaaaatgttaagtttatgaatcacgtgaagcatcatttggaatttgagaagcagaggaacgacagctgggaaaaccacaccacctgccagcactgccaccggcagtttcccactcccttccagctacagtgtcacatcgaaaatgtccacactgcccaggagccctctactgtctgtaaaatctgtgaattgtcatttgaaacagatcaggtcctcttacaacacatgaaggaccatcataagcctggcgaaatgccctatgtgtgccaggtttgccattatagatcgtcggtctttgctgatgtagaaacacattttagaacgtgccatgaaaacacaaagaatttgctttgtcccttttgtctcaaaattttcaaaacagcaacaccatacatgtgtcattataggggccactggggaaagagtgcacaccagtgttccaagtgccggctacagtttttaactttcaaggagaaaatggagcacaagacccagtgtcatcaaatgtttaagaagcctaagcaactagaaggattacctcctgaaacaaaagttactattcaagtgtcactggaacctcttcagccaggatcagtggatgtagcatccataactgtgagcacatctgactctgaaccatcactccccaggtctaaaagcaaaatttcaaaaaagtcccattaattctagtttcagtaaatctaaagcaagtatttcaaaccaaattaaaaaacctcataaaacaaaaaatacaaaccatacattattcagtagcaccaaaaatagtgaaactagtggattatatatgactttttaaacaagattcaggatatatattatttgatctgaattttgaggtattattttaaaacatctggttttcatgttaactgtatctggcttaacacataaaaggtgtttgtgtgtgtgtgtgtgagagagaaaggtattaatttatttttttaattttaattttttttttttttactttagagacagggtctcactgttacccaggctggagtgcagtggcgtgatcctagctcactgcaaccttgaacttccaggctcaagcattcctccgcctcagcctttggagagtagctaggactacaggcgcagccaccacacccagctagttttttattttaattttttgtagcgatggaatcttgttatgtcgcccagggtggtctcgaactcctgaccttaggggagcctcctgcctcagcctccccaagtgctgggttgtgtgagtcactgcccctggcacctatttattgttttggtatttcatgttactcctaagcttgaaagctcttttttctatatacagaattcatagaatttttgaaatacttagttttctttacagctttttccatgcattcagcatttcatggttaactctagtcagactggaatggctttgttatgccctggcccacttgctgccgaattcccagaagtgcctctgctgtgctggcataaaataacctgaaaagattctgaaaagccaggatgtggaattgaaagagaagctgctgcgtgagcagagaccaagaaggcggaggttagttgagggagagcagtggttctttgttctagttgaaggataggcacacattcattctagtcttggggccaggtcaaaaggaacactgcttcagagtatctttacctacctgaaaacatccaaggaagccaaaccattcaaagtaaaatggttttgtttggtgaagggcccctgcagacatcaaacagccgtcatgtatcattggtttgaggtgaaatagcaataaaattaatagaatggtgcctggtactagctgacttcctgttctgtgatctaaaggtgaatttgattcattccctctcctctcccttctggctagccgttagtggagaatgaactggccatattctcagccacagctgtaaagcaagtttcccaaggggaagaagccctaatatctataatttgaactgtactggacccatagttttaactgaaaagggccaaacaagtggtgtctgtccagttcctggactgggctaaatttagttttcccactgttaagctggaatgaggactgtcccaacaacagtaggtacagtggacaaaaatagcccagggtgactgactgaatttaaacccataatggctttatatttttctgtgcatatatatcttaccctaattgaacatgtgaagcttgcaactttatgtcttgctttggacatgaatgtattacagcttgcagctattctgttaaatgtatagtttcccagttttttgacactaatgctgtttgggtcttacctgacacacaccagtgtgcaagaaatgtctctctaattcaataagttttaagacttagagttaatgtccttcatctgatctatcctatctaatctgtactatgggtgaatctttttcccttgctctccccaggggctgtttcacagtattctggagtaccttttgagtattggttcctgaacatcagcagtcttggctgcctctgtggactcccggagttgtctccctgcttgtgttctggtgccatcctttgttcctccacccctgaccaaggtgcccagcagcctgtcttcaccagtcaaggaatccgccatcttggctgtagacataggtctggagaaatctctccctttttccttgatttctttttaaaggtaccttatctctccccactcctttcttccctcctcaatctagttaaatttcctaagctttcacaaaaatccgggaagagataattaagagcttagcatccctcttagagtagaaggcagtacagataacaaagaagttgtgagtatattatctacattttagaaaattttctgactctagatccatagattctgttgtatttatttgccggacactcatttgattgatttgcaccttgaacactatactaggtcttttcagttacgttgcttgggttaagacactttgctaaaattacagcctgaatcctttctttagttgaagaaagggtatgtgtgtgcaagtgggtgtgtgtgtgccagtttttcttgtctcaggtagatactcccactgtgtataaatagatctacagacttttcatacttacctcccgtattctgtttctgtggtaaaaatatgaagtgttttagttgtatgttgagtgattggttggtattatcaacactgttgtttgcagtttcattaaagcatgctcttaaggagtacatatggtcattaattgccaactgtagattccagtgatctggcccctgcctacctccttcctctctttttcattctctgtcatgcttctccactgttttccccaatgacgcactattttgacacactggccttgctattccttaagcaaatcacattcttcccaatccaaagactttgcacatgctgttgtctttcttagaatgcccttcccctaggcctgcatggcttgctacctcacttaattgtttgacacttcctttggttcattgagcttcaaggctcttaaaatgccactgacaatgagatctccctttaaaaaaaaaaaaaaacttctacttttcctcttaaaggcactttactctctccccactcttttcttcctcttcaaagtatttaaatttcctaggttttcatgaaaaagctggaaagcgatcagcatcaagggctttgcttctgtcttagaattgagctagcttgagtcaatttctgtgcctgcaaccaaatgaaaattaatatagtgagttctttcaggagctttctctgtttttctattgatacctctatatatttttaaggcaatgtcactttgttttgtttacaaatatattgaatatgtcaagattactattttgttattgccctttgtgaatttccttgtctattttgctcgcttgttctttcaggtgaaatttattattttattaatgttgccaaaaattataagtaaaatatcaattatagtaataaaatgttttgtgaaaaaaa

SEQ ID NO: 5963 - DNA, 3868 bp, Homo Sapiens
  NM_080792
cgctcgctcgcagagaagccgcggcccatggagcccgccggcccggcccccggccgcctcgggccgctgctctgcctgctgctcgccgcgtcctgcgcctggtcaggagtggcgggtgaggaggagctgcaggtgattcagcctgacaagtccgtgttggttgcagctggagagacagccactctgcgctgcactgcgacctctctgatccctgtggggcccatccagtggttcagaggagctggaccaggccgggaattaatctacaatcaaaaagaaggccacttcccccgggtaacaactgtttcagacctcacaaagagaaacaacatggacttttccatccgcatcggtaacatcaccccagcagatgccggcacctactactgtgtgaagttccggaaagggagccccgatgacgtggagtttaagtctggagcaggcactgagctgtctgtgcgcgccaaaccctctgcccccgtggtatcgggccctgcggcgagggccacacctcagcacacagtgagcttcacctgcgagtcccacggcttctcacccagagacatcaccctgaaatggttcaaaaatgggaatgagctctcagacttccagaccaacgtggaccccgtaggagagagcgtgtcctacagcatccacagcacagccaaggtggtgctgacccgcgaggacgttcactctcaagtcatctgcgaggtggcccacgtcaccttgcagggggaccctcttcgtgggactgccaacttgtctgagaccatccgagttccacccaccttggaggttactcaacagcccgtgagggcagagaaccaggtgaatgtcacctgccaggtgaggaagttctacccccagagactacagctgacctggttggagaatggaaacgtgtcccggacagaaacggcctcaaccgttacagagaacaaggatggtacctacaactggatgagctggctcctggtgaatgtatctgcccacagggatgatgtgaagctcacctgccaggtggagcatgacgggcagccagcggtcagcaaaagccatgacctgaaggtctcagcccacccgaaggagcagggctcaaataccgccgctgagaacactggatctaatgaacggaacatctatattgtggtgggtgtggtgtgcaccttgctggtggccctactgatggcggccctctacctcgtccgaatcagacagaagaaagcccagggctccacttcttctacaaggttgcatgagcccgagaagaatgccagagaaataacacaggacacaaatgatatcacatatgcagacctgaacctgcccaaggggaagaagcctgctccccaggctgcggagcccaacaaccacacggagtatgccagcattcagaccagcccgcagcccgcgtcggaggacaccctcacctatgctgacctggacatggtccacctcaaccggacccccaagcagccggcccccaagcctgagccgtccttctcagagtacgccagcgtccaggtcccgaggaagtgaatgggaccgtggtttgctctagcacccatctctacgcgctttcttgtcccacagggagccgccgtgatgagcacagccaacccagttcccggagggctggggcggtgcaggctctgggacccaggggccagggtggctcttctctccccacccctccttggctctccagcacttcctgggcagccacggccccctccccccacattgccacatacctggaggctgacgttgccaaaccagccagggaaccaacctgggaagtggccagaactgcctggggtccaagaactcttgtgcctccgtccatcaccatgtgggttttgaagaccctcgactgcctccccgatgctccgaagcctgatcttccagggtggggaggagaaaatcccacctcccctgacctccaccacctccaccaccaccaccaccaccaccaccaccactaccaccaccacccaactggggctagagtggggaagatttcccctttagatcaaactgccccttccatggaaaagctggaaaaaaactctggaacccatatccaggcttggtgaggttgctgccaacagtcctggcctcccccatccctaggctaaagagccatgagtcctggaggaggagaggacccctcccaaaggactggagacaaaaccctctgcttccttgggtccctccaagactccctggggcccaactgtgttgctccacccggacccatctctcccttctagacctgagcttgcccctccagctagcactaagcaacatctcgctgtggacgcctgtaaattactgagaaatgtgaaacgtgcaatcttgaaactgaggtgttagaaaacttgatctgtggtgttttgttttgttttttttcttaaaacaacagcaacgtgatcttggctgtctgtcatgtgttgaagtccatggttgggtcttgtgaagtctgaggtttaacagtttgttgtcctggagggattttcttacagcgaagacttgagttcctccaagtcccagaaccccaagaatgggcaagaaggatcaggtcagccactccctggagacacagccttctggctgggactgacttggccatgttctcagctgagccacgcggctggtagtgcagccttctgtgaccccgctgtggtaagtccagcctgcccagggctgctgagggctgcctcttgacagtgcagtcttatcgagacccaatgcctcagtctgctcatccgtaaagtggggatagtgaagatgacacccctccccaccacctctcataagcactttaggaacacacagagggtagggatagtggccctggccgtctatcctacccctttagtgaccgcccccatcccggctttctgagctgatccttgaagaagaaatcttccatttctgctctcaaaccctactgggatcaaactggaataaattgaagacagccagggggatggtgcagctgtgaagctcgggctgattccccctctgtcccagaaggttggccagagggtgtgacccagttaccctttaacccccacccttccagtcgggtgtgagggcctgaccgggcccagggcaagcagatgtcgcaagccctatttattcagtcttcactataactcttagagttgagacgctaatgttcatgactcctggccttgggatgcccaagggatttctggctcaggctgtaaaagtagctgagccatcctgcccattcctggaggtcctacaggtgaaactgcaggagctcagcatagacccagctctctgggggatggtcacctggtgatttcaatgatggcatccaggaattagctgagccaacagaccatgtggacagctttggccagagctcccgtgtggcatctgggagccacagtgacccagccacctggctcaggctagttccaaattccaaaagattggcttgtaaaccttcgtctccctctcttttacccagagacagcacatacgtgtgcacacgcatgcacacacacattcagtattttaaaagaatgttttcttggtgccattttcattttattttattttttaattcttggagggggaaataagggaataaggccaaggaagatgtatagctttagctttagcctggcaacctggagaatccacataccttgtgtattgaaccccaggaaaaggaagaggtcgaaccaaccctgcggaaggagcatggtttcaggagtttattttaagactgctgggaaggaaacaggccccattttgtatatagttgcaacttaaactttttggcttgcaaaatatttttgtaataaagatttctgggtaataatga

SEQ ID NO: 5964 - DNA, 7657 bp, Homo Sapiens
  NM_080797
gtacttgcgcagaactcccctcgcggcgaccacgcactacgggttggcgccagagtcaaaaggcgtcggccctctggcaagatggctgctgcggaggcgttggagcgcggaaatctggaaccgggatggcgacgtctacactgagtcggaggcgaaggagcttactccacgggaacagcctctagataatctgagttgttgaaaatacgaagcctgttactcgtgaacagtggctgacaacagtgttgttgtgagcctggctgtctgcttggacccagaggtttcgtctgccagggtttttggttgtatttaggatttcagggaaaagtgtccaagctttcagtgttggagcaggtatggacgacaaaggcgacccgagcaatgaggaggcacctaaggccatcaaacccaccagcaaagagttcaggaaaacatggggttttcgaaggaccactatcgccaagcgagagggcgcaggggacgcggaggctgacccactggagccgccacccccacagcagcagctgggcctgtccctgcggcgcagtgggaggcagcccaagcgcactgagcgcgtggagcagttcctgaccattgcgcggcgccgcggcaggaggagcatgcctgtctccctggaggattctggtgagcccacgtcctgccccgccacagacgccgagacagcctccgagggcagcgtggaaagcgcttctgagaccagaagcggcccccagtctgcttccacagctgtgaaggaacgaccagcctcttctgaaaaggtgaaaggaggggatgaccacgatgacacctccgatagtgacagcgatggcctgaccttgaaagagcttcagaatcgccttcgcaggaagcgggaacaggagcccactgagaggcccctgaaagggatccagagtcgcctgcggaagaagcgccgggaggagggtcccgccgagactgtgggctccgaggccagtgacactgtggagggcgtcctgcccagtaagcaggagcccgagaacgatcagggggttgtgtcccaggctgggaaagatgacagagagagtaagttggagggaaaggcggctcaggacatcaaagatgaggagcctggagacttgggccgaccgaagcctgaatgtgagggttacgaccccaacgccctgtattgcatttgccgccagcctcacaacaacaggtttatgatttgctgtgaccgctgtgaagaatggtttcatggcgattgtgtgggcatttctgaggctcgagggaggcttttggaaaggaatggggaagactatatctgcccaaactgcaccattctgcaagtgcaggatgagactcattcagaaacggcagatcagcaggaagctaaatggagacctggagatgctgatggcaccgattgtacaagtataggaacaatagagcagaagtctagcgaagaccaagggataaagggtagaattgagaaagctgcaaatccaagtggcaagaagaaactcaagatcttccagcctgtgatagaggcgcctggtgcctcaaaatgtattggccccgggtgctgtcacgtggcgcagcccgactcggtgtactgcagtaatgactgtatcctcaaacacgccgcagcgacaatgaagtttctaagctcaggtaaagaacagaagccaaagcctaaagaaaagatgaagatgaagccagagaagcccagtcttccgaaatgcggtgctcaggcaggtattaaaatctcttctgtgcacaagagaccagctccagaaaaaaaagagaccacagtgaagaaggcagtggtggtccctgcgcggagtgaagcactcgggaaggaagcagcttgtgagagcagcacgccgtcgtgggcgagcgatcacaattacaatgcagtaaagccagaaaagactgctgctccctcgccgtcactgttgtataaatccacgaaggaagacaggaggtccgaggagaaagcggcagccatggcagcctcaaagaaaacagcccctccaggctccgcggtgggcaagcagcctgcacctagaaacctcgtgccaaagaagtcttcttttgctaatgtggcagcagccacaccagccattaaaaagccaccctcaggtttcaagggcaccatccccaagaggccatggctctccgctaccccatcgagtggtgcttcagctgccaggcaggccggaccggcacctgcagcggcaacggctgcctccaagaagttccctggctccgctgctttggtgggagccgtaaggaagccagtggtaccttctgttccaatggcctcgccagccccaggacgccttggggctatgagtgctgcaccatcgcagccaaattcacaaattcggcaaaatatcagacgctccttaaaagagattttgtggaaaagagtcaatgacagcgatgacttaatcatgacagaaaacgaagtaggaaaaattgccctccatattgagaaggagatgtttaacttgtttcaagttacagataatcgctacaagagtaaatatcgcagcatcatgttcaacctgaaggaccctaaaaatcagggactcttccatcgtgttctgcgtgaggaaatctctttggcgaaacttgtgagactgaagccagaagaacttgtatctaaagagctttccacgtggaaagagaggccagcgagatctgtgatggagtccagaactaaactgcacaatgaaagcaagaagacggcccccaggcaggaggccatccccgatctggaggactctccgccagtgtcggattcagaggaacagcaagagtcagcacgtgctgtccctgagaagagcacagcgccgcttctcgacgtcttcagcagcatgttgaaagacaccaccagtcagcaccgcgcacacctcttcgatctcaactgtaaaatttgcacaggccaggttccctccgcagaagatgagccagctccgaaaaaacaaaaattgtcagcttctgttaagaaagaagacttaaaatcaaagcatgacagctctgcacctgacccagctccggattcagctgatgaggtgatgccggaggctgtgcctgaagttgcctctgagccaggcctagaaagtgcttctcatccaaatgtggacagaacgtatttccctgggcctccaggagatggccatcccgagccctccccgctggaagacctgtccccctgcccagcctcctgtgggagcggggtggtcaccaccgtcacagtgtccggccgggaccccaggaccgctccaagcagttcatgcacagccgtggcctccgcagcatcccgcccagacagcacccacatggtggaagccagacaggatgtgccgaagcctgtcttgacttctgtgatggtgcccaagtccatactagctaagccatcctcatctcctgacccaagatacctgtcagttcctccgtcaccaaatatcagcacttcagaatcacgttcccctccagagggagacacgaccctctttttgtctcgactcagcaccatttggaaaggatttattaacatgcagagtgtggcaaaatttgtcactaaggcgtatcctgtctctgggtgttttgattacctcagtgaggatttgcctgacacaattcacattggtgggaggatcgcaccgaagacagtttgggattatgttggcaaactcaagtcttctgtgtctaaggagctctgtctgatccgcttccaccccgccacagaggaagaggaggtcgcctatatctctctctactcctatttcagcagccgtggccgctttggtgttgtagctaataacaacaggcacgtcaaggacctctacctgatcccgctgagcgcccaggaccctgttccatccaaactcttgccctttgagggaccaggtaagcgccggctttctgggtggaggtgaggcccacctgcacctgcacccctcctcccactgacatgccctgctgagtcctgaccagcccagggctctctgggagcaggagttaggagcacagacgcagcggttagcaataggattcatctttgagggcgtaggactgtggcacgagaagtacccctgattcacagcataaattgtcttaggagagttttttagagagggaaaaacccacagcctgcaaccagctcatcttggcctcaggtcagagaagactcagtgcccagaagcccaaggctcagccagaaagggaggtgacactcccagcggccctgctctttcctctagacagactcgggagccagcacacaccgggaagtggctccatcagggatcacttctctaacagggatggatttccaggagacttaacaataatgacatagaaaactatttctagaaataattattttaaaatctgcagctcaaattgtaataggttcattcatctttggcaagctattttgtgtttgcacgttccttggaaagtactgtatttaaacgattatttacaaatagcctaaaatacatctttgtcaagggttgagggtgattccaggggccacgtgctctgttagtgaccagctctttcatagccccttagaagaagctgatgtgacttcagttaggggttagtatctgatgcccaactgaagtgtctccgtggccatgcagtccccagaggattggtgttctctcaaagcgggtgtgtggatcacacagtgtcctctgaagtgcttcgtcataaaggcaggtgctgtctggaccctgtgcctcagtgccctctgtccctgtcaccaggcctcggcgggtgttcctgccatagctgtgcagggtgttcccacccacacccctcatgccgcaccctagctagctggggtcctgtaggggccactccacatcttgggcgggacttctgtcgccccaggcacagcccacgttcctactggagcccattcttcacagctggagtgggctcagcctatgcctgtgttgtggaattatatgtccataaagggattggttggtatcagtaatttcagggttaaatatttgctggcgtggtgcattaaattattttagtgccagataaatttttaaaagcaaagtgctttagtgtgtcccctcaaatcctacttgggataaagagatgccacctaatgggtggcagaaaggaccctggtagaggttcttggtgttgcttgtgaagagctctggccagctccacgtgaccagggagaggaaaagcccggccctcctggaggtgaagaccgagaagctggcctctccgcacctgtgaagacccactggtcagttgcaagtgcgacagtgtgtgcactcagtgcagacactgcagcacctcagcacctccctaccggggtggaaagagcactttttctttacagaaacatgattcttagatagcgagcctcccctttttaaaacaattgaggcgatatttcatcctttcttgagcttctctccctgctcatctccaaacttggagctgtcaggtgagcacggttgtagggtgttgagcgagccccggcgcatgccgggcaccgggttccccacactgggcagtgacggggcccagggaggccaccagaggagcggcgcctccattctccccacagcaagggctggctgtgcaggtgcagccccggggcagagggaaaggacaggtctcccagcacctcccggatggcaccgggacaaggagggctgggctggggtcactcaccttgtctgctgagtgcgatggcaccaaccacccacactgtcagctccgcgaccagctgggggaacgtcacactcgcccaccaaggcacttgctgaggccacgacgccgcctgacggggacacacaaaagccccagggactttgatccacgataaagagcagaggcgtctgggtaaagtaacacagggcaagggactttagaaaagtaacagctagtgaaacctttccatacacttcagaaatgttttaacttaagacttcagtataatgttaacttctcctgatgtccttgttgacatgaatgcgtgtgcgtgaaatctcacacacttccatggtcactaaacagccttcaccccgggccaggccatcgggtactcggcccgcttcacgtactgattacttgacttggcgttttctagatataaacatgtacatgtgtgtcctggctttgtggtgtaaatgtgtagtgcgtgtgcatgtgcgcgcgtgtgtgtgtgtaaggctaggtcctggcatgtttcccctgtctcagcggaccctgtcctcacggagatagcccagaagcccttggacagcacaggccacacctgagggtgctgatggtggtgactccacagagctgtggtcaggggtgagcgtgtgctgcgcagcttggagtcacgcccccagaagtgctgggtgagggtctgcaggacccagctccattccacagcctcagttctctgcggcacatgcagcacaggcctgaaggagacctggcgccccagccttgagctgcccgtctgcatcagggcactgatgtgggagcatcttcccctggggatgttaaggagaaggtcctgttgggggtagagattcacgcagaaaagagtgactgactcgtccatgtgcctcagtttataccacacaattgcaggtgtccatgcctcccacacatggggacctagtgggttttgacagcgtggtgtccagtcctagccccctcagtgcttgctgttcacacttaagcaagtgaaggcctgaaggtgcccagctgtgccctcaggggaaacttaagtcacccgccctgtcagcacttggcccttgtcgggcagtgagagtggagctgcccccgcagcaccctcaggagccatgcagttcacagcagtagctggatctccctgaggacatttgtccttgcatatcttaatgatttgtccacagaaacaccgggttgtcttcctctgcccctctgccccgcagtgggggcactctctgtaactcagcatcacggtggggggcagctgggaggcctggttccaggtgaccttctccacctagatgttcaccccactcagttccagctttaccaacagggccccccgcagggacttggggtcgcagagtcccggcctgtctcagggccttgttcatggaagggagatgagtcaggttgaaagctcatcgtgtagggttctgtgcagggcccttacaggactggaccgcagccaagatgcctgcctgttaaccatgcccagcccccgtcatttccgcgtgaagccgcaggcctcggagccttggtctgaaatgcctgtggagtaacctcggtccataaacatgggtgcacagtctgttctccccaagtacagggcaggaggaaacaccgccctctgtagctgctcgaatggaaagggctcttttctctgaggtctttatacattagaaagctcttctgggaagaatgtttgaatccatagtgtctttctgtattcacttttaattgctttctaaattagctgagaaattctgacttgaaatattgtcaggtaagcatttcttcagttttcatgtgtgtatgtaacagtagctttgcatggaaattgtaatcagagtcaaatacagtattgaatggaatgtactgccttctcctcctaaatcaataaacatctttcatggaaaaaaaaaaaaaaaaa

SEQ ID NO: 5965 - DNA, 1069 bp, Homo Sapiens
  NM_080816
agagcagggcctgacatctccccagaacagacgtttgaacagagcaggcttctgaggtctccaaaatgcctgtcccagcctcctggccccatcctcctggtcctttcctgcttctgactctactgctgggacttacagaagtggcaggtgaggaggagctacagatgattcagcctgagaagctcctgttggtcacagttggaaagacagccactctgcactgcactgtgacctccctgcttcccgtgggacccgtcctgtggttcagaggagttggaccaggccgggaattaatctacaatcaaaaagaaggccacttccccagggtaacaacagtttcagacctcacaaagagaaacaacatggacttttccatccgcatcagtagcatcaccccagcagatgtcggcacatactactgtgtgaagtttcgaaaagggagccctgagaacgtggagtttaagtctggaccaggcactgagatggctttgggtggcccggcatcatcccttactgcgctgctcctcatagctgtcctcctgggccccatctacgtcccctggaagcagaagacctgactctccttccttcctcccctgccacgtgggaccctcatctctgctgcctccttcctttcctgagaggctcagcttgagagaatgagccagtgagaagcttctctagacttggctccaaacatctcccctcccaagacatctgcctgcccacaggctcctgttgctccttcacacagacctggatgccccagagcaaggtcttcattcatggtcctgagcaggtgccatgggattgggctctgggcactgacttaacggcacctccctagaaggcgagaaacatgccaaatctaaacacaccaggactcccatccatcgccttgagactgaccgtaaaccacagacgctctccaggttctcaagagttatcctgccttccagattcctgcctatcccaactccccagccttgttgaggttctctattgcctcttgaatacaaatgcactcccaaagtggttttaagaaaataaaaagattatccttccaaaa

SEQ ID NO: 5966 - DNA, 3349 bp, Homo Sapiens
  NM_080817
agttggtgtcatgcaagaatctattcacactgactaaagatattggaagagtgaagatcagagaattttaagtctgaaatttggcatcactgccctgaacaatataaccttagttggcataaactactcatacagacaaaggcattatccatcacaataagtaactttttgtctttatttcaaccggacaatcgtgattagaaaagctcctgtgacaaaattcaagaaaacctgacataaatgaacaacaatacaacatgtattcaaccatctatgatctcttccatggctttaccaatcatttacatcctcctttgtattgttggtgtttttggaaacactctctctcaatggatatttttaacaaaaataggtaaaaaaacatcaacgcacatctacctgtcacaccttgtgactgcaaacttacttgtgtgcagtgccatgcctttcatgagtatctatttcctgaaaggtttccaatgggaatatcaatctgctcaatgcagagtggtcaattttctgggaactctatccatgcatgcaagtatgtttgtcagtctcttaattttaagttggattgccataagccgctatgctaccttaatgcaaaaggattcctcgcaagagactacttcatgctatgagaaaatattttatggccatttactgaaaaaatttcgccagcccaactttgctagaaaactatgcatttacatatggggagttgtactgggcataatcattccagttaccgtatactactcagtcatagaggctacagaaggagaagagagcctatgctacaatcggcagatggaactaggagccatgatctctcagattgcaggtctcattggaaccacatttattggattttcctttttagtagtactaacatcatactactcttttgtaagccatctgagaaaaataagaacctgtacgtccattatggagaaagatttgacttacagttctgtgaaaagacatcttttggtcatccagattctactaatagtttgcttccttccttatagtatttttaaacccattttttatgttctacaccaaagagataactgtcagcaattgaattatttaatagaaacaaaaaacattctcacctgtcttgcttcggccagaagtagcacagaccccattatatttcttttattagataaaacattcaagaagacactatataatctctttacaaagtctaattcagcacatatgcaatcatatggttgacttttgaatggaaaaccccacaatattaagaaaagcattcatgtgactttattagggacactaaactacatcattaacatgtcacagcttggttgacaataatcaccaagaaaatctctttggtttttaaaaataaataaacatatattcataaaactcaaaaaacagttatactgaacgttgagatggcagaaactttcagaagcaaaaattaagcatattgaaaggatcccactcatatgaaactaacaggctgttttctgtttaaactcaactgtcagtgcttctgttcagaacacgttatttcatgactaggataaagaagcaaatggtttatgacttgtctgctttctggtagttagaatacaagggtcaatctatggctagtgtttattggtaattttaaaatctttaaaaataagtagctgggcacagtggcttacgcctgtaatcccagcactttgggaggctgaggtgggtggatcattttgaggtcaggagttcaagaccagcctgggcaacatggtgaaaccctgtctctactaaaaatacaaaaatcagctggacatggtggtgggcgcctgtaatcccagctactcgggaggctgaggcaggagaatcgcttgagcccgggacggaggttgcagtgagcggagatcgtgccactgcactacagcctgggaggcagagcgagactctgtctcataaaacaaaacaaaaaaataaaaataagtaaaaaaataaataagaaatatcctcattcacatcttacctaaatgcatgaataatacagtgaaaaaaatccaaggttttataaacatattatttatttgaaattatctggctcatgttattggggagaagcaatattcattgactatatttttaaagcagatgatacttataaaaatgcttaaatatttggattaggctttgtcaaagtaaaaagctatgtcattatatgcccatcttcatcacattgtgcatattttcttctgtattcaatataaataatgttattagtgacaaacagtacctggcagttaattttttgtgaaataaatgaatgaataataagggagtgtaatagtattgcagttaagagattgatctctgaagttatacttcttgggttcaatctggctctactttttatttagctggacaatcttaggcaaattaacttatcctctgtacgtgttaatttcttcatttgtagagcagaaaatactatcttatttacagatcctattattaaatcagctgttactattatgagtagctaacgcttagtaagcacttgctgtttgccaagcattctacttatatgctttacatatattattttaatcaccacaactctaaagtatactaatttactgatgaaaatattgaagtgggctgggtgcggtggctcatgcctgtaatcccagcactctgggaggccgaggtgggcagatcacctgaggtcaggagttcgagactagcctggccaacatggcgaaacccacctctactaaaaatacaaaaattagctgggcgtggtggtgtgtgcctgtagtcccagctacttgggaggctgaggcagaagaatcacttgaactcgggaggctgaggcaggagaatcacttgaactcaggaggcggaggttgcagtgagccaagatcatgccattgcactccagcctgggcgacagagtgagactctgtctcaaaaaaaaaaaaaaaaaaaaaaaaaaaaaaaaatatatatatatatatatatatatatgtatgtatgtatgtatatgtgcatagttaagtaaatcaccccaattttttctaatatttaagtgaacatttaaagataagcatttcttaatgttaatttcttttctttcatgtaatcttgtcagtagacaaatgatggtgactatattctgtaataagtacatatattatgattaaaaaaaaaagcgtgtactatctgcccaaagagatcataagcactttggagctataaacttcttgtctatttctacttccatggtactgatattctcttctcagataaccaaacaaaaacagctgaataaaatcaaccattaatagtaacttgc

SEQ ID NO: 5967 - DNA, 1368 bp, Homo Sapiens
  NM_080820
gggcgtggccgacgtggggtgggtagcagccgaccgagtcggaccggccagttgggcgcgcttccgggtgtcacctccagagggcgccggctgcggagccgccctcagagtcgcgaggccggacgcagcgcggcgccgccccactcgccccagccgccgccatgaaggccgtggtgcagcgcgtcacccgggccagcgtcacagttggaggagagcagattagtgccattggaaggggcatatgtgtgttgctgggtatttccctggaggatacgcagaaggaactggaacacatggtccgaaagattctaaacctgcgtgtatttgaggatgagagtgggaagcactggtcgaagagtgtgatggacaaacagtacgagattctgtgtgtcagccagtttaccctccagtgtgtcctgaagggaaacaagcctgatttccacctagcaatgcccacggagcaggcagagggcttctacaacagcttcctggagcagctgcgtaaaacatacaggccggagcttatcaaagatggcaagtttggggcctacatgcaggtgcacattcagaatgatgggcctgtgaccatagagctggaatcgccagctcccggcactgctacctctgacccaaagcagctgtcaaagctcgaaaaacagcagcagaggaaagaaaagaccagagctaagggaccttctgaatcaagcaaggaaagaaacactccccgaaaagaagaccgcagtgccagcagcggggctgagggcgacgtgtcctctgaacgggagccgtagctcaggaggcagaattcagtgtgttatcattgggcagaactggatcctgaaaaattcaagatgctaagcacctacactactttaagaatttggaactgaaacatgaagaggaagacagaaataagaatttgggaacctgaatagctctgcaaaaaacaccaaaggaccgttttatcgttttctgttgttgctgtggtggagtgatgcagtgggcactgccggtgggccagggggcgggtgcgcatgtggtagaaggtgtgcgctcgtgcctcccccacagaaaggctttgttggtttctaccacatcttggcttgcttttggaacaggctggcccagcatcatttgtcatcaagtccactgtggtgtattctgcgtgtccatggcgggggttctccaatacactcacactgtccatgttctttttattgccagggcccgtgttgaagtgtcaagagagcaatcatcaatgataatgtattgtgtgagacctttgcatcttgtaaattttctcttttttctaaaaataaataataataaaatcctaaatctcaacaaaccactttattatcaaacaaa

SEQ ID NO: 5968 - DNA, 3066 bp, Homo Sapiens
  NM_080821
gggtcagctccgcccaccctccccggcctccgcccgcctcccgggtcagcggcgcgggtgctgcgcctagctgcgcaccatggccgggttgctggcgttgctgggtccggcaggcagggtgggcgcccgggtccggcctcgcgccacctggctcctgggcgccaccgccccctgcgccccgccgcccctggccctggccctgctcccgcccaggctagacgcccggctgctccgcacggcgcgcggggactgccgcggccaccaggaccccagccaggccacggggacaacaggcagcagcgtcagctgcacagaggagaaaaagcaaagcaagtcacagcaactgaaaaagatttttcaagagtatggcactgttggcgtgtcattgcacattggaatctcattaatttccttgggcatattttacatggttgtgtcaagtggtgtggacatgcctgcaatcctgctgaaactcggatttaaagagtccctggtacagtcaaaaatggcagcaggcacaagtaccttcgtggtggcctatgcaatccacaagctgtttgcgccagtgagaatcagcattacgctagtctctgtgcccttgattgtcagatattttcgaaaagtgggattttttaaacctccagctgcaaaaccttaatgaactcttcagtcgtacacactgaaaacctatttcttctaaattacatgatttggattggttttagggttttagggttgtagggtttcttttggagaggtagggggctaattgctatgttctcatggataaactttgccagcaaaaatcaggcttttgaacaattttaattttttgcctcataaattttgtgaatgctattcattatagggcttgtatatataatctaaaatgtcagcaaggcatcggagatgggttaacatctcaaaacaaaatagcctacaaatgttccttgtgggagactttggcgagggtctgtgggtaaaagcaccagggggttaatcttggctcagtttcctaaaaagcattgattaatttaactggcttttaaatatccccttccgctgatatttgttgtcagctgcctacagtttaatatgcagcgttcacaaaacagctgccagtgctacaattaatgaagcaaaacttaatatgtaatcacaatctaaattagcatcaatactttgacattcattacattggtttgggggaagaaaagtagttctggtatgtttcattgatccccagataccttccaatctggacatgatggggctgattccagatggtttttctgaaatttcattaaggtaggtcagcgtcatttgtctctgtttaggtaaaatataaaaaccctgcccagtagcagtggcatcgcttggttcctgatgcccatgttccagaggaattcggataccacaaacagctaagacaatctcagcttttcttagacaatcttctatctcaaacttcagacattccagaattgtcatgatgtttacactgtctgagttaaaaatcctgttcaagaaaaaaaaagattttgtatcacttcttaaaaaggaatattcatagcacttgtcacaaatagaaggcaaccatgagataatacaagccagggagaggcttgtattacatgacaggtgtaattagtctgctgagccagctttacccaatgaagggcatatgtgttagagagattagctaagagtagaaattcgagcatagaggccaggtgcggtggctcacgcctgtaatcccagcactttgggaggttgaggcaggcgtgtcacttgaggccaggagttcgagaccagcctggccaacatgatgaaaccccgtctctactacaaatacaaaaattagccgggtgtggtggcacacgcctgtagtcccagctactggggaggctgaggcagcattgcttgaacccaggaggtggaggttgcagtgagccaagatcacaccactgcactccagcctgggcgacagagggagacactgtctccaaaagaaagaaatcccagcgtagatccaaactgagacactgaggcttcgtccttatagtagtcaggagcaggcgattgaagtaattctgtcctgcggggttcagcatcatgcacgttccccctgggccattctctgatgcagggcacttgctccacactctgggaacccagattcaccagtctgccctgtcacgtagttgaaggagttgcatttatctttctggctcctaattcctttaaaattacatttgttgcagaacctccacaaggctaaataaaattacatttgtgaccatcagagaactgaataaaccattaactggccatcctggttttgcagagatcaggttgttgacagttcctggttgacccacagctacccatgtcagttatctccactaacatatccaagaatctttgtaggacaatttctccacctgcaaggtctttcaggtagaactcttcttttaaggcaattagcccattgccaaaaggttttactgtcttaaagctgtctttctgagatctaattccaaggacttctccacagctaagtgagatgcctcacaccattaggtgatgctttggacagaacagagtattttcatcttgtgtttaaagcaattccttggcttcggctcctcaccactttctatgccagtctcccatttatgtccctagtaatgcctatgcaaaaaaaaaaaaagaaaaaaaagaaaaactgatggtgaaacctacaggtttaagggcttaaatctcaaactttgttaggagtaacaggagcgtgctgagcgggcaagcaataaaacaaatcataccaaaaagccacattgctctctcctaagccccaaccccactccactcctgtggccaggggtccaaacagaaaataaccggagaagacaaggaggtcaaaggatcagggaactaagcattatgtgaattcaccagcaagatgtacagaacgcctgtgtttacattgtttttatggaactagcagaataaaacatctattttaaaaatgaaaaaaaaaaaaaaaaaaaaaaaaaaaaaaaaaaa

SEQ ID NO: 5969 - DNA, 3350 bp, Homo Sapiens
  NM_080875
acttccggtgcttgccctgcccatccccgtggcgggggcgtggccatggcgggggcgctccggcgggggcgggccctgggctcccgcccttcgggtcccacagtttccagccgccgctctcctcagtgcccggtggcccaggagggcctgggagcccgaagccgtccccgagtcgctcctaggtcactggcgcgatgcgggccgtcctctcggctgatgggttggaagcccagcgaggctagaggccagtcccaaagtttccaggcatcagggctgcagcccaggagcctcaaggcggcccggcgggcgactggacggccggacaggtcccgagcagcccggcccaccatggacccctctgcccacaggtcccgagcagccccgcccaacatggacccagacccccaggcgggcgtgcaggtgggcatgcgggtggtgcgcggcgtggactggaagtggggccagcaggacggcggcgagggcggcgtgggcacggtggtggagcttggccgccacggcagcccctcgacacccgaccgcacagtggtcgtgcagtgggaccagggcacgcgcaccaactaccgcgccggctaccagggcgcgcacgacctgctgctgtacgacaacgcccagatcggcgtccggcaccccaacatcatctgtgactgctgcaagaagcacgggctgcgggggatgcgctggaagtgccgtgtgtgcctggactacgacctctgcacgcagtgctacatgcacaacaagcatgagctcgcccacgccttcgaccgctacgagaccgctcactcgcgccctgtcacactgagtccccgccagggcctcccgaggatcccactaaggggcatcttccagggagcgaaggtggtgcgaggccccgactgggagtggggctcacaggatggaggggaagggaaaccgggccgtgtggtggacatccgtggctgggatgtggagacaggccggagtgtggccagcgtgacgtgggctgatggtaccaccaatgtgtaccgtgtgggccacaagggcaaggtggacctcaagtgtgtgggcgaggcagcgggcggcttctactacaaggaccacctcccaaggctcggcaagccggcggagctgcagcgcagggtgagtgctgacagccagcccttccagcacggggacaaggtcaagtgtctgctggacactgatgtcctgcgggagatgcaggaaggccacggcggctggaaccccaggatggcggagtttatcggacagacgggcaccgtgcatcgtatcacggaccgcggggacgtgcgcgtgcagttcaaccacgagacgcgctggaccttccaccccggggcgctcaccaagcaccactccttctgggtgggcgacgtggtccgggtcatcggcgaccttgacacagtgaagcggctgcaggctgggcatggcgagtggacggacgacatggcccctgccctgggccgcgtcgggaaggtggtgaaagtgtttggagacgggaacctgcgtgtagcagtcgctggtcagcggtggaccttcagcccctcctgcctggtggcctaccggcccgaggaggatgccaacctggacgtggccgagcgcgcccgggagaacaaaagctcactgagcgtggccctggacaagcttcgggcccagaagagtgacccagagcacccgggaaggctggtggtggaggtggcgctgggtaacgcagcccgggctctggacctgctgcggaggcgcccagagcaggtggacaccaagaaccaaggcaggaccgctctgcaagtggctgcctacctgggccaggtggagttgatacggctgctgctacaagccagggcgggcgtggacctgccggacgacgagggcaacacggcactgcactacgcggccctggggaaccagcccgaggccaccagggtgctcctgagtgctgggtgccgggcggacgccatcaacagcacccagagcacagcactgcacgtggccgtgcagaggggcttcctggaggtggtgcgggccctgtgtgagcgcggctgtgacgtcaacctgcccgacgcccactcggacacgcccctgcactccgccatctcggcgggcactggagccagcggcattgtcgaggtcctcacggaggtgccaaacatcgatgttaccgccaccaacagccagggtttcaccctgctgcaccatgcctccctcaagggtcacgcgctagctgtgagaaagattctggctcgggcgcggcagctggtggacgccaagaaggaggacggcttcacggcgctgcatctggctgccctcaacaaccaccgcgaggtggcccagatcctcatccgggagggccgctgtgacgtgaacgtgcgcaaccggaagctgcagtccccgctgcatctcgccgtgcaacaggcccacgtggggctggtgccgctactggtggacgctgggtgcagtgtcaacgccgaggacgaggagggggacacagccctgcacgtggcgctgcagcgtcatcagctgctgcccctggtggctgatggggccgggggggacccagggcccttgcagctgctgtccaggctacaggcctcgggcctccccggcagcgcggagctgacggtgggcgcggcggtcgcctgcttcctggcgctggagggcgccgacgtgagctacaccaaccaccgcggtcggagcccgctggacctggccgccgagggtcgcgtgctcaaggcccttcagggctgcgcccagcgcttccgggagcggcaggcgggcgggggcgcggccccgggccccaggcaaacgctcgggacccccaacaccgtgacgaacctgcacgtgggcgccgcgccggggcccgaggccgctgagtgcctggtgtgctccgagctggcgctgctggtgctgttctcgccgtgccagcaccgcaccgtgtgtgaggagtgcgcgcgcaggatgaagaagtgcatcaggtgccaggtggtcgtcagcaagaaactgcgcccagacggctctgaggtggcgagcgccgcccccgcccccggcccgccgcgccagctggtggaggagctgcagagccgctaccggcagatggaggaacgcatcacctgccccatctgcatcgacagccacatccgcctcgtgttccagtgcggccacggcgcatgcgccccctgcggctccgcgctcagcgcctgccccatctgccgccagcccatccgcgaccgcatccagatcttcgtgtgagccgcgccgtccgccgcgcccgagctgccttcgcgtgcccccgccctgtgttttataaaaagaaagattctcggacgttgaaaaaaaaaaaa

SEQ ID NO: 5970 - DNA, 1202 bp, Homo Sapiens
  NM_080914
ccccagccctcagagcaacctcagcccagcccagcccagctccagctccagctccagcccgggccccatcatggccaaggactttcaagatatccagcagctgagctcggaggaaaatgaccatcctttccatcaagggccacctcctgcccagcccctggcacagcgtctctgctccatggtctgcttcagtctgcttgccctgagcttcaacatcctgctgctggtggtcatctgtgtgactgggtcccaaagtgagggtcacaggggtgcacagctgcaagccgagctgcggagcctgaaggaagctttcagcaacttctcctcgagcaccctgacggaggtccaggcaatcagcacccacggaggcagcgtgggtgacaagatcacatccctaggagccaagctggagaaacagcagcaggacctgaaagcagatcacgatgccctgctcttccatctgaagcacttccccgtggacctgcgcttcgtggcctgccagatggagctcctccacagcaacggctcccaaaggacctgctgccccgtcaactgggtggagcaccaaggcagctgctactggttctctcactccgggaaggcctgggctgaggcggagaagtactgccagctggagaacgcacacctggtggtcatcaactcctgggaggagcagaaattcattgtacaacacacgaaccccttcaatacctggataggtctcacggacagtgatggctcttggaaatgggtggatggcacagactataggcacaactacaagaactgggctgtcactcagccagataattggcacgggcacgagctgggtggaagtgaagactgtgttgaagtccagccggatggccgctggaacgatgacttctgcctgcaggtgtaccgctgggtgtgtgagaaaaggcggaatgccaccggcgaggtggcctgaccccagcacacctctggctaacccataccccacacctgcccagctctggcttctctgttgaggattttgaggaaaggaagaaacactgagacaggggtatggggaagagctgagcaaagagagaaaggaggtagtttaagagtccctgaccctggaggactgagatcccacctccttctgtaattcattgtaattattataatcgtcagcctcttcaatggcgtaggaaagaagaaacaaatgcttgaatctc

SEQ ID NO: 5971 - DNA, 1144 bp, Homo Sapiens
  NM_080916
aacggtgcgctggagcgagtgagcagcgatacctagggcggaagtgctctcggcggaagtgatcgctgtgtgaatcgtgggtgggatggccgcgggccgcctctttctaagtcggcttcgagcacccttcagttccatggccaagagcccactcgagggcgtttcctcctccagaggcctgcacgcggggcgcgggccccgaaggctctccatcgaaggcaacattgctgtgggaaagtccacgtttgtgaagttactcacgaaaacttacccagaatggcacgtagctacagaacctgtagcaacatggcagaatatccaggctgctggcacccaaaaagcctgcactgcccaaagtcttggaaacttgctggatatgatgtaccgggagccagcacgatggtcctacacattccagacattttcctttttgagccgcctgaaagtacagctggagcccttccctgagaaactcttacaggccaggaagccagtacagatctttgagaggtctgtgtacagtgacaggtatatctttgcaaagaatctttttgaaaatggttccctcagtgacatcgagtggcatatctatcaggactggcattcttttctcctgtgggagtttgccagccggatcacattacatggcttcatctacctccaggcttctccccaggtttgtttgaagagactgtaccagagggccagggaggaggagaaaggaattgagctggcctatctagagcagctgcatggccaacacgaagcctggcttattcacaagacaacgaagctccactttgaggctctgatgaacattccagtgctggtgttggatgtcaatgatgatttttctgaggaagtaaccaaacaagaagacctcatgagagaggtaaacacctttgtaaagaatctgtaaccaataccatgaagttcaggctgtgatctgggctccctgactttctgaagctagaaaaatgttgtgtctcccaaccacctttccatccccagcccctctcatccctggagcactctgccgctcaagagctggtttgttaattattgttagactttgccattgttttcttttgtacctgaagcattttgaaaataaagtttacttaagttatgcttgtttttctaa

SEQ ID NO: 5972 - DNA, 4847 bp, Homo Sapiens
  NM_080921
agtatttttggagaagttagtaaaaccgaatctgacatcatcacctagcagttcatgcagctagcaagtggtttgttcttagggtaacagaggaggaaattgttcctcgtctgataagacaacagtggagaaaggacgcatgctgtttcttagggacacggctgacttccagatatgaccatgtatttgtggcttaaactcttggcatttggctttgcctttctggacacagaagtatttgtgacagggcaaagcccaacaccttcccccactgatgcctaccttaatgcctctgaaacaaccactctgagcccttctggaagcgctgtcatttcaaccacaacaatagctactactccatctaagccaacatgtgatgaaaaatatgcaaacatcactgtggattacttatataacaaggaaactaaattatttacagcaaagctaaatgttaatgagaatgtggaatgtggaaacaatacttgcacaaacaatgaggtgcataaccttacagaatgtaaaaatgcgtctgtttccatatctcataattcatgtactgctcctgataagacattaatattagatgtgccaccaggggttgaaaagtttcagttacatgattgtacacaagttgaaaaagcagatactactatttgtttaaaatggaaaaatattgaaacctttacttgtgatacacagaatattacctacagatttcagtgtggtaatatgatatttgataataaagaaattaaattagaaaaccttgaacccgaacatgagtataagtgtgactcagaaatactctataataaccacaagtttactaacgcaagtaaaattattaaaacagattttgggagtccaggagagcctcagattattttttgtagaagtgaagctgcacatcaaggagtaattacctggaatccccctcaaagatcatttcataattttaccctctgttatataaaagagacagaaaaagattgcctcaatctggataaaaacctgatcaaatatgatttgcaaaatttaaaaccttatacgaaatatgttttatcattacatgcctacatcattgcaaaagtgcaacgtaatggaagtgctgcaatgtgtcatttcacaactaaaagtgctcctccaagccaggtctggaacatgactgtctccatgacatcagataatagtatgcatgtcaagtgtaggcctcccagggaccgtaatggcccccatgaacgttaccatttggaagttgaagctggaaatactctggttagaaatgagtcgcataagaattgcgatttccgtgtaaaagatcttcaatattcaacagactacacttttaaggcctattttcacaatggagactatcctggagaaccctttattttacatcattcaacatcttataattctaaggcactgatagcatttctggcatttctgattattgtgacatcaatagccctgcttgttgttctctacaaaatctatgatctacataagaaaagatcctgcaatttagatgaacagcaggagcttgttgaaagggatgatgaaaaacaactgatgaatgtggagccaatccatgcagatattttgttggaaacttataagaggaagattgctgatgaaggaagactttttctggctgaatttcagagcatcccgcgggtgttcagcaagtttcctataaaggaagctcgaaagccctttaaccagaataaaaaccgttatgttgacattcttccttatgattataaccgtgttgaactctctgagataaacggagatgcagggtcaaactacataaatgccagctatattgatggtttcaaagaacccaggaaatacattgctgcacaaggtcccagggatgaaactgttgatgatttctggaggatgatttgggaacagaaagccacagttattgtcatggtcactcgatgtgaagaaggaaacaggaacaagtgtgcagaatactggccgtcaatggaagagggcactcgggcttttggagatgttgttgtaaagatcaaccagcacaaaagatgtccagattacatcattcagaaattgaacattgtaaataaaaaagaaaaagcaactggaagagaggtgactcacattcagttcaccagctggccagaccacggggtgcctgaggatcctcacttgctcctcaaactgagaaggagagtgaatgccttcagcaatttcttcagtggtcccattgtggtgcactgcagtgctggtgttgggcgcacaggaacctatatcggaattgatgccatgctagaaggcctggaagccgagaacaaagtggatgtttatggttatgttgtcaagctaaggcgacagagatgcctgatggttcaagtagaggcccagtacatcttgatccatcaggctttggtggaatacaatcagtttggagaaacagaagtgaatttgtctgaattacatccatatctacataacatgaagaaaagggatccacccagtgagccgtctccactagaggctgaattccagagacttccttcatataggagctggaggacacagcacattggaaatcaagaagaaaataaaagtaaaaacaggaattctaatgtcatcccatatgactataacagagtgccacttaaacatgagctggaaatgagtaaagagagtgagcatgattcagatgaatcctctgatgatgacagtgattcagaggaaccaagcaaatacatcaatgcatcttttataatgagctactggaaacctgaagtgatgattgctgctcagggaccactgaaggagaccattggtgacttttggcagatgatcttccaaagaaaagtcaaagttattgttatgctgacagaactgaaacatggagaccaggaaatctgtgctcagtactggggagaaggaaagcaaacatatggagatattgaagttgacctgaaagacacagacaaatcttcaacttatacccttcgtgtctttgaactgagacattccaagaggaaagactctcgaactgtgtaccagtaccaatatacaaactggagtgtggagcagcttcctgcagaacccaaggaattaatctctatgattcaggtcgtcaaacaaaaacttccccagaagaattcctctgaagggaacaagcatcacaagagtacacctctactcattcactgcagggatggatctcagcaaacgggaatattttgtgctttgttaaatctcttagaaagtgcggaaacagaagaggtagtggatatttttcaagtggtaaaagctctacgcaaagctaggccaggcatggtttccacattcgagcaatatcaattcctatatgacgtcattgccagcacctaccctgctcagaatggacaagtaaagaaaaacaaccatcaagaagataaaattgaatttgataatgaagtggacaaagtaaagcaggatgctaattgtgttaatccacttggtgccccagaaaagctccctgaagcaaaggaacaggctgaaggttctgaacccacgagtggcactgaggggccagaacattctgtcaatggtcctgcaagtccagctttaaatcaaggttcataggaaaagacataaatgaggaaactccaaacctcctgttagctgttatttctatttttgtagaagtaggaagtgaaaataggtatacagtggattaattaaatgcagcgaaccaatatttgtagaagggttatattttactactgtggaaaaatatttaagatagttttgccagaacagtttgtacagacgtatgcttattttaaaattttatctcttattcagtaaaaaacaacttctttgtaatcgttatgtgtgtatatgtatgtgtgtatgggtgtgtgtttgtgtgagagacagagaaagagagagaattctttcaagtgaatctaaaagcttttgcttttcctttgtttttatgaagaaaaaatacattttatattagaagtgttaacttagcttgaaggatctgtttttaaaaatcataaactgtgtgcagactcaataaaatcatgtacatttctgaaatgacctcaagatgtcctccttgttctactcatatatatctatcttatatagtttactattttacttctagagatagtacataaaggtggtatgtgtgtgtatgctactacaaaaaagttgttaactaaattaacattgggaaatcttatattccatatattagcatttagtccaatgtctttttaagcttatttaattaaaaaatttccagtgagcttatcatgctgtctttacatggggttttcaattttgcatgctcgattattccctgtacaatatttaaaatttattgcttgatacttttgacaacaaattaggttttgtacaattgaacttaaataaatgtcattaaaataaataaatgcaatatgtattaatattcattgtataaaaatagaagaatacaaacatatttgttaaatatttacatatgaaatttaatatagctatttttatggaatttttcattgatatgaaaaatatgatattgcatatgcatagttcccatgttaaatcccattcataactttcattaaagcatttactttgaatttctccaatgcttagaatgtttttaccaggaatggatgtcgctaatcataataaaattcaaccattatttttttcttgtttataatacattgtgttatatgttcaaatatgaaatgtgtatgcacctattgaaatatgtttaatgcatttattaacatttgcaggacacttttacaggccccaattatccaatagtctaataattgtttaagatctag

SEQ ID NO: 5973 - DNA, 1107 bp, Homo Sapiens
  NM_080923
agtatttttggagaagttagtaaaaccgaatctgacatcatcacctagcagttcatgcagctagcaagtggtttgttcttagggtaacagaggaggaaattgttcctcgtctgataagacaacagtggagaaaggacgcatgctgtttcttagggacacggctgacttccagatatgaccatgtatttgtggcttaaactcttggcatttggctttgcctttctggacacagaagtatttgtgacagggcaaagcccaacaccttcccccactggtaagaattaatatttatatttttactaattttattttcttgttgcaaagtttatatatttaactacaattttctattattaacactgaaattatttttaaggataaattttataatcatgagtgattcttgacattcacttgttcttaaactttctgcttatacgttatagagtttaataactacctaaacatgttattaaatttgtatatatattttgtgtataaatagtaacttttcccaaacttgacagtaaatcacacaacaggtttctactctcttttaatattttaagactataaaaaaatgcatttaaattagataacaaaattttatagtctgaaagcaggttaacagctgtctatgtatgttatagatatgtagataacagatttgcatatgtctatatttctttaagagtatgttgcttttttcaatggtatgcaaaacctttgagactattgagatatttttaaataataattttcaaattctactgaacacttcaatagtccttataaatgtcttaatcatgagataaatttaaaacacagagatgctgcaaataaattcatacatagtacatacaaaataagagaaaaaattaaattgcagatggttaaatatcacatcacttaactgatgttactgaaaatgtattttcctgcataatcatatggttgacagtatgcattaagaaggtaagtaaaacaatgaagacaattttgatttaatatggtaatgcacaattccaactaacgtacattcaacagatcatgaaattgggttattaaaatgaatatttttgtcattaaataaaaattccgtccaaa

SEQ ID NO: 5974 - DNA, 702 bp, Homo Sapiens
  NM_080926
aggagctctacggtgactttgaagacttggaaacaggggacgtgcacaagggaaaatcgggccccgatactcagaatgaagatgtagagaaacaaggaagaaattgaccctgacgaagaagaaagtgccaagaaaaagcatttggataagaagagaaaattgaaggagatgtttgatgtggaatatgatgaaggagaaagcacatattttgatgatcttaaaggagaaatgcagaaacaagcacagctgaatcatgcagaatttgaagatcaagatgatgaagccagagttcagtatgagggttttcgacctgggatgtacgtctgcgttgagattgaaaatgttccctgtgaatttgtgtagaactttgacccccgttaccccattatcctgggtggcttgggcaacagcgagggaaatgttggatacgtgcagatgcgtctgaagaaacatcgctggtataagaaaatcctcaagtcccgagatccaatcatattttctgtagggtggaggaggtttcagaccatcccgctctgttatatcgaagaccacaatggaagacaaaggcttctaaagtataccccacagcatgtgcatcgcggagcagccttttgggatcctatcactccacagggaactggtttcttggcaatacagtctgtcagtggcataatgcctgattttcggatagctgccacataa

SEQ ID NO: 5975 - DNA, 3088 bp, Homo Sapiens
  NM_100264
ccttatttagtccgcgatggcttccctcgcgccccaccgtcctcttccggaaggcggctccctccctgcgcagcccggagcccctgagatcagcctcgagcaggcgcccgagcgagactatccctaaacgggaacggcggtggccgactcgcgagtgaggaaaagaaggaaagggcagactggtcgcgaagagaagatccaggcctcagaggaggagaaaggccggagccagccgagctgtcacgaccggaggggggactcgcagccttaccaggcacttaagtattcatcgaagagtcaccccagtagcggtgatcacagacatgaaaagatgcgagacgccggagatccttcaccaccaaataaaatgttgcggagatctgatagtcctgaaaacaaatacagtgacagcacaggtcacagtaaggccaaaaatgtgcatactcacagagttagagagagggatggtgggaccagttactctccacaagaaaattcacacaaccacagtgctcttcatagttcaaattcacattcttctaatccaagcaataacccaagcaaaacttcagatgcaccttatgattctgcagatgactggtctgagcatattagctcttctgggaaaaagtactactacaattgtcgaacagaagtttcacaatgggaaaaaccaaaagagtggcttgaaagagaacagagacaaaaagaagcaaacaagatggcagtcaacagcttcccaaaagatagggattacagaagagaggtgatgcaagcaacagccactagtgggtttgccagtggaatggaagacaagcattccagtgatgccagtagtttgctcccacagaatattttgtctcaaacaagcagacacaatgacagagactacagactgccaagagcagagactcacagtagttctacgccagtacagcaccccatcaaaccagtggttcatccaactgctaccccaagcactgttccttctagtccatttacgctacagtctgatcaccagccaaagaaatcatttgatgctaatggagcatctactttatcaaaactgcctacacccacatcttctgtccctgcacagaaaacagaaagaaaagaatctacatcaggagacaaacccgtatcacattcttgcacaactccttccacgtcttctgcctctggactgaaccccacatctgcacctccaacatctgcttcagcggtccctgtttctcctgttccacagtcgccaatacctcccttacttcaggacccaaatcttcttagacaattgcttcctgctttgcaagccacgctgcagcttaataattctaatgtggacatatctaaaataaatgaagttcttacagcagctgtgacacaagcctcactgcagtctataattcataagtttcttactgctggaccatctgctttcaacataacgtctctgatttctcaagctgctcagctctctacacaagcccagccatctaatcagtctccgatgtctttaacatctgatgcgtcatccccaagatcatatgtttctccaagaataagcacacctcaaactaacacagtccctatcaaacctttgatcagtactcctcctgtttcatcacagccaaaggttagtactccagtagttaagcaaggaccagtgtcacagtcagccacacagcagcctgtaactgctgacaagcagcaaggtcatgaacctgtctctcctcgaagtcttcagcgctcaagtagccagagaagtccatcacctggtcccaatcatacttctaatagtagtaatgcatcaaatgcaacagttgtaccacagaattcttctgcccgatccacgtgttcattaacgcctgcactagcagcacacttcagtgaaaatctcataaaacacgttcaaggatggcctgcagatcatgcagagaagcaggcatcaagattacgcgaagaagcgcataacatgggaactattcacatgtccgaaatttgtactgaattaaaaaatttaagatctttagtccgagtatgtgaaattcaagcaactttgcgagagcaaaggatactatttttgagacaacaaattaaggaacttgaaaagctaaaaaatcagaattccttcatggtgtgaagatgtgaataattgcacatggttttgagaacaggaactgtaaatctgttgcccaatcttaacatttttgagctgcatttaagtagactttggaccgttaagctgggcaaaggaaatgacaaggggacggggtctgtgagagtcaattcaggggaaagatacaagattgatttgtaaaacccttgaaatgtagatttcttgtagatgtatccttcacgttgtaaatatgttttgtagagtgaagccatgggaagccatgtgtaacagagcttagacatccaaaactaatcaatgctgaggtggctaaatacctagccttttacatgtaaacctgtctgcaaaattagcttttttaaaaaaaaaaaaaaaaaaattgggggggttaatttatcattcagaaatcttgcattttcaaaaattcagtgcaagcgccaggcgatttgtgtctaaggatacgattttgaaccatatgggcagtgtacaaaatatgaaacaactgtttccacacttgcacctgatcaagagcagtgcttctccatttgttttgcagagaaatgtttttcatttcccgtgtgtttccatttccttctgaaattctgattttatccatttttttaaggctcctctttatctcctttcttaaggcactgttgctatggcacttttctataaccttttcattcctgtgtacagtagcttaaaattgcagtgattgagcataacctacttgtttgtataaattattgaaatccatttgcaccctgtaagaatggacttaaaagtactgctggacaggcatgtgtgctcaaagtacattgattgctcaaatataaggaaatggcccaatgaacgtggttgtgggaggggaaagaggaaacagagctagtcagatgtgaattgtatctgttgtaataaacatgttaaaacaaacaaaaaaaaaaaaaaaaa

SEQ ID NO: 5976 - DNA, 2592 bp, Homo Sapiens
  NM_130395
ggccgagggcgggcggacgcgggagctgcggacgtgaggcatgagcggcgccctcctccggcccgcgagcgtcctgctggttccccgagcgagggtctcgcggcgcggggcctagcggagggcatcgaaggcctccgcgtgcgcacgggttgctgcggccgcgccgggcgccggggagggcggcggccgccatggaggtgagcgggccggaagacgaccccttcctttcgcagctgcaccaggtgcagtgccccgtgtgccagcagatgatgcccgccgcgcacatcaactcgcacctggaccgctgtctgctgctccacccggcggggcacgcggagcccgcggccgggtcgcaccgcgccggggagcgggccaaggggccctcgccgcccggcgccaagaggcggcggctgtcggagagctcggcgctgaagcagccagccaccccgacggcagccgagagcagtgagggcgagggcgaggagggcgacgacggcggcgagaccgagagccgcgagagctacgacgcgccgcccacacccagcggcgcccgccttatccccgacttcccggtggcccgctccagcagccccgggaggaaggggtcggggaagaggccggcggccgccgccgcggcggggagcgcgtctccgcgcagctgggacgaggcggaggcgcaggaggaggaggaggccgtgggcgacggcgatggcgacggggacgcggacgcggacggcgaggacgacccggggcactgggacgcggacgctgccgaagccgccaccgccttcggggccagtggcgggggccgcccgcacccccgggcgctggctgccgaggagatccgacagatgctacagggcaagccgctggccgacacgatgcgtcctgacacgctgcaggattacttcgggcagagcaaggccgtgggccaggataccctgctgcgctcgctcctggagaccaacgaaatcccctcgcttatcctgtgggggccgccgggctgcggcaagaccactctggctcacatcatagccagcaacagcaagaaacatagcataaggtttgtgacattatctgcaacaaatgccaagacaaatgatgtgcgagatgtcataaaacaagctcaaaatgaaaagagctttttcaaaaggaaaaccatcctttttattgatgagattcatcggttcaataaatctcagcaggtcaacgctgctcttctgagccgctgtcgagtgattgttcttgagaagcttccagtagaggcaatggtgactattttaatgcgagcgatcaactccctgggaatccacgtcctagactctagccgtcccactgaccctctgagccacagcagcaacagcagctcagagcccgccatgttcatagaggataaagcagtagacaccctggcttacctcagtgacggtgacgcccgagctgggttgaacggactgcagctggcggtgctggctaggttaagctctaggaagatgttctgtaagaagagtgggcaatcctattctcccagtagagttctgatcacagagaatgacgtgaaggagggcctacagcgatcccacattttatatgaccgggcaggtgaggagcattacaactgcatctccgccctgcacaagtccatgcggggctcagaccagaacgcctccctctactggctggctcgcatgctcgagggaggagaggacccactctacgtggcacggaggcttgtcaggtttgccagcgaggacataggtctggcagacccgtctgcgttaacacaagcggttgctgcctaccaaggctgtcattttataggcatgcctgaatgtgaggtgcttctggcccagtgtgtggtctactttgccagagccccaaagtccattgaggtgtacagcgcctacaacaacgtcaaagcctgcctgaggaaccaccaggggccactgccccccgtgcccctgcacctgaggaacgcgcccactaggctgatgaaggatttgggctatggcaaaggctacaagtacaaccccatgtacagcgagcctgtggatcaggagtacctgcctgaagagttgaggggggtagatttcttcaagcagaggaggtgctgactcctcagggcacgacagcagaaggatgttgcttttttaagggagggccagaaagaaagttagtggattgcaaagttggttgcctggtggaagttagaacagaccaacattttgtgccagaaatttaagagttccataggtggaggcgcagttctttcgaataaatgtgtaactttgaaattgtgttcatttgcactcggtgcagcggttatgcttatgaaaatacctggcagctttgtgcaatgaattaatgttataaggaattatctattttgtcatagtatttaagtcataatgtcatttcagaattcagttctgtaggattttcttttctttaaaaaatgtatattctgggtagttttaattggtaaaaaaatgtaattgtgatttaatactgcatagtgttttgggtattttttttatatgcaaaggtcttacgagccaataaaactatttcaaagtaaaaaaaaaaaaaaaa

SEQ ID NO: 5977 - DNA, 5039 bp, Homo Sapiens
  NM_130435
ctgatgctgtgggcgtgggctgtgcagcagagggcagctgagaggctgggtggctgggcctgggagacacacagaggccaggccttagcgcggctcagccatgagcaacaggagtagcttttcccggctcacctggttcaggaagcagaggaaagctgtggtcagcaccagcgacaagaagatgcccaacggaatcttggaggagcaagagcagcaaagggtgatgctgctcagcaggtcaccctcagggcccaagaagtattttcccatccccgtggagcacctggaggaggagatccgtatcagatccgccgacgactgcaagcagtttcgggaggagttcaactcattgccatctggacacatacaaggaacttttgaactggcaaataaagaagaaaacagagaaaaaaacagatatcccaacatccttcccaatgaccattctagggtgattctgagccaactggatggaattccctgttcagactacatcaatgcttcctacatagatggttacaaagagaagaataaattcatagcagctcaaggtcccaaacaggaaacggttaacgacttctggagaatggtctgggagcaaaagtctgcgaccatcgtcatgttaacaaacttgaaagaaaggaaagaggaaaagtgccatcagtactggcccgaccaaggctgctggacctatggaaacatccgggtgtgcgtggaggactgcgtggttttggtcgactacaccatccggaagttctgcatacagccacagctccccgacggctgcaaagcccccaggctggtctcacagctgcacttcaccagctggcccgacttcggagtgccttttacccccattgggatgctgaagttcctcaagaaagtaaagacgctcaaccccgtgcacgctgggcccatcgtggtccactgtagcgcgggcgtgggccggacgggcaccttcattgtgatcgatgccatgatggccatgatgcacgcggagcagaaggtggatgtgtttgaatttgtgtctcgaatccgtaatcagcgccctcagatggttcaaacggatatgcagtacacgttcatctaccaagccttactcgagtactacctctacggggacacagagctggacgtgtcctccctggagaagcacctgcagaccatgcacggcaccaccacccacttcgacaagatcgggctggaggaggagttcaggaaattgacaaatgtccggatcatgaaggagaacatgaggacgggcaacttgccggcaaacatgaagaaggccagggtcatccagatcatcccgtatgacttcaaccgagtgatcctttccatgaaaaggggtcaagaatacacagactacatcaacgcatccttcatagacggctaccgacagaaggactatttcatcgccacccaggggccactggcacacacggttgaggacttctggaggatgatctgggaatggaaatcccacactatcgtgatgctgacggaggtgcaggagagagagcaggataaatgctaccagtattggccaaccgagggctcagttactcatggagaaataacgattgagataaagaatgataccctttcagaagccatcagtatacgagactttctggtcactctcaatcagccccaggcccgccaggaggagcaggtccgagtagtgcgccagtttcacttccacggctggcctgagatcgggattcccgccgagggcaaaggcatgattgacctcatcgcagccgtgcagaagcagcagcagcagacaggcaaccaccccatcaccgtgcactgcagtgccggagctgggcgaacaggtacattcatagccctcagcaacattttggagcgagtaaaagccgagggacttttagatgtatttcaagctgtgaagagtttacgacttcagagaccacatatggtgcaaaccctggaacagtatgaattctgctacaaagtggtacaagattttattgatatattttctgattatgctaatttcaaatgaagattcctgccttaaaatattttttaatttaatggtcagtatattttgtaaaaatcatgttaatttatttcatagttgacattaatatcttccctaatttctttgtatatattttgttatgccttaaaggccacctgctatacagttgttaaatcttaaatatgctttttaaaaattggaataatgtattaaggtcaaataatatcccataaaatatatatttctgctaatattagtaaatatcttaatttttcattagattcatatcatttaatttcacatattcaacacctttaaatgttgtaatcttaatatgcgaagtgtgcctctgcaagatactaacacaaagctcatgttaagaaaacagttgaggactcagaagtcagttcgaaaatgcactttcctaacagtgaattcacaaccctgaacagcagcatttttggaaggcaaactgttcgtgatggtacaatgtaaatggggacttctgtaaagttctcagtttcggtccatgtggtttatctttacattttaaagatcaaagaagtctttacaacctgaatccaggtctaaaacacactagagtagctggtgactataaataatattttaaaatgctgtgtctacaccatcaagactgtgtctacactatcttggctgaacgagaagagatgtaaatgctgggtggtcccgttgacccacggcgttgggtacaacaaaaccagccatcggagttacaccccaaagcaccatttgctgtccagctgcctgtcgtttggcccagaccaccctcagaaaaaaaccagctgcctctcccattctcccctcccgttctgccacagcggcctgggctggtccagtgctatgcctggaggctcaacacaaaacttcccatccaaacattcagatgaactgagcgtcttacacacgcagtacagaggagcacacattaggatagaaacagtagaataaccacgggcaattaaactttaaattttctgagcagcattttggtatttaaacatttcttgtaaaaagctgagacagtttgtaagaaaagaatccttaaaatctagatttataccattttttaaagtcccacctttcaatgtttaataaaacaaaaagagaaatccttaatctaaaagctaaattatttttgaatggaaatactactgagaccattgacactggataacagtaatgatcccattaccagataagattgactgacggggaaaaaaaaaaaaaaagaatggggtgtgaatgtaccaacactgaatcttacagcagttatctttctatggccattaggtacctagcagatgtgcacaatataaacaaaaagatatctggcctaccttactactaaaagcatttaacacgtgcatttttggtacttttttttttgttttctaaaagctacataaaggccttatttgacattttcactgataactgatcgcaccctcatgttgcagtgttcgtcccctattcattaacagtgtgtgcaaatgcaaccccaggacacattattgttctgatagatgctcacagggaatcaagcttctcgcccactccacggctctgagccccatccaagggcaagacttggtgcccagctggaaggacgaaagcacactttgtgaccgccatcctcaccagctgcatgcctgggctgcacactgctgaacgtgctcctctctccttctctgtacaatgattcagcatctcggcggaagaggaaaatggagctttttgaggctcgccaggtcccttttgttttcaccattaaaattccaaacccaaagcctttgtttgactgaaggagaagagagggaagtaagcttctgttcagcacctgaaccctagaaaaagagccagtttgctacgatgaaggtgacatttctctggtcatttatttgagagttcgaagtcaaagtcgaggggcaccggctttggttcatgtctaggagccctctgtcagaatccttgaagccctttaatggtctaactggcatctcttgtatcaagaagtacctttaaggtagaccttttcagggtgccctcaggaaagggccctgctcatgtttttttcctgtccccttagaccaaccccaggtgtccactgcaggggttctgcctgttcccaaactttttccattccaggaacaaaggagaagccactttccccaggacgcaagactctcccctccactgtccgggacagcgttcgccctttagcggggaggtcattacagcctcatggcctctaccaaggccccagatcacaggatctcctgggccttggagcacctcacgctgggggaatcaatccctgagggactcagaatcttctccgtgcaacctggaaagttcatctcttgtttccttcagtcaaagaaagtccattgtacataacaaaacagcccccaaacagcccagtgccgacaccattgttcctttcacactttcctttgttgcatgcagttgggttcaaatgccaaatagtgattagaagacgaccattctgatctgtgtgtgatctggtcactatgtgactgcctttacggtttctctccatgtgctatatgaatgaagaatgcataccagtgttttaaaaggtatttttatgtgtttttaaacacttttttaaatgagcctgacacctgtgtttcagcatttggagacatccccatgttattcttttaagtgtataattactgatacttttttgtttgtttgtttaactaagttgtgtttaacttatgtgcagtctttataatgtatgtatgttattacagtttcaactatcatattttctttgattacatttataatttgatcttgctctgattataatgccagtgaatgttgctgaactctttgtatatgcaaattgcaagatttaaaccattctgatgcaaggataaacctttactttgactaccagcctgtgtttttgtctttaaatctcttaatttcattcctctgcaaaaaaaaaaaaaaaaaa

SEQ ID NO: 5978 - DNA, 3470 bp, Homo Sapiens
  NM_130439
atacacacagactcacagcgagaccgacacacactcccatacactcacacacacaactgcaggcagcgaggctcgggaagtcaggccggcttttcgccccggcgccttctctgctccagccggccgggtctccctgggggcccggagctcggccgggccgcgcagccccgttagaggacgagctcggcggacccccgctcctccatgggcaaacgcgggcggccgcgcaaggaggcgcgctgcgagggcgcggggctggcccccgccgcgcccccggctgtgccccccgccgtggccgcgccccagcccccggccctgcccgaggaccccgctggggccaagcccaggtgccccttctcagacattttcaacaccagcgagaactcgatggagaagcacatcaacacttttctgcagaacgtgcagattctgctcgaggccgccagctacctggagcagatcgagaaagaaaacaaaaagtgtgaacatggctacgcctcttcattcccgtccatgccgagcccccgactgcagcattcaaagcccccacggaggttgagccgggcacagaaacacagcagcgggagcagcaacaccagcactgccaacagatctacacacaatgagctggaaaagaatcgacgagctcatctgcgcctttgtttagaacgcttaaaagttctgattccactaggaccagactgcacccggcacacaacacttggtttgctcaacaaagccaaagcacacatcaagaaacttgaagaagctgaaagaaaaagccagcaccagctcgagaatttggaacgagaacagagatttttaaagtggcgactggaacagctgcagggtcctcaggagatggaacgaatacgaatggacagcattggatcaactatttcttcagatcgttctgattcagagcgagaggagattgaagtggatgttgaaagcacagagttctcccatggagaagtggacaatataagtaccaccagcatcagtgacattgatgaccacagcagcctgccgagtattgggagtgacgagggttactccagtgccagtgtcaaactttcattcacttcatagaacccagcatgacataacagtgcagggcaaaatattcactgggccaattcaatacaaacaatctcttaaattgggttcatgatgcagtctcctctttaaaacaaaacaaaacaaaacaaaactatacttgaacaaaagggtcagaggacctgtatttaagcaaatacttagcaaaaagtggggcagagcctcccaaggagaacaaatattcagaatattcatattggaaaaatcacaatttttaatggcagcagaaaacttgtgtgaaattttcttgatttgagttgattgagaagaggacattggagatgccatcctctttctcttttctagtttgctcatactacattgagtagacacatttaaggatggggttatgaacccttcctgagctttatggtcctaaaagcaaaataaaaactattcgaatgaaaagacaagaaaatcaggtattaatcttggatagctaataatgagctattaaaactcagcctgggacagtttatcatgaagcctgtggatgatcaatcctttattattattttttttttttgaaaaaagctcatttcatgctctgcaaaaggagagactcccatgaagccttttgaaagggatcatcatgcagctcaactttctgttggattccatgctaagcaagctaaccttatcctgcattgttagcactaggcacccagctgccacctctccatcctgctgcccttaggccacatgggagcagtccatgcatgacagcctctatcctacaaggcctatgagtatggattgggggggccaaaaggaaaaagctccatgtgcctctttgtctgcgtgggtcagaagagttgtgcacgcagattagcaggccaaggtctgagccacagcagcatttttatttcagattttgataactgtttatatgtgttgaaaaccaaaatgacatctttttaaagcttatccataaaaaaaaatagatgtcttttatagtggaaaaacacatggggaaaaaaatcatctattttgatgcagcatttgataatgataaaacacctcacacctcactctttatagtgcacaaaatgaatgaggtctgggctaggtagaaaaagggtcaatgctatttttgtttttagaatcattaccttttaccagcttttaaccatctgatatctatagtagacacactatcatagttaacatagtaagttcagcacttgtctcattttaatgtaaagatttgcttccattttcctacaggcagtctctctcttcctcacagtcccactgtgcaggtgctattgttactcttacgaatattttcagtaatgttattttcttctaagtgaaatttctagcctgcactttgatgtcatgtgttccctttgtctttcaaactccaaggttcccttgtggccctctcccttaccctgggaaggcctcttggagaccttacccctggctgtttggactttgtatactttaaataatttaactacccttaattacttaaaaaaaaaaaaaagctttatgattttcataacttattgctgattttaatggattgttaatttcagtcctgtagttttattttatgtttagatagggctgggcaaggaaaaagaaaataaagacaaccatatttagcagtgcagttgagttgtgtgttaatgttagactatccctttgtgagtgacactttaacagcattcactgcttctatatatagtgtaccatcttggtcatacattacgcctcaacatatacttgtgctcttcctttgcctccagaagaagtttttccttgattgtgctatgtttcagtggaagaaattctttgaagtagatgtgagtgaaaaactgcatgcctttagaagcccagtatcagaacttgctacgtttcaggtgctagggacttaatgaaaaacaggacaaaacaattcctttttgtggcccaggtaaattatttctggtttcacttataattactaatggctgagtcaagatgttgtctctgtgtttgcttactcttgatcaagtgtgagacagtttgaagactgtgctaccatacaaagtgaatgaagccagtgactaagcttctgtttgttttgttattctcatggccttcgcttgcattatttgggccttcattcagatgaacttgaggtgccattttgttgcatatgtacaggattatgggctggaaagcatttgttataaacctatagtgcacattttaactgccccctaaattacccttccctgggtttgttttccttggggtggtgtagattgtatgagtaagaagtattaattttttaaaagacaaatcaactttgaagacacaaaagttaattggaagaaataaaaactgtgaacgaagaa

SEQ ID NO: 5979 - DNA, 6320 bp, Homo Sapiens
  NM_130446
aatccgctcagctcctgcaatggggcctgcctgacacttgggcgctccttcagtctcgatgttgatggcaggacaaaggggcgcctggaccatgggtgatgtggtcgagaagagtttggaagggcccctggcaccttctacagatgagccctcccagaaaacaggagacttggtcgagatcttaaatggggaaaaggtcaaatttgacgacgcgggactctccttaattcttcagaatggcctggaaaccctgcgaatggaaaacgctctgacagatgtcatcttgtgtgtggacattcaggaattctcctgccaccgcgtggtgcttgccgcagccagcaactatttcagggccatgttctgcaacgatttaaaggaaaagtatgagaaaaggatcattattaaaggggttgatgctgagaccatgcacactctgttggactacacgtacaccagcaaggcgctgatcaccaagcagaatgtccagcgggtcctggaggctgctaacctcttccagttcctgcggatggtggatgcctgtgccagcttcctcactgaagccttgaacccagaaaactgcgttggaatactgaggctggctgacacacactcgctggacagtctaaagaagcaggttcagagttacatcattcaaaactttgtgcagattctgaactctgaggagtttcttgacctgcccgtggacactctgcaccacatcttgaagagtgatgacctttacgtgaccgaggaggctcaggtgtttgagaccgtgatgagctgggtccggcacaagccatcagaacgactctgcttactcccctatgtcctcgagaacgtgcgcttaccgcttctggacccgtggtactttgtggagacggtggaagcagatcctctcatcaggcagtgcccagaggtcttcccgctgctccaggaagccaggatgtaccacctttctggcaatgagatcatttcggaacgcaccaagcccaggatgcatgagttccagtctgaggtgttcatgatcattggcggctgcacgaaggatgaacggtttgtggcagaggtgacctgcctggaccccctgaggcgcagccgcctggaggtggccaagctcccgctaacagagcatgagctggagagtgagaataagaagtgggtggagtttgcatgcgtgacattgaaaaatgaggtctacatctcaggtggcaaagaaacacagcatgatgtttggaaatataattcttcgatcaacaagtggattcagattgagtatttaaacataggccgctggaggcataagatggtggtgttgggtggcaaggtctatgtgatcggaggctttgacggcttacagagaatcaacaatgtggagacctacgacccctttcacaactgctggtcagaggccgcacccctccttgtccatgtcagttcctttgcagccaccagccataagaagaagctgtatgtgatcgggggagggcccaatgggaaactggccacagacaagactcagtgttatgacccttccaccaacaagtggagtttgaaggcggccatgcccgtggaggctaaatgcatcaatgcagtgagtttccgggaccgcatctatgtcgttggtggggccatgagagcgctgtacgcctacagcccgctggaagacagctggtgcctggtgacccagctcagccacgagcgggccagctgcggtatcgcgccctgcaacaaccggctctacatcaccggcgggcgggacgagaagaacgaggttatcgccacggtgctgtgctgggaccccgaggcccagaaactgacagaggagtgcgtcctgccccggggcgtgtcgcaccacggcagcgtcaccatcaggaagtcgtacacccacatccgcaggatcgtgcccggagcagtgtctgtctgacggcaggatggggagctggagagcccccccgaccctcagcgtacccgcctcacctctcaccctcctccagtcccacttcaggcagcaggctcgagtttgaggccatacatcaggggatccccttgactcactttgggggaaccttggaagtcacagtttggggtcacttgagaccggccaggaatgtttgcatgacctacctcaggaggggaggcgaggaagagtaatatttagcattcaggacccacccaccctatgccggcttctgtgccaggcacttccttttatcggttcatttaacctggtgactggctcttatcacttctagtttacaggtgagggaaccaagtttcacagaggctaagtggcgtgcccctgatcactcagatagcaagtagctaccccaggagtctaaaatccaggtctttcatctccgaagtcaatgctctttccaccatgctgcctatctcagagcaggaaaaacaaacaaaaaacaacaacaaaacctggctcttgctgggcgtggcggctcacgcctgtaatcccagccctatgggaggctgaggcgggcggatgacctgaggtcaggagttcaagaccagcctggccaacatggtgagaccgccccgtctctactaaaaatacaaaaattagccgcgtgcagtggcaggcgcctgtaattccagctactcaggaggctgaggcaggaggatcacttgaacttgggaggtggaggttgcagtgagccgagatcgccacactgcactgcagcccgggaaacaaaagtgaagctctgtcttcaaaacaaaaacaaaaacaaaaacaaaaacaaagaaacctggctcatttcttgtttcggcaagtctgctaaaagattcactcagcacagcagggaaataaaggtgtttcctgctttctttccttttctttcttattctgcatcctccctcgtccccgccctttaccaatatttaaaccaaggagtcatttgggctccttgccaagaacatctcataggttcttccacttgaaaggtctgggggatgggcttgggaaggcctgtttgctttgaaagagatgaaatacttgtgttctgtcctcctcccattgaaaccctcttttttttttttttgagatgaagtcgcccaggctggagtgcagtggcatgatctcggctcactgcaacctctgtcaccctggttcaagtgattttcctgcctcagcctcctgagtagctgggattacaggcacctgccaccgcgcctggctaatttttgtagttttagtagagacggggtttcaccatcttggccaggctggtcttgaacgcctgaccttgtgatctgcccgcctcggcctcccgaagtgctgggattacaggtgtgagccactgggcccggtctttttttttttaaatgatcataagatggcccattttggaccggaactgtcattgccagacagaattgtacctttagcacattctggtgccctggcctcttagtgttcaccagttgtactgcaatatagacaagatgtctctagagactcaaactactgttttattaaaaaagtaaacacctgagcacagctggcctacacaggagcgacagattctccttgatggtacactttctagtttttacacagtgatttaggtccacgttcctgataccccatcctcctgaagccttcgttttcaagacttttaaaaagcacttctacttggttttttgatcagtgtagctcaattgtgacttaaagaacagaatctgtccttcactgtaagagctacagctttcaaatgagctcactggaaattcattctaatccccaagctggagaaacaggttaagagatcctgtttcatatgctgtatttaaaaagcaacaatgataacaacatagtaactgcgttacccaatggactttattttcatcatatgatttcaattctctttatagagttttatttcatatccggtgtggcttgttcttttcagcagtttgggaagttagttattagagttgatagtgaattgaattttcattaaacagtcacggttagaagaagctaatatttgaaacagattttaaaaacttgaaaaattacaggtgagatttctgtttatgccagattattgaagataaatataaatgtatgttggtgtgtgaaatgctctgtgccttagaagcgtgacagttcagctctctgctgtggaaagtaacacagggcaatagaaacatatttgtggaattttagaacaaactattgctgactcatgagcactataataaccatcaggaagctcccaactgaagcaatgtaacagtgtaatctagttcaattcagcaaacattcatggagttcttcatgtctgtcaagccttgaggacacccacgaatggcaaatctccacgctagacactcaatacaggtaaataggccaccagttaatattcttgtttttattttcttcaagttagctaaaaatgagatgcgtatgaagtgaggaggctggatccaagtcttgattgcctttcagggggtcaaggtggtaagctgtgcagtgaagtcaaccagtggccatggcttacatgtttgtctctttgagatcgccaccagaaccatttgtgaactgatttgtgaaggaaaagtcagtcttactccaaagactattgcagggaggaacttccagagaggaaatccaatgacaatggtactggcatacacagggagcctcccttcaaaaagacagcgcccctagtcagggaggggatggcggtcctttgataagacccataggcaaacttcgagcccatcagcaggtcaaccctatgctgggaaagtgaggatttgggatttctgtgctataaacctgattctaaatgtaggacccaagtttctggactacttcagaatacctaaatgaatcatggaaacactctttatgattttttacaacaccagatatgcaggtgaattgtggaaaatgtcatgtagctgacactcaagaaatagggattcctaataatggcatgggtagggaacagatacacctggttagaaggtctagggttctgtatatgaagctgccagtctgtagctcttcgagaaagaaagttcaagtcatttgggggaaacttaagaatagtcatcagggttttagcttctaggcaccagccaaggatgagaacttctaaaatctaaaatccatttcaagaaataaagacgaacacatttgcaggaaggtaactgttataacccacaccatcagcagggggaaagccaagctgagaataaacccagagacaaagaaccctcggactcaggcaggacatggcaggatgttctggcacagcagactggagactgaggcagggcctgtgagtggacagagcacccctggctgggaagaagaagatggggtaggaggaggtcaggttccaaggatgcaggtctggaaaatgatatcggaggccctggagtttgtgagcttggctctagtcccaagaagggtgagggagaataagggtaagggagtattctaggcaaggaactaaggaaggaatccccttcttagagcagaggcacaagttagagcaggcccagcatttgggccaacttactgtggggcctctgagctgctcagctgggtctcctgtcctagagggaaggtggcccagagtctttggtggagcggaatctgtagatgaggttaagggactccagttgccaaggttgatctgaaacaggcagggagctaagctcatcagaacaccaacagattcatgttctcgtcttagctttcatctattctggtctcaatggcttcgggaaacacacatatacacatacaccatgcccttgaactcaaagcaaactacgctctcagggaaatacaaatatcacgttcttatagctgtaaagtatagcttagctatttatagaagactatgaggtactgttgtgagttatttgcttatcctgttttattctgaaaaatgaaagtgctcaatagaatttttaacgttggcaacaccataaggatttcttatgttaagtcccaacttggggttgcaaaatcattttttcccttaatacctgggtgttgtattagatctcataatttgacaagttaaccttttagaaatccacatatatctcaaatctggctactgcaaaaccagttttgacaggtcagattttcatatgtataggtataaatagccaacactcagtgaacaaaatcctttaagcattttggttacataaagttgtatgttttaagtgatcaaactaagaatattgtttataggttttaaaaaccaaaccaataaaatttttatttattcaataaaatatgcacagaacagatgcaaatgtgttatatacaa

SEQ ID NO: 5980 - DNA, 1603 bp, Homo Sapiens
  NM_130463
ctaacctgttgtaagcccgcagctttgggcctggtctctgctgctcccaggcggcccctttgggtactgcctgagcaagaagtgctggagaggaggaccagtcatcaataggaggatgagattgggagagacactcggtgcaggaggctgagtgagcaggggagcactaagacccaggggtagtggaggactgcagcaacgagctggaggaggagaagtaagcggtggggggtgggagccatctggtactttgacagcattcaaaacagcatcggccataacaacagaaatggccagtcagtcccaaggtatccagcagcttctgcaagctgagaagcgggcagctgagaaggtggcagatgccagaaagaggaaggcccggcgactgaagcaggcaaaggaggaggcacagatggaggtggagcaataccgcagagagcgagagcacgaattccagagcaagcagcaggcggccatgggctcccaggggaacctgtctgctgaggtggagcaggctacaaggcgccaggtgcagggcatgcagagctcccagcagagaaaccgagagcgtgtcctggcccagcttcttggcatggtctgcgacgtcaggccccaggtccaccccaactaccggatttctgcctagggccaccgtagggcctgactccttctgccagttccctccctcaaagaaatcctccaatcaaaatcacctcccaccataatccctgtcttctttccatcccctagaaatcctgggaggcaggatccaataattttcctgtgacacttataaatatcctgctcacatctgaatctccttgttgttctttaaccctcactgggactttgtaaacttccaagtcattctcacctaaaccctctgtgaaatttgtaatatggggaagtaggaatgtggaaaacatcctgacttcagtgtctggccgatgtgggtccctctcttgaccctgtcacttgctggctgtgaaaccaggacaagctacttaacttggtagcctcgatgtcctcctctgtgaaactgggatgataataatgcctaccttgtgagggttgcttcaatgattaggaatcattctgtaaagtctagcacagttccttgcatgttgtagcagtgattcagtaagtagcaaccctgtgatactattaccaccacctgctcactggtcaaaacctacacagctgtttcctcacgtccatcactggctctctaattccacttgttcattctgtgaccctagttattttctgaaaaattggttcttctcttttcccagagaccttctgatctccaaaaagaggagatgactacatttagcccctctcttataattccaggtagataactgcattttgtagcctctctttgtttttcttttgctgatctttgtctttattagattttcctcctttcctatttccccaaagacttatcagatgctcattgctttctaagatctaaaatgatactgtgttccctcatatgcatgcccttcctttctatatccttgacaccttactttcccattgtaacaataaaaaaagtatcaataaaataattattggcaaataaattggtgagttg

SEQ ID NO: 5981 - DNA, 2596 bp, Homo Sapiens
  NM_130465
ggcggggcccggtccagaggcggggacagcagggctccgggcaaggaggtctggatgctgagggcggtccctgaggggcgggcggggcccgaccggcgctctgtgtggccgaggccatgaagccgcagccgcccggctaggccccgggcggctctagcccagggcggcccgcggggcgctgggcctggctcccggctccggtttccgggccggcgggtggccgctcaccatgcccggcaagcaccagcatttccaggaacctgaggtcggctgctgcgggaaatacttcctgtttggcttcaacattgtcttctgggtgctgggagccctgttcctggctatcggcctctgggcctggggtgagaagggcgttctctcgaacatctcagcgctgacagatctgggaggccttgaccccgtgtggctgtttgtggtagttggaggcgtcatgtcggtgctgggctttgctggctgcattggggccctccgggagaacaccttcctgctcaagtttttctccgtgttcctcggtctcatcttcttcctggagctggcaacagggatcctggcctttgtcttcaaggactggattcgagaccagctcaacctcttcatcaacaacaacgtcaaggcctaccgggacgacattgacctccagaacctcattgactttgctcaggaatactggtcttgctgcggagcccgaggccccaatgactggaacctcaatatctacttcaactgcactgacttgaaccccagccgggagcgctgcggggtgcccttctcctgctgcgtcagggaccctgcggaggatgtcctcaacacccagtgtggctacgacgtccggctcaaactggagctggagcagcagggcttcatccacaccaaaggctgcgtgggccagtttgagaagtggctgcaggacaacctgattgtggtggcgggagtcttcatgggcatcgccctcctccagatctttggcatctgcctggcccagaacctcgtgagtgacatcaaggcagtgaaagccaactggagcaaatggaatgatgactttgaaaaccactggcttacgcccaccatttccgaggtcctgtccacggcggggcctcagcagaactctctgactggggcccctggcccggccccacccagccgacatgttttctttggcctgggtggtttataccctgagccaacctttaaaaattggtagatttcacataaaagtccagatccacagcttctcttgaagaatgaccacctggctacgccggctcttcggtggcaacactacctgggacactgcctccccagtcaccaagggccccagctggcccgttctactcacctaagtgccgcctgacccttgtacactaggagctggcctcccacctctgcagggttattccctgcacctcgaggccgctgcgggccaatctggagtgaaacacggggacctgaaggatggagaggctggaccccgctttgaagagggtgcagcctgggaagggcggccttgctggggactgcggtgggagtagagtgcccaggagagggtctgaggggtgggatgggggtcaggacaattttgcaaaagaagtagctggaagccatgggactggcgggagcctgtttgggggatctggatggttgactcctaggagtcaagttcagcatcttcaccgtggctgcagagctgcctgatgggcactagagggcatgccagccccacactccctgggtctggcttcctcccgcaacctcactctagtagagcctgtgcctgcctactagcgctctggggttcggagagtttgggaatttctcagagccaactggctcaggcttgggaaggctggctgctgccctcagctccgcctcatcagctatgtgaaggggtgtgtgtggagtgatcctgccgccccctccctgggctcgtccagagatctcaaactccgatgcccctggggccacgtatgttgtgtaaatggatgaaacaggcccttgagttgggagcctgcttcactttgactttcccactgttgctggagacaaagacatcgtgatgagagaaagttcgcacaatctagtcggtaacagccactttccttgagaccaagagagtgcggtggggatgggggggagagcacgggtccccgtctgacagtggccgctgccatattcaggtgtagctaattgctctggtgtgggaatgcaggcctaatgacagaaatctggagaagccagaaatacagatttgtatgtgagatgtcctgattttttaagttgttggcagaaattaattcagaaatcaaatctgcaggccaaacaaggtgcaggacccagctttggccccatgcccctgtaggtccctctgggacagtcaccgctggggtcctggctgctctgtcattgagggatgctgggcactgctgccgggtggccagggtatggggcatgtgcccagcaatgtggctccttggccccgctggccagtgtcctgggcccctgacaggcgctggctgtgagtggtttgtacatgctacaataaatgcagctggcagcattgtgcaaaaaaaaaaaaaaaaaa

SEQ ID NO: 5982 - DNA, 2213 bp, Homo Sapiens
  NM_130468
ctgcgaggccgggggtggagagcggccgggcgggacatccggcccgggtccctcgccgcgcccgccgcccgccgcccgcttcggcgccgcagcccgggagccggccacccctacacgcgccagggctgtcccctgccctcccctccccaactacccccggtcccagaccctcctcccgcccccagcccgagcccgccttccaggccgccctcggatcggccgggcccgcgcaggcccccaccccttgagcaccatgttcccccgcccgctgaccccgctggcggccccaaatggcgccgagcccctgggccgggcgctgaggcgggcccctctgggcagggcccgggcggggctgggtgggccgcccctgctgctgccgtccatgctgatgtttgcggtgatcgtggcctccagcgggctgctgctcatgatcgagcggggcatcctggccgagatgaagcccctgcccctgcacccgcccggccgcgagggcacagcctggcgcgggaaagcccccaagcctgggggcctgtccctcagggctggggacgcggacttgcaagtgcggcaggacgtccggaacaggaccctgcgggcggtgtgcggacagccaggcatgccccgggacccctgggacttgccggtggggcagcggcgcaccctgctgcgccacatcctcgtaagtgaccgttaccgcttcctctactgctacgtccccaaggtggcctgctctaactggaagcgggtgatgaaggtgctggcaggcgtcctggacagcgtggacgtccgcctcaagatggaccaccgcagtgacctggtgttcctggccgacctgcggcctgaggagattcgctaccgcctgcagcactactttaagttcctgtttgtgcgggagcccttggaacgcctcctctctgcctaccgcaacaagtttggcgagatccgagagtaccagcaacgctatggggctgagatagtgaggcggtacagggctggagcggggcccagccctgcaggcgacgatgtcacattccccgagttcctgagatacctggtggatgaggaccctgagcgcatgaatgagcattggatgcccgtgtaccacctgtgccagccttgtgccgtgcactatgactttgtgggctcctatgagaggctggaggctgatgcaaatcaggtgctggagtgggtacgggcaccacctcacgtccgatttccagctcgccaggcctggtaccggccagccagccccgaaagcctgcattaccacttgtgcagtgccccccgggccctgctgcaggatgtgctgcctaagtatatcctggacttctccctctttgcctacccactgcctaatgtcaccaaggaggcgtgtcagcagtgaccatgggtgtggggccagcagctggtggggactggtttcaacgccagctttctgtgcttctgcctgtcattcggagaaactctggctctggggcttggggcttctcaggatcctggatggcagagactgccctcagaagttccttgtccagggtgggcacccacagtgactcagaggacagggctaggcaggagacctgctgctcctcattggggggatctcttggggggcagacaccagtttgccaatgaagcaacacatctgatctaaagactggctccagaccccgggctgccaggattatgcagtccacttggtctaccttaatttaacctgtggccaaactcagagatggtaccagccaggggcaagcatgaccagagccagggaccctgtggctctgatcccccatttatccaccccatgtgcctcaggactagagtgagcaatcataccttataaatgacttttgtgcctttctgctccagtctcaaaatttcctacacctgccagttctttacatttttccaaggaaaggaaaacggaagcagggttcttgcctggtagctccaggacccagctctgcaggcacccaaagaccctctgtgcccagcctcttccttgagttctcggaacctcctccctaattctcccttccttccccacaaggcctttgaggttgtgactgtggctggtatatctggctgccatttttctgatgcatttatttaaaatttgtactttttgatagaacccttgtaagggctttgttttcctaatagctgactttttaataaagcagttttatatataaaaaaaaaaaaaaaaa

SEQ ID NO: 5983 - DNA, 5914 bp, Homo Sapiens
  NM_130473
accgcggccgcgcgcccccctctgcccccgctgcccaggattggtaggctccaccgctcggcagccggcttccctgctcggacgccgagcaccgccaaagcgcacttcgattttcagaattcctcctgggaatgctgactccttgcttggtgccctgatgcttctctgagataaactgatgaattggaaccatggtgcaaaagaagaagttctgtcctcggttacttgactatctagtgatcgtaggggccaggcacccgagcagtgatagcgtggcccagactcctgaattgctacggcgataccccttggaggatcacactgagtttcccctgcccccagatgtagtgttcttctgccagcccgagggctgcctgagcgtgcggcagcggcgcatgagccttcgggatgatacctcttttgtcttcaccctcactgacaaggacactggagtcacgcgatatggcatctgtgttaacttctaccgctccttccaaaagcgaatctctaaggagaagggggaaggtggggcagggtcccgtgggaaggaaggaacccatgccacctgtgcctcagaagagggtggcactgagagctcagagagtggctcatccctgcagcctctcagtgctgactctacccctgatgtgaaccagtctcctcggggcaaacgccgggccaaggcggggagccgctcccgcaacagtactctcacgtccctgtgcgtgctcagccactaccctttcttctccaccttccgagagtgtttgtatactctcaagcgcctggtggactgctgtagtgagcgccttctgggcaagaaactgggcatccctcgaggcgtacaaagggacaccatgtggcggatctttactggatcgctgctggtagaggagaagtcaagtgcccttctgcatgaccttcgagagattgaggcctggatctatcgattgctgcgctccccagtacccgtctctgggcagaagcgagtagacatcgaggtcctaccccaagagctccagccagctctgacctttgctcttccagacccatctcgattcaccctagtggatttcccactgcaccttcccttggaacttctaggtgtggacgcctgtctccaggtgctaacctgcattctgttagagcacaaggtggtgctacagtcccgagactacaatgcactctccatgtctgtgatggcattcgtggcaatgatctacccactggagtatatgtttcctgtcatcccgctgctacccacctgcatggcatcagcagagcagctgctgttggctccaaccccgtacatcattggggttcctgccagcttcttcctctacaaactggacttcaaaatgcctgatgatgtatggctagtggatctggacagcaatagggtgattgcccccaccaatgcagaagtgctgcctatcctgccagaaccagaatcactagagctgaaaaagcatttaaagcaggccttggccagcatgagtctcaacacccagcccatcctcaatctggagaaatttcatgagggccaggagatcccccttctcttgggaaggccttctaatgacctgcagtccacaccgtccactgaattcaacccactcatctatggcaatgatgtggattctgtggatgttgcaaccagggttgccatggtacggttcttcaattccgccaacgtgctgcagggatttcagatgcacacgcgtaccctgcgcctctttcctcggcctgtggtagcttttcaagctggctcctttctagcctcacgtccccggcagactccttttgccgagaaattggccaggactcaggctgtggagtactttggggaatggatccttaaccccaccaactatgcctttcagcgaattcacaacaatatgtttgatccagccctgattggtgacaagccaaagtggtatgctcatcagctgcagcctatccactatcgcgtctatgacagcaattcccagctggctgaggccctgagtgtaccaccagagcgggactctgactccgaacctactgatgatagtggcagtgatagtatggattatgacgattcaagctcttcttactcctcccttggtgactttgtcagtgaaatgatgaaatgtgacattaatggtgatactcccaatgtggaccctctgacacatgcagcactgggggatgccagcgaggtggagattgacgagctgcagaatcagaaggaagcagaagagcctggcccagacagtgagaactctcaggaaaaccccccactgcgctccagctctagcaccacagccagcagcagccccagcactgtcatccacggagccaactctgaacctgctgactctacggagatggatgataaggcagcagtaggcgtctccaagcccctcccttccgtgcctcccagcattggcaaatcgaacgtggacagacgtcaggcagaaattggagaggggtcagtgcgccggcgaatctatgacaatccatacttcgagccccaatatggctttccccctgaggaagatgaggatgagcagggggaaagttacactccccgattcagccaacatgtcagtggcaatcgggctcaaaagctgctgcggcccaacagcttgagactggcaagtgactcagatgcagagtcagactctcgggcaagctctcccaactccaccgtctccaacaccagcaccgagggcttcgggggcatcatgtcttttgccagcagcctctatcggaaccacagtaccagcttcagtctttcaaacctcacactgcccaccaaaggtgcccgagagaaggccacgcccttccccagtctgaaagtatttgggctaaatactctaatggagattgttactgaagccggccccgggagtggtgaaggaaacaggagggcgttagtggatcagaagtcatctgtcattaaacacagcccaacagtgaaaagagaacctccatcaccccagggtcgatccagcaattctagtgagaaccagcagttcctgaaggaggtggtgcacagcgtgctggacggccagggagttggctggctcaacatgaaaaaggtgcgccggctgctggagagcgagcagctgcgagtctttgtcctgagcaagctgaaccgcatggtgcagtcagaggacgatgcccggcaggacatcatcccggatgtggagatcagtcggaaggtgtacaagggaatgttagacctcctcaagtgtacagtcctcagcttggagcagtcctatgcccacgcgggtctgggtggcatggccagcatctttgggcttttggagattgcccagacccactactatagtaaagaaccagacaagcggaagagaagtccaacagaaagtgtaaataccccagttggcaaggatcctggcctagctgggcggggggacccaaaggctatggcacaactgagagttccacaactgggacctcgggcaccaagtgccacaggaaagggtcctaaggaactggacaccagaagtttaaaggaagaaaattttatagcatctattgggcctgaagtaatcaaacctgtctttgaccttggtgagacagaggagaaaaagtcccagatcagcgcagacagtggtgtgagcctgacgtctagttcccagaggactgatcaagactctgtcatcggcgtgagtccagctgttatgatccgcagctcaagtcaggattctgaagttagcaccgtggtgagtaatagctctggagagacccttggagctgacagtgacttgagcagcaatgcaggtgatggaccaggtggcgagggcagtgttcacctggcaagctctcggggcactttgtctgatagtgaaattgagaccaactctgccacaagcaccatctttggtaaagcccacagcttgaagccaagcataaaggagaagctggcaggcagccccattcgtacttctgaagatgtgagccagcgagtctatctctatgagggactcctaggcaaagagcgttctactttatgggaccaaatgcaattctgggaagatgccttcttagatgctgtgatgttggagagagaagggatgggtatggaccagggtccccaggaaatgatcgacaggtacctgtcccttggagaacatgaccggaagcgcctggaagatgatgaagatcgcttgctggccacacttctgcacaacctcatctcctacatgctgctgatgaaggtaaataagaatgacatccgcaagaaggtgaggcgcctaatgggaaagtcgcacattgggcttgtgtacagccagcaaatcaatgaggtgcttgatcagctggcgaacctgaatggacgcgatctctctatctggtccagtggcagccggcacatgaagaagcagacatttgtggtacatgcagggacagatacaaacggagatatctttttcatggaggtgtgcgatgactgtgtggtgttgcgtagtaacatcggaacagtgtatgagcgctggtggtacgagaagctcatcaacatgacctactgtcccaagacgaaggtgttgtgcttgtggcgtagaaatggctctgagacccagctcaacaagttctatactaaaaagtgtcgggagctgtactactgtgtgaaggacagcatggagcgcgctgccgcccgacagcaaagcatcaaacccggacctgaattgggtggcgagttccctgtgcaggacctgaagactggtgagggtggcctgctgcaggtgaccctggaagggatcaacctcaaattcatgcacaatcaggttttcatagagctgaatcacattaaaaagtgcaatacagttcgaggcgtctttgtcctggaggaatttgttcctgaaattaaagaagtggtgagccacaagtacaagacaccaatggcccacgaaatctgctactccgtattatgtctcttctcgtacgtggctgcagttcatagcagtgaggaagatctcagaaccccgccccggcctgtctctagctgatggagaggggctacgcagctgccccagcccagggcacgcccctggccccttgctgttcccaagtgcacgatgctgctgtgactgaggagtggatgatgctcgtgtgtcctctgcaagccccctgctgtggcttggttggttaccggttatgtgtccctctgagtgtgtcttgagcgtgtccaccttctccctctccactcccagaagaccaaactgccttcccctcagggctcaagaatgtgtacagtctgtggggccggtgtgaacccactattttgtgtccttgagacatttgtgttgtggttccttgtccttgtccctggcgttataactgtccactgcaagagtctggctctcccttctctgtgacccggcatgactgggcgcctggagcagtttcactctgtgaggagtgagggaaccctggggctcaccctctcagaggaagggcacagagaggaagggaagaattggggggcagccggagtgagtggcagcctccctgcttccttctgcattcccaagccggcagctactgcccagggcccgcagtgttggctgctgcctgccacagcctctgtgactgcagtggagcggcgaattccctgtggcctgccacgccttcggcatcagaggatggagtggtcgaggctagtggagtcccagggaccgctggctgctctgcctgagcatcagggagggggcaggaaagaccaagctgggtttgcacatctgtctgcaggctgtctctccaggcacggggtgtcaggagggagagacagcctgggtatgggcaagaaatgactgtaaatatttcagccccacattatttatagaaaatgtacagttgtgtgaatgtgaaataaatgtcctcaactcccaaaaaaaaaaaaaaa

SEQ ID NO: 5984 - DNA, 4430 bp, Homo Sapiens
  NM_130759
agcttcctgatttctgaagtctgagtgatttcctccgtgtgccgagaggaaacagccttctgcactcacagccgaagggaaagcagcaggttggggcttcttgtggccaacttcagagcctgtcaccaggaaaggtaagcatgggaggaaggaagatggcgacagatgaagaaaatgtctatggtttagaagagaacgctcagtcccggcaggagtccacgcggaggctcatccttgttgggagaacaggggccgggaagagcgccactgggaacagcatcctgggccagagacggttcttctccaggctgggggccacgtctgtgaccagggcctgcaccacgggcagccgcaggtgggacaagtgccacgtggaagtcgtggacactccggacattttcagctcccaagtgtccaagacagatcctggctgtgaggagagaggtcactgctacctgctctcggcccccggaccccacgcgctgctcctggtgacccagttgggtcggttcaccgcccaggaccagcaggcggtgaggcaggtgagggacatgttcggggaggacgtcctaaaatggatggtcatcgtcttcaccaggaaggaggacctggccgggggctccctgcacgattacgtgagcaacacagagaaccgggccttgcgcgagctggtggccgagtgcgggggccgggtctgtgcctttgataaccgggccaccggccgggagcaggaagcccaggtggagcagctgctggggatggtcgagggcttggtgctggagcacaagggcgcccattactccaacgaggtgtatgagctggcgcaggtgctgcgctgggcaggccctgaggagcggctccggcgggtggcggagcgcgtggcagccagggtgcagaggaggccatggggcgcctggctgtcggcccggctgtggaagtggctgaagtcccccaggagctggaggctgggcctggccctgctgctggggggcgcgctcctgttctgggtgctgctccacaggcggtggtcggaggccgttgcggaggtcgggcctgactgacagcgcaggtcctaaaactgaaggcaacttggttaagggaggctgaattcttggagctgaagggaaaacttcattccaacggaaggaatcctgtagtttcaggcatagttttaatgacacagaaaactttgctgcatcacctttgcaactttgccaaagctcagagttcactttttaagtttttaactcattttaaatgatgtgtatgcagagttttaaaataaattcgtctaacaataacttcctttggtagttttggtagtctaatgtcaagtagcttgtagtggggacaaacgcatggcacagggaaaacaagtgccattattttcgagctttttaaaaaatttagactgcccctccttgataattttctagttcttatacatgggtagataggttcctttgtgatccttgtagacttttagcatcaataaaagaaatgtgggggttacacacgtgaatgttacttctgagacatcagtttatagtacaatgatttactaccaaaaagatgaatgtaactgtactgttacaaagtggaaaataacagtttccacttttctagaacatattatggttcatggcattccaaaatgaagtaagggccgggcgaggtggctcacgcctgtaatcccaacactttgggaggtcgaggcaggtggatcacctgaggtcaggagttcgagaccagcctgaccaacatggcgaaaccccatctctactaaaaatacaaaaattagccaggcgtgatagcactcgcctgtaatcccagccattcaggaggctgaggcgggagaatcacttgatgcagtgagccgagatcgtgccactgcactccaggctgggtgacaaagcaagaatctgtctcaaaaaaaaaaaaagaaaagaaaagaaaaagaaaaagagtaggatattgggaaaataacatataatatcttctatatggttattcatatttttatcacacacacacacacacacacacacacacacagtctgtatctcgagctcctctctggttatggagaagaggcagagcaccaggtgcataggctgagactgcagacacctgagcatcctatgctgtgaggcgaaagcatccggttttttcgggatgggcctgtccaggaaggttctcgaatgccacgtgattagaaaatttgccgctgactggttgtgcgaatcaaacaataggatttccttatttctatttctgagcataatgagaaccctttaagggaactcattgtctttaaatcagccagcctctagtgaggtcatggagacatgggaagcaggtattcacattagctctattcaagaggaagaggaggagggagtgtgcgcaggcgccctagggtcttccccagcacacgttgggaagaaggggtctgcaagcatgcgcacaattgccagctcaggctaaggactgcaggaggttccaggtgggttgcgggcttcgggcaggctatggtgaggggtcctgagggccttggtgaccgctgcagggagttggactttttgaagcgtggctcaagaaaaacccatgtttaattcctgcctttcgcttcctcagcagcctttctgggcccaggcaggggcctcgagccagggaaggatcctttgatgaccagaggggacagcagggagggcacagcgtggtcgtccacggtcacttgcgcacgagccagtgctgctgctggtgttagacaacaacttttatcaaagtggtttaatgtacagcagcaacaaagctgctttgtggagcagggctcccaataggcagtgtgcccagagtagcagctcggaagcagtactgcaatcacatttatacccactttcaactatatgcaaatttaggggtggattatgccaaaatttctagaaaaaaggtcgtaacttccaggtcgtgggattgttgctatggaaaggagccaaaacttccagctgttgccttagcaatggtaacctgacgtggcactggtgagtgtgttttatggagagactctttcacctcttccctttcagcttgtcttcagtgtggtctggagcccaatccccacctccagagtctagtcctgcctcctacctcagtaataaaaagtagtagtatatggttaattgtcaaatacatttgcaaagtgtaatcaaagatacattaccaatctgaatctcaaaatgtgctatcatctttgaatttgaataatgtattattaaagaagttacagttttcctttacattcaataacatttctttagtggttttctttttcagatactttgattatgatcttttttttttcatctttgtatccccgttatacaacccagtgcctggcatagaaagtgggatcaacaaatgtttggaaaatgaattgtaaagttgactttcctgtacctttttaatattagatttctagctaccagacttttgaccattttctaaattttctaccatagataacagaaaattctttcgcgcaagcatgtcattgtattaatgatattctcctgccctaaggaaatttacttcccttcaagcacagggtcccccaaattactgtatttccacccctttcagcttattttatccttttctcctgctacagaacagttggcattcaccattcccttcggtaaagtctttttttaggctgtggcttaaaggttgctttttcccccatagctcaaggttaggccttgtgacctcacttatgtaatttgagtgatttgatagcacaaatcaattttatacttaaattacagcataaaacagcactgcctcctgttggaaaaacttgcttgctaattttaaccagacacagtaaaaatactgtccaatacctcaaaaattgtgtaaatatatatccatttcaattgtcccccttcctctcctctccttttatctcttggaagataaaaatgtatgggtcctgtgctgataatgtttctgttcatatttctatgccctggtacctggatcagcttttgttctacacaaaaagacttgtatctggcttatttctgaaagctagtgttggccatgatgaacttttagagcaaaagatttcaggcagagtacattcttacatattcttacacaatcaatattcagttccagcccgcacagtagccctagcaaatgccagtgctccttccagagattcacctatggattcagtaccccagaagagaatttctgtaaattcttggggaagctatagctagactatggctcaacactcatttttcccccatgattcttaatctaacagtggcaatgttggcctcttcttaggcaactagattcggttcttgcttattctgccaataaaatactttattgagatgcttaaaaaaaaaaaaaaa

SEQ ID NO: 5985 - DNA, 1432 bp, Homo Sapiens
  NM_130771
atttcctgggaggggagagggtgcgaccaagccctggctccagctctagcgggtatctgcccaccatggccctggtgctgatcctccagctgctgaccctctggcctctgtgtcacacagacatcactccgtctgtggccattatagtccccccagcttcataccaccctaagccatggctgggagctcagccggctacagttgtgacccctggggtcaacgtgaccttgagatgccgggcaccccaacccgcttggagatttggacttttcaagcctggagagatcgctccccttctcttccgggatgtgtcctccgagctggcagaattctttctggaggaggtgactccagcccaagggggaatttaccgctgctgctaccgaaggccagactgggggccgggtgtctggtcccagcccagcgatgtcctggagctgctggtgacagaggagctgccgcggccgtcgctggtggcgctgcccgggccggtggtgggtcctggcgccaacgtgagcctgcgctgcgcgggccgcctgcggaacatgagcttcgtgctgtaccgcgagggcgtggcggccccgctgcagtaccgccactccgcgcagccctgggccgacttcacgctgctgggcgcccgcgcccccggcacctacagctgctactatcacacgccctccgcgccctacgtgctgtcgcagcgcagcgaggtgctggtcatcagctgggaagactctggctcctccgactacacccgggggaacctagtccgcctggggctggccgggctggtcctcatctccctgggcgcgctggtcacttttgactggcgcagtcagaaccgcgctcctgctggtatccgcccctgagccccaggagcactgcagcccgagacttccaacctgagtggcggagaagctgggaccctgggctggactgtcctttcctgcagccccacagtcctgctggctgagctccgcggaacggtccttagaccccgctgtgccctgtgctgtagcttctttccaggcctttcccaaggagtagctgaaaggaagacgcgattagtggttaagacttccaagccagaagacagagggttcgaatcccagcactgccgtctactcactgtagtagtagcagctacagaaaggtagtagtgagacgtgaagccagctggacttcctgggttgaatggggacctggagaacttttctgtcttacaagaggattgtaaaatggaccaatcagcactctgtaagatggaccaatcagcgctctgtaaaatggaccaatcagcaggacatgggcggggacaataagggaataaaagctggcgagcgcggcaccccaccagagtctgcttccacgctgtgggagctttgttctcttgctctacacaataaatcttgctgctgctaaaaaaaaaaaa

SEQ ID NO: 5986 - DNA, 1164 bp, Homo Sapiens
  NM_130772
gagtctggaccacgcagactcagaacagcactactcacagcagggcctcttgctcgctctagctgctgggaggaaaacggcttgctaatctccacgcccagaaattcagacaagagcattctccttatctcatctgcacaggaagcaggtctaagtgtaatttcacaagcccctgactctgtgtagacacccagctctccagaaaaatgctttgaagacaaaggatacagcatacagtcccgtgtctcggctgagtcatcgcattccttaatagtgtcttctccccgggtttggtggcctgcttctggagtggtcagttctgctgccgacatgcccacccagctcgagatggccatggacaccatgattagaatcttccaccgctattctggcaaggaaaggaagagattcaagctcagcaagggggaactgaaactgctcctgcagcgagagctcacggaattcctctcgtgccaaaaggaaacccagttggttgataagatagtgcaggacctggatgccaataaggacaacgaagtggattttaatgaattcgtggtcatggtggcagctctgacagttgcttgtaatgattactttgtagaacaattgaagaagaaaggaaaataaaggaagttcgtgaatgctaatcaagggctaaataaagtggaaagcagcatccttgaaaatcatcgctctcaggacggggtctgcctggaatagcactgaatgtgtttagtagtgcctttggcttgggggctttggagaaagctgcttgagcccttcccatgctcataaattaggtaaggagcagtgaggaagtgtctacagcaacctcagccaatgtgatgtgcctctacagctgtatgaagtagattctctgattttatcttgaaatccacaacttccacaaaaaagaaaaatcttttaccatttctcattaaaaaagtaatataagtttattgtagggggaaataatcaaatgtaatctcattacccagatataatcactgttaacttcttcattcgaattttccctaggtccatgtatctatatatctatggttcataaaaatgagattacaccaaaaaatatcttttgttatctatatagttccagcttaataaatatacaactgtattattaaaaaaaaaaaaaaaaaa

SEQ ID NO: 5987 - DNA, 2158 bp, Homo Sapiens
  NM_130782
agttctgcatttctgcagagacagaaagaaacgcagctcttgacttcttttttgtaaacattactgtaagagttgtgataactttttattctactatgtatatgtatggaatagtattaataaatgaactagggaaggatgtaataaattagacatctcttcattttagagagaagatggaaacaacattgcttttcttttctcaaataaatatgtgtgaatcaaaagaaaaaacttttttcaagttaatacatggttcaggaaaagaagaaacaagcaaagaagccaaaatcagagctaaggaaaaaagaaatagactaagtcttcttgtgcagaaacctgagtttcatgaagacacccgctccagtagatctgggcacttggccaaagaaacaagagtctcccctgaagaggcagtgaaatggggtgaatcatttgacaaactgctttcccatagagatggactagaggcttttaccagatttcttaaaactgaattcagtgaagaaaatattgaattttggatagcctgtgaagatttcaagaaaagcaagggacctcaacaaattcaccttaaagcaaaagcaatatatgagaaatttatacagactgatgccccaaaagaggttaaccttgattttcacacaaaagaagtcattacaaacagcatcactcaacctaccctccacagttttgatgctgcacaaagcagagtgtatcagctcatggaacaagacagttatacacgttttctgaaatctgacatctatttagacttgatggaaggaagacctcagagaccaacaaatcttaggagacgatcacgctcatttacctgcaatgaattccaagatgtacaatcagatgttgccatttggttataaagaaaattgattttgctcatttttatgacaaacttatacatctgcttctaacatatcgcatgtttatgttaagatttggtcccatcctttaaactgaaatatgtcatgtgaaattattttaaaaatgtaaaaacaaaactttctgctaacaaaatacatacagtatctgccagtatattctgtaaaaccttctatttgatgtcattccatttataatcagaaaaaaaacttatttcttaatcaaaaggcagtacaaaaaaagtaataatgttttataagattgtagagttaagtaaaagttaagcttttgcaaagttgtcaaaagttcaaacaaaagtctagttgggattttttaccaaagcagcataatatgtgttatataaacataataatactcagatatccaaatgttcagatagcatttttcataatgaatgttctcttttttttggtaatagtgtagaagtgatctggttcttacaatgggagatgaagaacatttattattgggttactactaaccctgtcccaagaatagtaatatcacctctagttataagccagcaacaggaacttttgtgaagacacattcatctctacagaacttcagattaaatataatctagattaatgactgagaataagatccacatttgaactcattcctaagtgaacatggacgtacccagttatacaaagtacttctgttggtcacagaaacatgaccagattttgcatatctccaggtagggaactaagtagactaccttatcaccggctaagaaaacttgctactaaactattaggccatcaatggcttgaataaaaaccagagaaggtttttcccaggacgtctcatgtttggccctttagaattggggtagaaatcagaaatgagatgaggggaagaagcaaggagtctaaggccctagcgatttgggcatctgccacattggttcatattcagaaagtgttatctcattgattatattcttgttaagcaaatctccttaagtaattattattcaaataagattatactcatacatctatatgtcactgttttaaagagatatttaatttttaatgtgtgttacatggtctgtaaatatttgtatttaaaaatgccatgcattaggctttggaaatttaatgttagttgaaatgtaaaatgtgaaaactttagatcatttgtagtaataaatatttttaacttcattcatacagttaagtttatctgacaataaaagctctgactgaaaaaaaaaaaaaaa

SEQ ID NO: 5988 - DNA, 4242 bp, Homo Sapiens
  NM_130783
agtgtatccagaagctactgtcaggaggacactgtaagagaaccttggcacctctgggcccaaagggaaagacaccagtggaaagaggtgagcatctcctggaccaccctcaagcttcaggtgagctgagcttctaacactaccatcaaagcaactggaaccccttgaatttgatttctggagacgcgagcataatccttttgcagacatctcaacgctggctctccaggtggagcaccatggaaggcgactgtctgagctgcatgaagtatctgatgtttgtattcaatttcttcatatttctgggcggggcctgcctgctggccatcggcatctgggtcatggtggaccccaccggcttccgggagatcgtggctgccaatcctctgctcctcacgggcgcctacatcctcctggccatggggggcctgctctttctgctcggcttcctgggctgctgcggggccgtccgtgagaacaagtgtctgctgctatttttcttcctgttcatcctgatcatcttcctggcagagctctcagcagccatcctggccttcatcttcagggaaaatctcacccgagaattcttcaccaaggagctcaccaagcactaccagggcaataacgacacagacgtcttctctgccacctggaactcggtcatgatcacatttggttgctgcggggtcaacgggcctgaagactttaagtttgcatctgtgtttcgactcctgaccctggatagtgaagaggtgccggaggcctgctgccggagggaaccccaaagtcgggacggggtcctgctgagccgggaggagtgcctcctgggaaggagcctattcctaaacaagcagggctgttacacggtgatcctcaacaccttcgagacctacgtctacttggccggagcccttgccatcggggtactggccatcgagcttttcgccatgatctttgccatgtgcctcttccggggcatccagtagagggtatggcctgaagcctgaagactcgccccacccaccactgcccagcacccaatgtcctcccgtgcccctccccgctgtcctcttggccccaggggagaagatgaggccatcagagatggccaggagaagggccaggggaatagagctatttttttaacaaaacaaaatgaagacaaaaatatggactgatgtatcctcgcctggactcagggcaggtgccgtgggttctccagagaccccagcaactggcccaggatgcaggctgctctagagaccaaaggaacaccaggcccagcgccctctttggtccagccagaccctgggccctctctcctcactgcaccaggacctgatgccaagaaagtgaggatttaggcaacaaggaggcaaaagcaaatctcagagaagtcatcaaagcccaggggctgcacggagattcagctgccatgtctttgaggactcggaacccacagcgcaatccctggtccactggaggatggactgttccccccttcaggccggggccaagagtgagctgctaacacggcatccaagaatggcccagctggtaggatccttgctttccccatctgttggaccaaataatctcaaaggcccagagaggacagtgaccatccacagacacacagcacaggcgtgacagttctgaaaagaagctgagttgtctccaggctgctgtcactgcatccaggactctgtcagctctgctgcccacatgcacccctggcctcagcatcccggttcccccagacaagagagggcaagtcagccaggaactgcctcctccctgctctacagctaagaaaacaccattccatgacttcccaccgcgccctcgctcctacctccccacacctctctctgagtccccaggaacacacagaggtgcacatcacattcccttgtccacactgcccgcctctcccacatgccacccccttccctgtccttccccaactccccagctccaagagtggaagaaatccccaagatcatctgggtctccctctccacacccagaactgaggcttggatatcttcttcaacatccttgccaagacttctccaccctcttgcatacctccagggacagagagcttactacctcccaaggcagcctcctgcctttggactgctctgactttagcatcagcttaatacacagaagaggtttctgtttttctgtggctctgtccatggcatcccacttgcccactctccttcctggagtgttgaggtcacacattgactcccctgagccctcttctctccaggctaaagaatcccgaaggcatcgaggccatttctgctgcaacaaggtttcctgtctcttcactgtccgcacatttcttagtattccctccaggcttgggcagggagactcgcagatgcacacccacaagtattcagttctcaaactctagacgagtgttggcaactggattgcaagatgctcctaccctgatagatcaggggtggctgctggaggctgtgctggggatctgaggtttggtctgggctcagtgggagacggcagtgcaatcctgatgagtgatgtctgccaggcaccgtaagtttgattagtgatgtctgccacgggcagggatggaaggagcagtgtgatgtctgctctcttctctcccctctgtccctcttcaggaagaaagagctcattctgtctcacaagccaccggcatcctgtatcagcttccagcctcccctcaggctttccagtcaccagggacactcggagccacagcctagagccccgtgttccctggcctgtgcgtctgcccccttctgagatgcagccagaagctctgtgcctgctgcaaagattcaggtggaccctcctctaatctcctcctgctgtgcccgccagtccttgccctcccaccaggtctctgagctcagtgttaccaaattcgccctttaacagcttgctctggcaaccccataaatgacacctgaggtccgtagaagctaagctcctgagacccagggggacctgccactggtaccgcggcccagcctggggcctgggggctgcccctcttgaaccacccacatgcttagccccagctttttggaagaggcaaatggctggtctgaggatgacacacaaaaacaaaaacaaaaaacaaaaaacccatgctgggcaggactgaggcaaattgcacagctttatggctctaatccaggggcatcccaggcttctggggcccacagaagtcagagggaggacccaagagaaagggctggtcatgaagggaaatctggctaaggtgggttcaagggcagacacaagactgcccctcagcagctttctacaaatgtgccaaggaaccctcaatcagccctgattcagctcgccagccagccactggccaccctcttaggctggaaagggaagacaggcagtttctgctcctgttggcattcgctcaggctggtagctatttgcaagactgcctgaggccattccttggaggcaaggcaaagaaagctcagcccaaatcaggcttgagcctccctccagagcacagggagaaacagggtttagctggcttggtccagatacaacccacagcaggttctggtggtggctggggttgtgggggaggggtgggcagggatacctctttgtttcttttcaccccgaaatacaacagcccataacagagacttcctcggaccccactaacagggcaaggaacaagaagactacaccgctcatcacaaaccctgcctgtatcgaaagccactttcctgctctgaagctactgcctcttagagaaagggaatagctctttatgggctgggggtgagggcccctccccagggtccctgttaatttctggccttggtgctcaggcctgtccacagcctcccttgtctatgtctctatccatgcttaaggggcccggacaggatttcccaaaccagccgaggccccagcacccgccgtctccccagaagccccctcctccttcccccatgggtcatatgttgaaagtctattttaaaaactatgttccttgccgtagattgcagagctaatttatcacgtttctctcctgtgagaccccccttttatatgatatatccagaggaagttttgtaatataaaacaggacgcccacactgatggttttgcactggtttttgtgaatgtttcttacaaaaagaaaaaggaacaaagaataaatagtgaccgtgaagaaaaaaaaaa

SEQ ID NO: 5989 - DNA, 2770 bp, Homo Sapiens
  NM_130799
ggtgtccggagccgcggacctagagatcccagaagccacagcgcagcggcccggcccgccactatttccaggctcagcggggcaggggccgccgcccaccgcccgccgccatggggctgaaggccgcccagaagacgctgttcccgctgcgctccatcgacgacgtggtgcgcctgtttgctgccgagctgggccgagaggagccggacctggtgctcctttccttggtgctgggcttcgtggagcattttctggctgtcaaccgcgtcatccctaccaacgttcccgagctcaccttccagcccagccccgcccccgacccgcctggcggcctcacctactttcccgtggccgacctgtctatcatcgccgccctctatgcccgcttcaccgcccagatccgaggcgccgtcgacctgtccctctatcctcgagaagggggtgtctccagccgtgagctggtgaagaaggtctccgatgtcatatggaacagcctcagccgctcctacttcaaggatcgggcccacatccagtccctcttcagcttcatcacaggcaccaaattggacagctccggtgtggcctttgctgtggttggggcctgccaggccctgggtctccgggatgtccacctcgccctgtctgaggatcatgcctgggtagtgtttgggcccaatggggagcagacagctgaggtcacctggcacggcaagggcaacgaggaccgcaggggccagacagtcaatgccggtgtggctgagcggagctggctgtacctgaaaggatcatacatgcgctgtgaccgcaagatggaggtggcgttcatggtgtgtgccatcaacccttccattgacctgcacaccgactcgctggagcttctgcagctgcagcagaagctgctctggctgctctatgacctgggacatctggaaaggtaccccatggccttagggaacctggcagatctagaggagctggagcccacccctggccggccagacccactcaccctctaccacaagggcattgcctcagccaagacctactatcgggatgaacacatctacccctacatgtacctggctggctaccactgtcgcaaccgcaatgtgcgggaagccctgcaggcctgggcggacacggccactgtcatccaggactacaactactgccgggaagacgaggagatctacaaggagttctttgaagtagccaatgatgtcatccccaacctgctgaaggaggcagccagcttgctggaggcgggcgaggagcggccgggggagcaaagccagggcacccagagccaaggttccgccctccaggaccctgagtgcttcgcccacctgctgcgattctacgacggcatctgcaaatgggaggagggcagtcccacgcctgtgctgcacgtgggctgggccacctttcttgtgcagtccctaggccgttttgagggacaggtgcggcagaaggtgcgcatagtgagccgagaggccgaggcggccgaggccgaggagccgtggggcgaggaagcccgggaaggccggcggcggggcccacggcgggagtccaagccagaggagcccccgccgcccaagaagccagcactggacaagggcctgggcaccggccagggtgcagtgtcaggacccccccggaagcctcctgggactgtcgctggcacagcccgaggccctgaaggtggcagcacggctcaggtgccagcacccgcagcatcaccaccgccggagggtccagtgctcactttccagagtgagaagatgaagggcatgaaggagctgctggtggccaccaagatcaactcgagcgccatcaagctgcaactcacggcacagtcgcaagtgcagatgaagaagcagaaagtgtccacccctagtgactacactctgtctttcctcaagcggcagcgcaaaggcctctgaactactggggacttcggaccgcttgtggggacccaggctccgcccttagtcccccaactctgagcccatgttctgcccccagcccaaaggggacaggcctcacctctacccaaaccctaggttcccggtcccgagtacagtctgtatcaaacccacgattttctccagctcagaacccagggctctgccccagtcgttagaatataggtctcttctcccagaatcccagccggccaatggaaacctcacgctgggtcctaattaccagtctttaaaggcccagcccctagaaacccaagctcctcctcggaaccgctcacctagagccagaccaacgttactcagggctcctcccagcttgtaggagctgaggtttcacccttaacccaaggagcacaggtcccacctccagcccgggagcctaggaccactcagcccctaggagtatatttccgcacttcagaattccatatcttgcgaatccaagctccctgccccaaataacttcagtcctgctccagaatttggaaatcctagtttcctctccttcgtatcccgagtctgggacacaaaactccgcccccagcctatgagcatcctgagccccgccctcttcctgacgaaactggccccggatcagagcaggacctcccttccgaccctctgggaacctcccagaggtccagcccatctcggagcatcccggaggaaatctgcagagggttaggagtgggtgacaagagcctgatctcttcctgttttgtacatagatttatttttcagttccaagaaagatgaatacattttgttaaaaaaaataaaaaaaa

SEQ ID NO: 5990 - DNA, 2736 bp, Homo Sapiens
  NM_130801
gctccgggcggcgtgcgccgcggtgcctagtgtgggatgccgccgcccaccgcccgccgccatggggctgaaggccgcccagaagacgctgttcccgctgcgctccatcgacgacgtggtgcgcctgtttgctgccgagctgggccgagaggagccggacctggtgctcctttccttggtgctgggcttcgtggagcattttctggctgtcaaccgcgtcatccctaccaacgttcccgagctcaccttccagcccagccccgcccccgacccgcctggcggcctcacctactttcccgtggccgacctgtctatcatcgccgccctctatgcccgcttcaccgcccagatccgaggcgccgtcgacctgtccctctatcctcgagaagggggtgtctccagccgtgagctggtgaagaaggtctccgatgtcatatggaacagcctcagccgctcctacttcaaggatcgggcccacatccagtccctcttcagcttcatcacaggttggagcccagtaggcaccaaattggacagctccggtgtggcctttgctgtggttggggcctgccaggccctgggtctccgggatgtccacctcgccctgtctgaggatcatgcctgggtagtgtttgggcccaatggggagcagacagctgaggtcacctggcacggcaagggcaacgaggaccgcaggggccagacagtcaatgccggtgtggctgagcggagctggctgtacctgaaaggatcatacatgcgctgtgaccgcaagatggaggtggcgttcatggtgtgtgccatcaacccttccattgacctgcacaccgactcgctggagcttctgcagctgcagcagaagctgctctggctgctctatgacctgggacatctggaaaggtaccccatggccttagggaacctggcagatctagaggagctggagcccacccctggccggccagacccactcaccctctaccacaagggcattgcctcagccaagacctactatcgggatgaacacatctacccctacatgtacctggctggctaccactgtcgcaaccgcaatgtgcgggaagccctgcaggcctgggcggacacggccactgtcatccaggactacaactactgccgggaagacgaggagatctacaaggagttctttgaagtagccaatgatgtcatccccaacctgctgaaggaggcagccagcttgctggaggcgggcgaggagcggccgggggagcaaagccagggcacccagagccaaggttccgccctccaggaccctgagtgcttcgcccacctgctgcgattctacgacggcatctgcaaatgggaggagggcagtcccacgcctgtgctgcacgtgggctgggccacctttcttgtgcagtccctaggccgttttgagggacaggtgcggcagaaggtgcgcatagtgagccgagaggccgaggcggccgaggccgaggagccgtggggcgaggaagcccgggaaggccggcggcggggcccacggcgggagtccaagccagaggagcccccgccgcccaagaagccagcactggacaagggcctgggcaccggccagggtgcagtgtcaggacccccccggaagcctcctgggactgtcgctggcacagcccgaggccctgaaggtggcagcacggctcaggtgccagcacccgcagcatcaccaccgccggagggtccagtgctcactttccagagtgagaagatgaagggcatgaaggagctgctggtggccaccaagatcaactcgagcgccatcaagctgcaactcacggcacagtcgcaagtgcagatgaagaagcagaaagtgtccacccctagtgactacactctgtctttcctcaagcggcagcgcaaaggcctctgaactactggggacttcggaccgcttgtggggacccaggctccgcccttagtcccccaactctgagcccatgttctgcccccagcccaaaggggacaggcctcacctctacccaaaccctaggttcccggtcccgagtacagtctgtatcaaacccacgattttctccagctcagaacccagggctctgccccagtcgttagaatataggtctcttctcccagaatcccagccggccaatggaaacctcacgctgggtcctaattaccagtctttaaaggcccagcccctagaaacccaagctcctcctcggaaccgctcacctagagccagaccaacgttactcagggctcctcccagcttgtaggagctgaggtttcacccttaacccaaggagcacaggtcccacctccagcccgggagcctaggaccactcagcccctaggagtatatttccgcacttcagaattccatatcttgcgaatccaagctccctgccccaaataacttcagtcctgctccagaatttggaaatcctagtttcctctccttcgtatcccgagtctgggacacaaaactccgcccccagcctatgagcatcctgagccccgccctcttcctgacgaaactggccccggatcagagcaggacctcccttccgaccctctgggaacctcccagaggtccagcccatctcggagcatcccggaggaaatctgcagagggttaggagtgggtgacaagagcctgatctcttcctgttttgtacatagatttatttttcagttccaagaaagatgaatacattttgttaaaaaaaataaaaaaaa

SEQ ID NO: 5991 - DNA, 4700 bp, Homo Sapiens
  NM_130809
aggagcatgcgccgcccgtggccatcttgtaggcggggacacgccgaggtaacttccagggtgcgccttcgttgtcttctccaagctgtagttctacgtcccgacctccctatcataccacactcttcagcgaccacgcaggcactttcccggtccccagtataccataattgaagaaaaatgatggaagagagtggaatagagacaacaccacctgggactcctccaccaaatcctgcagggctggctgctactgctatgtcttctacccctgttccattagcggcaaccagttctttttcttctccaaatgtatcctccatggagtccttcccaccactcgcatactctactcctcagccgccccttcctcctgtgaggccttcagcaccattaccttttgtgcctcctcctgcagttccttctgtcccaccacttgttacttctatgccacctcctgtttctccatcaactgctgctgccttcggtaatcctcctgtatctcacttcccaccttcaacttctgccccaaacactcttttacctgcacccccttcgggtcctcctatatcaggattttctgttggttcaacttatgacattacaaggggacatgctgggagagctccccagacacccctgatgccatcattttctgcaccttcaggaacaggtcttttgccaactcctattactcagcaagccagtttgacatctctggcacagggaactggaaccacatcagccattactttcccagaggagcaagaagaccctagaattactagaggtcaggatgaagcatctgctggtggaatctggggttttattaagggtgtggctgggaatcctatggtgaagtctgtgcttgataagacaaaacattcagtagaaagcatgattacaacgctggaccctggcatggctccctatatcaaatctggaggtgaactggatattgtagtgacctcaaataaagaagtaaaagttgctgctgtccgagatgccttccaggaggtctttggcttagctgtggttgtaggggaagctggacagtccaatattgccccacaaccagtgggctatgcagctggattaaaaggtgctcaggaacggatagatagcttgcgtcgaactggggtgatccatgaaaaacagacagctgtgtcagtagaaaacttcattgcagaattgctgcctgacaaatggtttgacattggttgtttggtggttgaagatcctgtccatggcattcatctagaaacatttacacaagccacaccagtgcctttggaatttgtacagcaggctcaaagtctaactccccaggactataatctgaggtggtcaggccttttggtgacagtgggtgaagtcctggaaaagagtttactgaatgtcagccggactgattggcacatggcatttactgggatgtcccgtcggcagatgatctacagtgcagccagagcgatagcgggcatgtataaacagcgcctgccacccaggacagtgtgagaggagacctacctgggagactgagactttcccccacttttagcttgatgttaaagaagtggttgtaccttcctaaatcgaatagtctaaatgaatccagtagtttttatcattttcctgtagcctgcaatttttctttctctagaaaggcatcatgtcattccaggagacaaaaagaaacaaatcctttttatagtcataccatttcacctatcatagtactcaaaaaagaaaatatacaaatctatttacagcacaatttaatataccagatttataaggtggaaattcatgtgcagagacatttaacttaatgccatgtacttgattattttgttctttaaagaagacattattaaagaacatgttggttgaatgtttataaaagcatgatttgctttggcttcatctcttttctgtcagtctttgactacttttgtatgtgcacacgatctcagggctggtgctgagcagcctgctcaacagtcactataagacacctacttgtcgggagatgttccacatttctgtgcatgttttcagtaatatgggccaaaataatggaattgattattttcctttttggccatcacgtacacatgtaatctggaaaatcatacctttgtcaattttaaacataacttttggcatttcccagatttatactatgaacattggggtaatacattttattttttcattgctatatgacagctaaggggcaaatgattcaagtatattttaaatcagaagtattcaaattatttttgtataatactgttcagtacttccaagaataagctctgacaacagccattgtttctgcttccactcatattctctacacattttaatacagaaatttttgagagggggttactttattgcttgtgggttagtatgtctcttacttcaattaaggttacttatttggtttgccttaagcattacttttttaactttgtgccatttggtctttactttttatggatgttttcaaagaaactattttatattcaatctagtttatttagtctactgtatttctatttcgtggaagccttttcccctcaaataatatattatatcatttttggacttatataaatgataattaaataaatttttttcttaatactgttggactttgtatatacaagttcaaataactttttcgaagatagtttcttatataaatgtaatttaatttttttactcttctatacagttctttagatgtaaaagaattagcacaatctctggcagttttataaaagctgttgaagctcttgtcctgcactgtctttaggtatcataggtatcaggtttgctttgtgttaatgccacttcaagtcattatttggtttctgctatttttttacctgaggataagaagaatgaatattaaatttgaatattaaatatatgttactttccaagcactgtataatgactgttcagtgaatatcagacttccgtgtcattaaaagtcatgagagacagcacagagaggttataggttgccttggtgtacttttgtccaggagtaacagggacagaatactttctttctttccttcaagtacaagaaggctttctctaccatttgcgtctacactttattttaaaagctatccttttctagtagtattttatcatggcaatggcatgatgacaacaacagtctttcattacagactgaagggaagcatgtccttacttaaaatagttctgctactttccctcctattataaggaaatcttacagattctaaaaataccttaatttttctttgatttttattttaccaagtcacaaatgtctttttgatgttttgagaattgttctcatagaatcacaaatactgacatttcattagatgattattttcctagaatccccaaagagcagtggcagtccatggcttggttgaagctagaaattttcctgcccctggtgacctggtaagcctcctgctcggaaccgtgtgagtgggtgaggaagatgagagatggtcagatggaagagagaaatacatgaactgctctggcctctctggttctgttcttggcccagagtttttgaaaagcagcggagcatgactgacttcacatgctcagctttctcagccttttgtttattttgttgtccttagatttccctgttgtaaaaggggcaagaaaagtaactcatcatctctaacacaccatggcagcttagccaggtagtcttagtggtggtgtttaggcataagatatgctgatcatcagtctcaggccacagtttccttcactaatcgtccagcttgagtgttctgttctcttcctgcccatttccttgaacctcctgctctagccttggcggagggagagtgctatttgcttttgttctccctctgtcttaggaaaagccatctttaatatagttcttcaccactgttggggttgttttgtgattttttttttcttccgaagaactcctggttgttattggattttgtattttaatacaaattattgaattttataagcttgtacacaatatttaattagtgtgaaaggaaacaaagaatgcaggaaaaataatttaatatcaacctcagttgacaaggtgctcagattattcaattcgggatcctccttttgttaggtttttgagacaaccctagacctaaactgtgtcacagacttctgaatgtttaggcagtgctagtaatttcctcgtaatgattctgttattactttcctattctttattcctctttcttctgaagattaatgaagttgaaaattgaggtggataaatacaaaaaggtagtgtgatagtataagtatctaagtgcagatgaaagtgtgttatatacatccattcaaaattatgcaagttagtaattactcagggttaactaaattactttaatatgctgttgaatctactctgttccttggctagaaaaaattataaacaggactttgtagtttgggaagccaaattgataatattctatgttctaaaagttgggctatacataaattattaagaaatatggatttttattcccaggatatggtgttcattttatgatattacgcaggatgatgtattgagtaaaatcagttttgtaaatatgtaaatatgtcataaataaacaatgctttgacttatttccaaaaaaaaaaaa

SEQ ID NO: 5992 - DNA, 3144 bp, Homo Sapiens
  NM_130848
cagaacccaagggcttacctgtgctctgtgattccccaactagggatttagttgtagccacggacctggtaggcaacagggaggggattttaatctgctccttgcatcagaaggtccaataggcagggttagtataatgggagatgccctggtagggctggcaaggagaagaagccacatgtattttggtctgatgaaaagcagcagtgatctgtcactgaccaaaatggtcccccaactatgcattacggagcagcaacccacatacagaactcgagaagccacggcctggagactgtacctggacaccaaagactggagagaggagctggtggggaaaccccagagttcccagggtgccactccccagctccaccagagaactttgggaatgagctgctgcccctgagtgcccctctccagggcctcagtgagggtctctaccctccagggaggaacaaaaccttgccagctggggtcctgcgagagggggcagttcaattcctccacaggggactctgcaactccaatctttcgagtgaagcatctgcgaggccctcagggacccaggatgaactgcatagcagcagaaggaagacaggccagaccaggcgggagggagcccggaaacatctggtttgtagtttcagactctacccgttcacagttcacacagtctcaccgggaaactcacaccttgccctgtaccaagtttttaaggcagttaagctctgcccatccgagacttcatttttcttgagtagaaaatcactgaaatcatcagatccatggcacccaccttcactttctcctaacagctggaaccgtcaggctggcttcagggcctggtcttcgcacttgatatcactatccctcacctgctcagacagccagagcaggcgggtgagttcctcccaacaacctccactgcattctctcagctcccaccgcagggcagcccacgtgcctgagtgaacatgtgtgcgtgtgcacacacgcaagtatgcacagacatacactaaacacgaacatacagtgcacatgaacgctgctcccagctagggccctctggtcagactgctgcctgggttagaattcttgtccccacccccacttactatagttctgtgatcctggacaagtaactgaatctctccgtgccacagtttcttcttgtagaaaacgggaaagttcacagtacttacctccttagagtcattgtgaaggtcagtttgaggcatcacaaatttaaggcacccagacataagggtcaacagggttagctatcactgtccagtttggtgggaggaactgaatgcatgtaggcacatggacccagtctacactcaggcacaaaaggagctacattagttacattcaggcataccccagagcactacaattctctgagacattgtctggaaatctagaaatcatctccttgccctttaaggtattttaaccctcgcattcctctgcttttccaagaatgtgaatcttgccaagctgtccgtgagagacacgggctcccctcgagggagacttgcaaatgctccataaacagccacagtgtggggctctgccatgaggaagtcacagcagacacgctagacagcatagtcctggatgcaacctggaggaagggaggcccatggtggagcactcactccgtgcctgtctgcccggtgagacctcaagttccttgcagacaaaggccatgggttgttggctcttgtgttcccggtggcctttccagagctgaacagaggacagatgcacagacgggggggctctggtggtcaaggcagcagtccccttggatactaaagtctgagccaggcccctcaggcccggcatgggcagtgcgaggcccatagtggtgggaagccagttggccagctggggtgagaaggccgcgaagccatgggcagacaggaagtggaggtgaatgtctctgcctcctgtaggcctcagcagggacagcacagaccctctggctggggcagcgcagaccctctagctggggcagaacaaggctggtgcttccttctagtccttgagactttgtagctctaactcaagcagaaccctggggttttgggattctgtgtggtgactgctgaggaaggtttatggatttgacagggtgcatgtcacagagagacagttctcagtcagcacttcctgtcccctgcagaggctcataggggacagcccctgccaaggagaccctggaggggctctgaggatagcaatcagaggttgggctggctggactgagcccaggcctgttgcccaccaagtctccataggttctagtctgacccctctctccacccctgggctatgcaggccagcccgtgcagaccacccccgacgcgtccacttgcaacacccgcctcactgtgccaacactccatccacacaggaaaggactgagaacgtgatgcttaacccaaaggagtgagtttcataggatgggtggctttaacagtttcacagcaggacactgagggaatatttccctatcccttcaaatggacggtcactacagaaacgtgtagagcaagactttgtcaaggggctgtttccaggtctcccggtgtctaaatagcagagctggaatgggaactgagaaccgattctttccacaaccgcccactgagcagcaaggctgcagccagcaaagaggtgcggaggcaagcaagctccatgtggtggggacagcgcattgcgacctccaccacccctgcagtgggctgccagctgagccacctgtcttccactgtatctactgtacgaacttctccagctctgctctgttttctcttcctcagcatccaccccgtgacacgtagtggtggctgatgtcgccacagtaccatgaggttaacaggtcctccctccagcttccctcatggtggcagcctaacctgcattgcagccgttcaccggacaccgcaccagaccctcaaaacccatccaagactgtgggaggagtaaacaacccagcccagttaagaggagatgccgaatttaatgaaccctatttgaattgcagggctgtgattcctcttacctttaacgtgaactcacaggcggattaaagtgaaataaaacctaccatttgagttaaaaaaaaaa

SEQ ID NO: 5993 - DNA, 506 bp, Homo Sapiens
  NM_130897
cagccctgacgcttccttggggccacttccttctttttttcctagcaacggcgggtagcgtttttgacatcccgggaggctgtgccgccggcctgagcccagagtttcgcggcctccgcgatggcagaggtggaggaaaccttaaagaggatccagagtcataaaggggttattggaactatggttgtaaatgcagaaggtattcccatccgaacaaccttggacaactcaacaactgttcaatatgcaggccttcttcatcacctgacaatgaaagccaaaagcacagttcgtgatattgatcctcagaacgacctgacttttcttaggatcagatcaaagaaacatgaaatcatggtagctccagataaggaatatcttctgatcgtcattcagaatccatgtgaatagacctgcgatggccaaggctgtttaagcgacactgggttggaaacacttggctctctcatgagtattaaaattctatttcaatctaaaaaaaaaaa

SEQ ID NO: 5994 - DNA, 1179 bp, Homo Sapiens
  NM_130906
ggggaggaaggaggtgaggcggtaaggggcgttctctctcttgggtcccgcgcccaacttccgctggcccaaagaaactataattttgaaccaacagacctctgctggcatctgcgattgcatttttcctgttttaacaacggctgtgctagacgaagtggtgaagcccaaagacttatttttgagctcgctgtaagactgagaaatcacgtagtccttcctgaaaccactaagaggaaaaatgtctgtgacactgcatacagatgtaggtgatattaaaattgaagtcttctgtgagaggacacccaaaacatgtgagaatttcttggctctttgtgccagtaattactacaatggctgtatatttcataggaatatcaagggtttcatggttcaaacaggagatccaacaggaactggaagaggaggcaacagtatttggggcaagaagtttgaggatgaatacagtgaatatcttaagcacaatgttagaggtgttgtatctatggctaataatggcccgaacaccaatggatctcagttcttcatcacctatggcaaacagccacatttggacatgaaatacaccgtatttggaaaggtaatagatggtctggaaactctagatgagttggagaagttgccagtaaatgagaagacataccgacctcttaatgatgtacacattaaggacataactattcatgccaacccatttgctcagtagctatgatagacctggacaaataacttgacaaattgctggaacacacttattgtggtttacccggttttaattatgtcagagattgcatcatccttctgcttgtttacaactatgatcttctatgaaatggtggtaccaaggggcgcccaacagcttttatccccattcttagagcatattctttattataatgattatccaacatatttctttaattttaatacaaaaaatacatcatttaatttttgttacatatgaacattcatttttaaatgctcagcctcaagtgcaggcatttttgagtggcctgattacatattcctcccacagcaagtccgtatcctggaagtgttattttataataaaatttaaaaagttttaaagaattaaatcgtaggacaaattaattaaaatattgtgtaaaattaccttcaggctaaaaaaaaaaaaaa

SEQ ID NO: 5995 - DNA, 1420 bp, Homo Sapiens
  NM_133169
atttcctgggaggggagagggtgcgaccaagccctggctccagctctagcgggtatctgcccaccatggccctggtgctgatcctccagctgctgaccctctggcctctgtgtcacacagacatcactccgtctgtccccccagcttcataccaccctaagccatggctgggagctcagccggctacagttgtgacccctggggtcaacgtgaccttgagatgccgggcaccccaacccgcttggagatttggacttttcaagcctggagagatcgctccccttctcttccgggatgtgtcctccgagctggcagaattctttctggaggaggtgactccagcccaagggggaatttaccgctgctgctaccgaaggccagactgggggccgggtgtctggtcccagcccagcgatgtcctggagctgctggtgacagaggagctgccgcggccgtcgctggtggcgctgcccgggccggtggtgggtcctggcgccaacgtgagcctgcgctgcgcgggccgcctgcggaacatgagcttcgtgctgtaccgcgagggcgtggcggccccgctgcagtaccgccactccgcgcagccctgggccgacttcacgctgctgggcgcccgcgcccccggcacctacagctgctactatcacacgccctccgcgccctacgtgctgtcgcagcgcagcgaggtgctggtcatcagctgggaagactctggctcctccgactacacccgggggaacctagtccgcctggggctggccgggctggtcctcatctccctgggcgcgctggtcacttttgactggcgcagtcagaaccgcgctcctgctggtatccgcccctgagccccaggagcactgcagcccgagacttccaacctgagtggcggagaagctgggaccctgggctggactgtcctttcctgcagccccacagtcctgctggctgagctccgcggaacggtccttagaccccgctgtgccctgtgctgtagcttctttccaggcctttcccaaggagtagctgaaaggaagacgcgattagtggttaagacttccaagccagaagacagagggttcgaatcccagcactgccgtctactcactgtagtagtagcagctacagaaaggtagtagtgagacgtgaagccagctggacttcctgggttgaatggggacctggagaacttttctgtcttacaagaggattgtaaaatggaccaatcagcactctgtaagatggaccaatcagcgctctgtaaaatggaccaatcagcaggacatgggcggggacaataagggaataaaagctggcgagcgcggcaccccaccagagtctgcttccacgctgtgggagctttgttctcttgctctacacaataaatcttgctgctgctaaaaaaaaaaaa

SEQ ID NO: 5996 - DNA, 3683 bp, Homo Sapiens
  NM_133171
tcccaagaaggcggggcgggcggaggctggaggagccgccgagcggagacccgggagcaggagctgggcctaggtctgcgccctggagggaggtgtagaaagaggtacatggagaacaagtttgtcaatccgtctgaacttcagttgccttacctgtaaggcagccgtgtctgtgtttttgtctcgcagaattagagcccattgggaacgatgccaccaccgtcagacattgtcaaagtggccattgagtggccaggtgctaacgcccagctccttgaaatcgaccagaaacggcccctggcatccattatcaaggaagtttgtgatgggtggtcgttgccaaacccagagtattataccctccgttatgcagatggtcctcagctgtacatcaccgaacagactcgcagtgacattaagaatgggacaatcttacaactggctatctccccgtcccgggctgcacgccagctgatggagaggacccagtcatccaacatggagacccggctggatgccatgaaggagctggccaagctctctgccgacgtgactttcgctactgagttcatcaacatggatggcatcattgtgctgacaaggctcgtggaaagtggaaccaagctcttgtcccactacagtgagatgctggcattcaccctgactgccttcctagagctcatggaccatggcattgtctcctgggacatggtttcaatcacctttattaagcagattgcagggtatgtgagccagcccatggtggacgtgtcaatccttcagaggtccctggccatcctggagagcatggtcttgaacagccagagtctgtaccagaagatagccgaggaaatcaccgtgggacagctcatctcacacctccaggtctccaaccaggagattcagacctacgccattgcactgattaatgcactttttctgaaggctcctgaggacaaacgacaggatatggcaaatgcatttgcacagaagcatctccggtctataatcctgaatcatgtgatccgagggaaccgccccatcaaaactgagatggcccatcagctatatgtccttcaagtcctaacctttaaccttctggaagaaaggatgatgaccaagatggaccccaatgaccaggctcaaagggacatcatatttgaactgaggaggattgcatttgacgcagagtctgatcctagcaatgcccctgggagtgggaccgaaaaacgcaaagccatgtacacaaaggactacaaaatgctgggatttaccaaccacatcaatccagccatggactttacccagactcctcctggaatgctggccttggacaacatgctgtacttggctaaagtccaccaggacacctacatccggattgtcttggagaacagtagccgggaagacaaacatgaatgcccctttggccgcagtgccattgagctcaccaaaatgctctgtgaaatcctgcaggttggggaactaccaaatgaaggacgcaatgactaccacccgatgttctttacccatgaccgagcctttgaagagctctttggaatctgcatccagctgttgaacaagacctggaaggagatgagggcaacagcagaggacttcaacaaggttatgcaagtcgtccgagagcaaatcactcgagctttgccctccaaacccaactctttggatcagttcaagagcaaattgcgtagcctgagttactctgagattctacgactgcgccagtctgagaggatgagtcaggatgacttccagtccccgccaattgtggagctgagggagaagatccagcccgagatccttgagctgatcaagcagcagcgcctgaaccggctctgtgagggcagcagcttccgaaagattgggaaccgccgaaggcaagaacggttctggtactgccggttggcactgaaccacaaggtccttcactatggtgacttggatgacaacccacaaggggaggtgacatttgaatccctgcaggagaaaattcctgttgcagacattaaggccattgtcactgggaaagattgtccccacatgaaagagaaaagtgctctgaaacagaacaaggaggtgttggaattggccttctccatcctgtatgaccctgatgagaccttaaacttcatcgcacctaataaatatgagtactgcatctggattgatggcctcagtgcccttctggggaaggacatgtccagtgagctgaccaagagtgacctggacaccctgctgagcatggagatgaagctgcggctcctggacctggagaacatccagattcccgaagccccaccccccatccccaaggagcccagcagctatgactttgtctatcactatggctgagcctggagccagaaacgacggtacccaggagaagggattttgggcccaggagaaacacttacattctggtgccttgtcttttgcttgtacagaatctgtagtgattttggtggccagtaaatgccagccatttctcaaacccacctcggaccacccagagtttcctcttggtccctgtctactaagagtcatgaaggcagggtgctctgcccactccatcaccatgaagcctgggattgggccacgaggaacaaacagcagatgcccttgccttccagtccaagaaactgcttcttgaaatggatttaacaacagccactcaccttttcctcctgagcctgctctctgatcagctggatccccacgtgagcaacagctggcccaggaaaggctgcctgcagaggacaggtgtgttgggcgtgttgagagccttgaagtgactacctgtatcttagatctgagtacaagcctgaggcttttgcttttgtcttttttgatgagggctcactccagcttcatatggtgccaagacgttgctgcttctgaggttggctctaacatctctggtctttagagccaccagatctctctggcccatacagatatcagagcagacggaaatttctccctgcaagcgctcagtctcatcccagcaagtcaaagacctcctggccaagtcctgccctcttaagtctccaggaacgctgcagggaaaacccagctgaggcctgggcctagactgtggtgaggtcactagattctactgctcttcccccacattaataccttttccttcctcagagagaaatctcccctaacctgaattgcagccccctccagtttgctttcctttggccttccagaccccaggaagttggccttcccttcctagtgctatggtttctgccattggccatgatttcagggagctggctgaggccggctgaggccacacctgtgccagtggggcttccctggtgctgcagcacttgtaaaccacacacacagcctctctccctggacatacgttagcacattggcattcagtattggtggcctggcatggtaggtactacccaatgaagagtgtactatatattttcattactataggccatacttatacagacgtgtatatatatttatataagatctacctatcttaggatggaaccttggggaaaaataaaattgaggggaagtaaaaagtatgtaacacttccagttgtgagccaagattgtaaccagagagcagccaggagcttcctgtcagtaaccatgttttcaataaatactctttcatgtacaaa

SEQ ID NO: 5997 - DNA, 2161 bp, Homo Sapiens
  NM_133172
cgcggcgcatgttcggcgtgtcggtcttcaggcgcctgatgagttcatagttgggcggtggtgtcagcggtttcgctggcgttcgtgggcctcccccggacccacacacggaaacacgcaaccattcggggatccagacgcccgtttacacgcaccacccctgggcgggctgtgcggctcaggccctcccccgggaccggcccgtgtcccgccccgtgtcccgccccgtatttgtgcggcgccagctggccccgcagcctgcggcgcagagaggctgggcttgcaggcgcagtagctccagaggtcgcgctgggctgagagtgcgggccggcagaggctggcggggagcagccggggttatgctgggcaaggattacatgctggccatcattctggtcaactgcgatgatgacttgtggggggaccacagtctggaggtggaggctggcctgcctcctggctggaggaagatccacgatgctgcaggtacttactactggcatgtacccagcggtagcacccagtggcagcgcccaacctgggaactaggagatgcagaggacccaggcacgggaacggaggggatctggggactgcggccccccaaagggagatccttctccagcctggagagttcactggaccggagtaactctctgtcctggtatggtggggaatcctacatccagagcatggagccaggggctaagtgctttgcagtccgctctctgggctgggtagaggtacctgaagaggacctggcaccggggaagagcagtattgcagtcaataactgtatccagcagctggcccagacccgcagccggagccagcctccagatggtgcctggggtgagggccagaacatgctgatgatcctgaagaaggatgccatgagcctagtgaatcccctggaccacagtctgatccactgccagcctctggtgcacatccgtgtgtggggcgtggggagctccaagggccgccccatctctgcccctgctagggacttcgcttttgtggcaagtgacaaagatagctgtatgctcaagtgccatgtgttttgctgtgatgtccctgccaaggccattgccagtgccctacatgggctttgtgcccagatcttgtcagagcgagtagaggtcagtggtgatgcctcttgctgctccccagaccccatctctcctgaagacctgccacggcaagtggagctgctggatgcggtaagccaagctgctcagaagtacgaggcactgtatatggggacactgccagtcaccaaggccatgggcatggatgtgctgaacgaggccattggtaccctcaccgccaggggggaccggaatgcctgggtccccaccatgctcagtgtgtctgactctctcatgactgcacaccccattcaggcagaggccagtacagaggaggagccattgtggcagtgccctgtgcgccttgtgacatttattggtgttggccgcgacccacacacctttggcctcatcgctgacctgggccgtcagagcttccagtgcgcagccttctggtgccagccccatgcagggggactctctgaagctgtgcaggctgcctgtatggttcagtaccagaagtgtcttgtggcctctgcagctcgaggcaaggcctggggtgcccaggcccgtgcccgcctgcggctcaagcggaccagctccatggattccccaggaggtcccctgcccctccccctgctcaaaggaggggttggcggtgcaggggcaacccctcgaaagcggggtgtcttctcttttcttgatgccttccggctgaaaccctctctgctccatatgccctaaacttatctgggaaggctggggaagtaggctctgggtccatgcctaactctgtaccgttttattcctcaaggcctatagcctgtcactccttgaagccttctctgcctgtccctccgatccttgtccaccgtctatttattgcccaatttattgtttatacggatgactgggaggcactgcaccacaacgtaggaccctggctcccctttccttgggtccttgtgttccttgcccctgtccaaccctggacagttggctctacctcagtaacactttatagcaaaatcagtgcaaataaaaatccctcagtgacctcaaaaaaaaaa

SEQ ID NO: 5998 - DNA, 2146 bp, Homo Sapiens
  NM_133173
cgcggcgcatgttcggcgtgtcggtcttcaggcgcctgatgagttcatagttgggcggtggtgtcagcggtttcgctggcgttcgtgggcctcccccggacccacacacggaaacacgcaaccattcggggatccagacgcccgtttacacgcaccacccctgggcgggctgtgcggctcaggccctcccccgggaccggcccgtgtcccgccccgtgtcccgccccgtatttgtgcggcgccagctggccccgcagcctgcggcgcagagaggctgggcttgcaggcgcagtagctccagaggtcgcgctgggctgagagtgcgggccggcagaggctggcggggagcagccggggttatgctgggcaaggattacatgctggccatcattctggtcaactgcgatgatgacttgtggggggaccacagtctggaggtggaggctggcctgcctcctggctggaggaagatccacgatgctgcaggtacttactactggcatgtacccagcggtagcacccagtggcagcgcccaacctgggaactaggagatgcagaggacccaggcacgggaacggaggggatctggggactgcggccccccaaagggagatccttctccagcctggagagttcactggaccggagtaactctctgtcctggtatggtggggaatcctacatccagagcatggagccaggggctaagtgctttgcagtccgctctctgggctgggtagaggtacctgaagaggacctggcaccggggaagagcagtattgcagtcaataactgtatccagcagctggcccagacccgcagccggagccagcctccagatggtgcctggggtgagggccagaacatgctgatgatcctgaagaaggatgccatgagcctagtgaatcccctggaccacagtctgatccactgccagcctctggtgcacatccgtgtgtggggcgtggggagctccaagggccgtgacagggacttcgcttttgtggcaagtgacaaagatagctgtatgctcaagtgccatgtgttttgctgtgatgtccctgccaaggccattgccagtgccctacatgggctttgtgcccagatcttgtcagagcgagtagaggtcagtggtgatgcctcttgctgctccccagaccccatctctcctgaagacctgccacggcaagtggagctgctggatgcggtaagccaagctgctcagaagtacgaggcactgtatatggggacactgccagtcaccaaggccatgggcatggatgtgctgaacgaggccattggtaccctcaccgccaggggggaccggaatgcctgggtccccaccatgctcagtgtgtctgactctctcatgactgcacaccccattcaggcagaggccagtacagaggaggagccattgtggcagtgccctgtgcgccttgtgacatttattggtgttggccgcgacccacacacctttggcctcatcgctgacctgggccgtcagagcttccagtgcgcagccttctggtgccagccccatgcagggggactctctgaagctgtgcaggctgcctgtatggttcagtaccagaagtgtcttgtggcctctgcagctcgaggcaaggcctggggtgcccaggcccgtgcccgcctgcggctcaagcggaccagctccatggattccccaggaggtcccctgcccctccccctgctcaaaggaggggttggcggtgcaggggcaacccctcgaaagcggggtgtcttctcttttcttgatgccttccggctgaaaccctctctgctccatatgccctaaacttatctgggaaggctggggaagtaggctctgggtccatgcctaactctgtaccgttttattcctcaaggcctatagcctgtcactccttgaagccttctctgcctgtccctccgatccttgtccaccgtctatttattgcccaatttattgtttatacggatgactgggaggcactgcaccacaacgtaggaccctggctcccctttccttgggtccttgtgttccttgcccctgtccaaccctggacagttggctctacctcagtaacactttatagcaaaatcagtgcaaataaaaatccctcagtgacctcaaaaaaaaaa

SEQ ID NO: 5999 - DNA, 6637 bp, Homo Sapiens
  NM_133259
acatgctcctcctgtccttctggcggagcgtgcttcccgctgcggggacgttcgagcaatggcagccctgctgagatccgcgcgttggttgctgcgtgccggggcggccccgcgcctcccgctctccctgcgcctcctccctggcggcccgggccggctgcatgccgcctcctatctgcccgccgctcgcgccgggcccgtggccggaggactactgagcccagccaggctgtatgccattgctgccaaagaaaaagatattcaagaggagtccactttttcttctaggaagatttccaatcagtttgattgggctctaatgagactagatctttctgttcgaagaactggccgcattccaaagaagcttctacaaaaagtttttaatgatacctgccgctcaggtggcctaggtggtagtcatgccttgcttctactacgtagttgtggttctctcttgcctgaactaaagcttgaagagagaacagaatttgctcataggatatgggacacacttcagaaattaggtgctgtgtatgatgtgagtcactataatgctttacttaaagtctatcttcaaaatgaatataaattctcaccaactgatttcctggcaaaaatggaggaagcaaacattcaaccaaatcgagtgacataccagagattgattgcttcttattgtaatgtaggagatattgaaggtgccagcaagattcttggatttatgaaaactaaggatctcccagttacagaggcagtattcagtgcccttgtgacagggcatgccagagctggtgatatggagaatgcagaaaacattctcacagtgatgagagatgccggaattgagcctggtccagacacatacctcgcattattgaatgcatatgctgagaagggcgacattgaccatgttaagcagactctggagaaggtggagaagtccgagcttcaccttatggaccgtgatttactgcaaattatttttagcttcagtaaagctgggtatcctcagtatgtctcagaaattttggaaaaagttacatgtgaaagaagatatattccagatgcaatgaacctcattttacttttagtcactgaaaaattggaagatgtagcgttgcaaattttactagcatgccccgtatcaaaggaagatggcccaagtgtctttggcagtttctttttacaacactgtgtgactatgaatacgcctgtggagaagctaacagactactgtaagaagttaaaggaagtccagatgcactcctttcctctgcagttcaccctccattgtgctttactcgccaataaaactgatttggcaaaagccttaatgaaggctgtgaaggaggaaggttttcctatcagacctcactatttctggccattgctagttggacgtcggaaggaaaaaaatgttcaaggtataattgaaatcctcaaaggaatgcaagaattgggagtacatcctgatcaggaaacatatacagattatgtgattccatgctttgatagtgtaaactcagcacgagccattttgcaggaaaatggatgtctgtctgatagtgatatgttttctcaagctggattgagaagtgaagcagcaaatgggaacttagactttgtattatcatttttgaaatcaaatacattgcccatctcgctgcagtctataagaagtagcctactgctaggcttcaggaggtctatgaatataaatctttggagcgagataacagaattgttgtacaaggatggacgttattgccaggagcctcgaggaccgacggaagctgttggctattttctttataacttgattgacagcatgagtgactcagaggtacaggccaaggaggagcatttgagacaatacttccatcagctggagaagatgaatgtaaaaattcctgaaaatatctacagaggcattcgtaatctcctggaaagctaccatgttcctgaattgattaaggatgctcacttgttggttgagagtaagaatttagactttcaaaaaactgtgcaacttacatcatctgaattggagtccacacttgaaacactaaaagctgaaaatcaacctataagagatgtcctaaagcaactcatattagtgctttgttcagaagagaatatgcaaaaagcccttgaattgaaagcaaaatatgaatccgacatggttactggtggctatgcagctttaataaatttatgctgtcgacatgataaagtagaagatgccttgaacttgaaagaagaatttgaccgcttagattcatctgctgtccttgacaccggcaagtatgtaggccttgtaagagtattggcaaagcatggcaagctccaagatgctattaacattctgaaggagatgaaagagaaggatgttcttatcaaagatacaacagccttgtcctttttccacatgctaaatggcgcagctttaagaggtgaaattgaaacagtaaaacagttgcatgaagccatcgtgactctagggttagcagaaccatccaccaacataagtttcccattggtcactgtacacttggaaaagggcgacctatctactgctcttgaggtcgccattgactgctatgaaaagtataaagtattaccaaggattcatgatgtcttgtgtaaactggtagagaaaggcgagactgatctaattcagaaagcaatggactttgtgagccaagaacaaggtgaaatggtgatgctctatgatctcttctttgccttcctacaaacaggaaattacaaagaggccaagaagatcattgagactccagggattagagctcgatctgcaaggcttcagtggttttgtgacagatgtgttgcaaataatcaggttgaaactctggaaaaattagtggagctgacacagaagctatttgaatgtgatagagaccagatgtactacaatctgctaaaactgtataaaataaacggtgactggcaaagagctgatgcagtctggaataaaatccaagaagaaaatgttattcctcgtgaaaagacattaagattattagcagaaatccttagagagggtaaccaggaagttccgtttgacgtacctgagttgtggtatgaagatgaaaaacattccctgaattcttcgtcagcctcaaccacagaacctgatttccagaaagatatattgattgcctgccgattgaaccaaaaaaaaggggcatatgatattttcctgaatgcaaaagagcaaaacattgtgtttaatgctgaaacctacagcaatctcattaaattactgatgtcagaagattattttacacaagcaatggaagtgaaagcattcgcggagacccacatcaagggcttcacactgaacgatgctgccaacagccgcctcatcataacgcaagttaggcgggattatttgaaagaggctgtgacaacactgaaaacagtattggatcagcagcagaccccttctaggttagcagtgacccgtgtcatccaggcattggccatgaagggtgatgttgaaaacatagaagtagttcagaagatgttaaatggactcgaagactccattggactttcaaaaatggttttcatcaataacattgctttggctcaaataaagaataataacatagatgccgcaatagaaaacattgaaaatatgcttacttcagagaataaagtcattgaaccccaatacttcggcttggcatacttattcagaaaagtaatagaggagcagttggaaccagcagttgaaaagataagcatcatggcggagagattggccaatcagtttgcaatttataaacctgtcactgattttttccttcaacttgtggatgcaggcaaggtggatgatgccagagctctcctacagagatgtggtgcaattgctgaacaaaccccgattttgttgttgttcctccttaggaattctaggaaacaaggaaaggcatcaactgtgaaatctgtgttagaattgattcctgaattaaatgaaaaggaagaagcatacaattccctcatgaaaagctatgtctcagagaaagatgtcacatctgctaaagcactgtatgaacatttgactgcaaagaatacaaaattggatgatctgtttctaaagcgttacgcatctttgctgaagtatgctggagagcctgtccctttcattgaaccccctgaaagctttgaattttatgcacagcagctaagaaaattgagggaaaactcttcttgaaataaccaggcgatactttgttttgtatatatttgtgattctgtgtctacatgttattttgaagtatatctgagggaaaaataaatgaaaattttctttatgtacttatgtatgtgtgatgcatgttcaaagtcttattgaccataactctgtgcacttggttattggacatttttggagtttttttctctgggaaaaatcgatagtgttttcttcaatgctgctgctgtgtgaagccatactttttcaggattcttcccctaattggctctttggtttccctgctctgtttcatttatttcattaaaatgttattcctttatttaagattcacttattagtctgctgtttctctgaaaaattttagagctaggtatagtgaccgtgaactttctaacgcataatattctgtgatacagccattccgtacatgtgtgaagtcctgcataactttcgaactttgttaaatgttggcactaggagtcatcagatctaggcttcatcattttccagtgagaagcagagacccaaagggcctgttacttgtgcttggtcaggggactgtctgtcatgcctggaggctcttcggcacacttccccatctttcccttctgccactgtggcttcaagcacctctgttcatagagcgtctctgaaattgagtctcggtcatgacttatcccgaagtagagcaatgtgtttcctctcattgtagtttcaggactttgtcagtacaagctctgccctaggcttgttactttatactcatatcctgaaaagatgtgatttcatctatgaaggggtaaaatattggtttgtatttaattgtttgaaataaaagtgatccctatattgaatctcatgcctgttaatatctacactgtaagtagtgacttcaaaaaaattctaagataggtagtcaggagagtttgccattataaaaggtgtcttaataatatggaatattgacctaactggagatgaggtaattaattaccgaaatgttgaaaatgttttgagaactctccccattttggggtattccttgttcatttgaatttggtgactccctactgttccagtttcagtgccaacttgggtcacactgttcacatcaggggagaccttgccttggggacgtaggcgggcctcttgcaacttgtgctgttgaccttctgtcttgtggaactctctctcctgcatctgctacctgcccgcagatggtgtgagggagggttgatggcgggaagccaggaagtagatgtcatcatggtattggccaggcttttacttcaactctttttgtggcgttagatttaaggaagcagggggcatggccaacgttgagtcttggcccagtggacatagtgcggctttcccttgagcactgcccagatgcaggacctgcacatgttacaggtttgccaaaagcatctttttttttttttttttttttgagatagtcttgctctgttgcttaagccagagtgcagtggcgcaatctcagctcactgcaacctccgcctcctgggttcaagtgattcttgtgcctcagcctcccacgtagctgagattacaggcttgcaccaccatgttcagctaatttttgtatggtaaagacggagtttcaccatgttggccaggttggtctcgaactcctggccccaagtgatcctccccctgcgctcgcttcagcctcccaaagtgctgggattacaggtgtgagccaccacgcctggccaagagcctcactcctgtctttagtgattgcactgaagcaggcctcatttttttgcagtcatgctaaccacaagttagtcaacattcactaattgacattcattagaataggtctccaaggtgaggcataacgttggggtgtaatctggatttcgcagtcatctttttggggaaactgaaagtaccatctcatttgcatgaagtgactccacactggccctgtatatggactctggtaaaatgtgagtgtggtacagaggaaataggtaagacccccttatctagccctctcggcagcagcgggggggtgttacaaaggactagctgttcaaatatcttttgtattgtattgattcccctattgaatataaatatttaaagtataataactatactgtaggtgggcttatgagtgttctaaatatctaatagctaaattgaaataagtagaaatataaacaatttagcagctttctgtaatacatttacactcaaattataagcagctaattctaaaaaagatgtcactgtaaactattgagaactatagtattttatatataattatatgttcatgtatttgaacccaaaataattttaactgaaatgctttgaataaagtatactgtaaatatcaaaaaaaaaaaaaaaaaa

SEQ ID NO: 6000 - DNA, 10642 bp, Homo Sapiens
  NM_133263
ctcctccctcctcccttgctcgctcgctggctccctccccccgggccggctcggcgttgactccgccgcacgctgcagccgcggctggaagatggcggggaacgactgcggcgcgctgctggacgaagagctctcctccttcttcctcaactatctcgctgacacgcagggtggagggtccggggaggagcaactctatgctgactttccagaacttgacctctcccagctggatgccagcgactttgactcggccacctgctttggggagctgcagtggtgcccagagaactcagagactgaacccaaccagtacagccccgatgactccgagctcttccagattgacagtgagaatgaggccctcctggcagagctcaccaagaccctggatgacatccctgaagatgacgtgggtctggctgccttcccagccctggatggtggagacgctctatcatgcacctcagcttcgcctgccccctcatctgcaccccccagccctgccccggagaagccctcggccccagcccctgaggtggacgagctctcactgctgcagaagctcctcctggccacatcctacccaacatcaagctctgacacccagaaggaagggaccgcctggcgccaggcaggcctcagatctaaaagtcaacggccttgtgttaaggcggacagcacccaagacaagaaggctcccatgatgcagtctcagagccgaagttgtacagaactacataagcacctcacctcggcacagtgctgcctgcaggatcggggtctgcagccaccatgcctccagagtccccggctccctgccaaggaggacaaggagccgggtgaggactgcccgagcccccagccagctccagcctctccccgggactccctagctctgggcagggcagaccccggtgccccggtttcccaggaagacatgcaggcgatggtgcaactcatacgctacatgcacacctactgcctcccccagaggaagctgcccccacagacccctgagccactccccaaggcctgcagcaacccctcccagcaggtcagatcccggccctggtcccggcaccactccaaagcctcctgggctgagttctccattctgagggaacttctggctcaagacgtgctctgtgatgtcagcaaaccctaccgtctggccacgcctgtttatgcctccctcacacctcggtcaaggcccaggccccccaaagacagtcaggcctcccctggtcgcccgtcctcggtggaggaggtaaggatcgcagcttcacccaagagcaccgggcccagaccaagcctgcgcccactgcggctggaggtgaaaagggaggtccgccggcctgccagactgcagcagcaggaggaggaagacgaggaagaagaggaggaggaagaggaagaagaaaaagaggaggaggaggagtggggcaggaaaaggccaggccgaggcctgccatggacgaagctggggaggaagctggagagctctgtgtgccccgtgcggcgttctcggagactgaaccctgagctgggcccctggctgacatttgcagatgagccgctggtcccctcggagccccaaggtgctctgccctcactgtgcctggctcccaaggcctacgacgtagagcgggagctgggcagccccacggacgaggacagtggccaagaccagcagctcctacggggaccccagatccctgccctggagagcccctgtgagagtgggtgtggggacatggatgaggaccccagctgcccgcagctccctcccagagactctcccaggtgcctcatgctggccttgtcacaaagcgacccaacttttggcaagaagagctttgagcagaccttgacagtggagctctgtggcacagcaggactcaccccacccaccacaccaccgtacaagcccacagaggaggatcccttcaaaccagacatcaagcatagtctaggcaaagaaatagctctcagcctcccctcccctgagggcctctcactcaaggccaccccaggggctgcccacaagctgccaaagaagcacccagagcgaagtgagctcctgtcccacctgcgacatgccacagcccagccagcctcccaggctggccagaagcgtcccttctcctgttcctttggagaccatgactactgccaggtgctccgaccagaaggcgtcctgcaaaggaaggtgctgaggtcctgggagccgtctggggttcaccttgaggactggccccagcagggtgccccttgggctgaggcacaggcccctggcagggaggaagacagaagctgtgatgctggcgccccacccaaggacagcacgctgctgagagaccatgagatccgtgccagcctcaccaaacactttgggctgctggagaccgccctggaggaggaagacctggcctcctgcaagagccctgagtatgacactgtctttgaagacagcagcagcagcagcggcgagagcagcttcctcccagaggaggaagaggaagaaggggaggaggaggaggaggacgatgaagaagaggactcaggggtcagccccacttgctctgaccactgcccctaccagagcccaccaagcaaggccaaccggcagctctgttcccgcagccgctcaagctctggctcttcaccctgccactcctggtcaccagccactcgaaggaacttcagatgtgagagcagagggccgtgttcagacagaacgccaagcatccggcacgccaggaagcggcgggaaaaggccattggggaaggccgcgtggtgtacattcaaaatctctccagcgacatgagctcccgagagctgaagaggcgctttgaagtgtttggtgagattgaggagtgcgaggtgctgacaagaaataggagaggcgagaagtacggcttcatcacctaccggtgttctgagcacgcggccctctctttgacaaagggcgctgccctgaggaagcgcaacgagccctccttccagctgagctacggagggctccggcacttctgctggcccagatacactgactacgattccaattcagaagaggcccttcctgcgtcagggaaaagcaagtatgaagccatggattttgacagcttactgaaagaggcccagcagagcctgcattgataacagccttaaccctcgaggaatacctcaatacctcagacaaggcccttccaatatgtttacgttttcaaagaaatcaagtatatgaggagagcgagcgagcgtgagagaacacccgtgagagagacttgaaactgctgtcctttaaaaaaaaaaaaaatcaatgtttacattgaacaaagctgcttctgtctgtgagtttccatggtgttgacgttccactgccacattagtgtcctcgcttccaacgggttgtcccgggtgcacctcgaagtgccgggtccgtcacccatcgccccttccttcccgactgacttcctctcgtagacttgcagctgtgttcaccataacatttcttgtctgtagtgtgtgatgatgaaattgttacttgtgaatagaatcaggactataaacttcatttttaattgaaaaaaaaagtatatccttaaaataatgtatttatggctcagatgtactgtgcctgggattattgtattgcttccttgattttttaactatgcactgtcatgaggtgtttgccactgagctgccctgctccccttgccagattgccctggaggtgctgggtggccgctaggctggtctgcaggaaagcgcggcctgccgtttccgggccgtatctgccaagccctgccttgtctcttactgagcaagtttggctcaaattataggagcccccatcttgtgcccagctcatgctccaagtgtgtgtctatccatttgtactcagactcttgagtaccttgtaaggaaggcggggcaagctgcatcattcctgttttccaggggaggctggcagctcctcaagaggcgaaatgactgtgggaggtccggttaccagtgaggaggcagagcggtgacccagaccaggccttctggttcttggtcccgtgcttccgtagtagctggggtaaagacaccgtttcagggactggtagaggtgagttcggctaaattgggcaccgggctagaagcctaagggctcattttaggggttacattaggtgttgattcaccagcatcaggtgaattcaagccctggcatgtgtcttggatgcaccatcagctttgatcctgagtggtcctgcggtttgtctgtgcctgtggacacactgtcagaacttcagtgacacccctggcagcggtacagacaggtggtctgggagcagtcatcttttttgggccagccaccagcccatcctactccctcaggtagtccttcgtctttaccttgtccttgtctgtaaagttgttttggtggctggggcaggggagccaggaggagggagtgaaggttgggaatagataggacaatctcctagctctcctccaattgagaaaacactccaattgggctttgctttaaactttgtgttcttaagtgatgtcaaagccatttccagcttaatgttctgtgggtaccttgggggccattcatgcagggagcatggccaggcagggtatgagtacattgtttctgatttctttcatacatcagggttcctcgggaaatttttgtattttttttttaagtcctgctgctttaaaaatttgaaagtggctcattaaactaaacaggctaatgtaatttgttgcttatgccaagcctagactgttgagaattgacgtttttaaagattatcaaatacctcagtaggtaaaatgagcccatgatcttccactgagtggtgagcatactcccagcccatggacaaggccggaagagacaggctttagtaggggtagggaatttgaactgttgtgtgtcacagcagttgacctctctggactccaatttcctttcctgtgaaatgaactgattagacatgtttcaacattgttagcttctgctgaggcagtgtctagcccaagatggcaaatacatagctcatgtgccactactcccacctccttgaccaatacagacataactaatcaatcacaccactcaggttccctgagcctggatgtgctataagaatcctgaaatcagtgctctggtaagtcattactaattgattagagttcaatctatttgacatcttgggctaatctttggaaggtttccaacaatcacacaaaaccatatgctggctgggtttcatgctggcctatccctgtctgtgatgttccgttccatgagagaaaactcccctaatgctattccatggcgtaacactcccaatactattttgacgcccacgtccccttgcagagggtgcagggggcggtagacgaatgacagacaggaacatatttggggaaggcagggcttaggaagatggaccaaaaagggacttcccacagcacagacctgatcattcggatttcctctttagctattcactgcctagcacatagtaggcacacaataaatgattatggaatgggataaaatttagatctttctgctgcctccactaagttaagtcctgatttacatcaaggagagaactgagataggaaagaacactagattccaagtctggagagttgggggagtccagattctaccaagaatttcctttgtaactttggtaagtcccttttactccctggcaccccggtgtgctgaaaggagttggtccatatatgatctcttagcccctcctatttgcttcttccttgattgctcttggtcaaagggtcagccttgggctggtgatactttagagtaaagaaatggagagttttagcaaaggaccagtctgtccctccctgctttggggtcagctaaagctgtcctttcatgtcagattaacctaggacacttgtagttagcttagacgttggcccttgagcagagacctgagcgtggcattgggacatgacatacctaaagtcagggctaggggacgctgcctgccaagggcatcgagtagtctctacttgctatcccgtacataaaatgctacaagttctaaaatttaccgaccctgcagacaacctctatcccgaaggactcattcggtgctgtgtattatttagggcaactccaaggtctattcagaaaaacgagtgaaccttggtctctttcccaccaaattgaggagtaacccagagggagcagctgccattggcaaccatctcgttgtagctctgtcctagtgtttgctcttgatgatgtttacatgtgatcgccataaagcttgctgtagactgtgtcgatagccgcccgcacagggcaggtcgtactgtccgtttctgtgccgtgctggtgttttccaaaaatgtctgatccaaccactaagtggaattcttccatctccttcctcagtctgtacaaggctgaatcagaatccccattctcgggggctctggttaccgaaggaaaatgcatcaaagagttaaagaatatgagtggatggagtgcagctaaggcccccaccccctgctccgtcacaacttgccccctcaaccaaaaagctgctttgagtcaaaaagcacccataagatacctgcatctgccttgaaatcttgcagcatggagtgtcatatgtactcaggagagaggcagggctttgcgggcaggagaaggaagggaggaatgctctgagctgcaaagacccagtactcaagttctgacgtgggaggagatgcagtgagacgtctcttgttgcctaaagcctgttcctgttggttttcttagagtgatttctcctagacatgtgcagtaggcccactggggctgctgtgcagtggtgagtaaaagggcagggaaggcatggacagcctggtccttctgcatggacagctcagtccatggcccatcccaggtatagagttcagttaatcccatttgagcctgcagcttaagagatggctcatcctaactgtgaagcaaaatcagccccagaggatgtattgatctgactcactgatgtcaaaattgcagtatttttttagcatttgagatttagcagctgccttcagtttggggttacccacatcccagcatcagatatgattaaggaaagaaattggatgtacaacagcaaagaaagtgaatgtcatggtttccctggccaaagaagagggaccctgtcatccttaccaatggggaagaagaaaactagtgcatgtgcaatatgtcaaagttagtcccctagtccctgaggggtttttacacacagatgggctccaggtctgctcgtcaagtttggaggtaccgggtaaatggaggggagctgcagagttggaaacccacatgcatggatgtgtccttggcccagaaccaccatgggatgggggaggccctgagccggctacaagacacccaggaagtaggcaaaggctgactttgcattaaacaataaaagcactttgagaaaaccccaacacttcagcctgggtccgtgtttctacactggaaaatacgagtctcctttggctgtgtgaagtgatcttctagagactgggacagggagtttgggaatggggctgctgtcaggtaggagagagcagagatgcctttggagatgtcagcagcaggagagccagtgctggggccaaccctttgctggccttttgttggaagcccttgaaacagggagccatgggtttagatcttggtacctacctttacagaaagatgaaaacagcccagctgagtgaaatgagtttgtagagtaagtcacttaactgtaagccatctcagaatcagaaaccctaatgtttcttacttgctatgtgaccttgggcccctgtttcctcatctaccaaatgagaatgttgaatatgagcattaaagtccctttcacctctgagaggctcagatccccaaccaggagcattgggaatccatcactcctccttgaaactgattccattctctgacttgacccagctcctgttcagggtgagggttctctgcaagaaccaaccagcagtaggttcaatcccactgtgtcctggctgagttgccttatccaagaagaccagctccccgggacagatctaagccatagtttctagtggggacagtaaggaattaaacccccaacttggctaggtaacgatgtcaaatctcacattaaccttgtctttgtccccactggatagctgttaatccgaatgttgtgaccatttggctgtttctctcttgttctcagacaatactagcaatacactttttttttttttttttaaagaaaaacagcttaggagcttttcacacatttctttcaaatgattgtaaaacatatggggcaacaggaggcattgatcgcgctgcatatgtttagggcagcttttgttttttgtttctttaatggtatagcagcagtgactgagccttcgtgattcctggggacagcttttcagatactctgtttcatcagtatgctttgcacatccggaaggagtacaaaaatccaactgcccaaatttggggcttggaaaataggttttataggtggtcggtccctgggctgtgcaacaactcctcaaagaggggtttatataactagaacccccctgggctgtatttttggtcaaaggagtctccaaggcggcttacaaaagcttcctttttcacttgaccacccttgctcattggttacttgtgaagggaattggtcagtttccacctcagcactttgccttatcaacatgcggtcgccatctagtggccaaaggttgtctccaccagctacccagatggaaggcaaataaatcctttcggccaccctgctgtccatcgtgaactttgggaatgaaatataatggcctgaacgaactgcctttgtgttcagagatcagtgcaacactagggtcagaagactccagaagcagccacttagtagactctcacgcagaactgagaaatgcactagctgtcctgtgggcagaagagacaggagtggaccaggagaggtccaggtgcccgggaagggtttactgtaactgcaatactggcagcccagctgctgaccttgttaagtaaacctttgctgggtggtccgaattctgccctcaaggcaagataagaagttgggtgtaaggattttgtggggggcctggccatgatctttgatatgatccccgaatagccaaatagttttttttgttcaattttttgtttctgtattttgtatttttaaaatcttgtcaaatgtttttgtgttaggaataaaaagtcataaactattcccaactttgtttcttgagggatgttctgattccaatggaaacaggtgggaaatctcaaggggagcgtggacaaggtggtatgtgcagcaggggaatagactgcttggatttccaaatggtttctggggaagatgaccatccagaagtccagcttagtgcagtctgctctggaattcacacccaccccctcgcctccttgtgccatgttgttagcattggcttggagcatctgcttcttccagaggcagctgctaatgttgaaaccaacacgagccctctccccaaccccaggtttctaaagaaggtgtctgtagccagccttaatcaactgggcaaggtggtccctatggtcctttccagcatttccaaatcttggactcaaattattttctcttggtgtgaccacacagcctagagaattctgagcaataggagccagggctttccctgactctgcgacagggtcaaaccaaggaatggctaaacctgtgaggttttgtcatccccgggggtactactgtagggggcattatttattaggaagcttaacaaggtaactacggcctgagtgcgtgagtgtaaggctgtgtttgtggtgggggtgtgtgtgtgtgtatctgtgcacacatacacacgtctgtgcctgtgtgtgtgtgtttgtgtgtgtgtgtgtgtgtggaattacattgatgcatttattgagaaaggtgcaagaatttcacctacacagagggacacatctgctttgttatttataatagaaagctaaattttaattttttaaaggacactgctaatgattgagaatcaagtttttagttttgctattttttttaattggtagaggatttttatatattttttccattttgttgggttgtgtccttatttatataaatactttatccgtaagaggcaaggaggaaaccttctttgcttttacatattgtggttgtcatcgtccctattttatttctggtgtgatttctctgtcttaccttctaaatgagaaaatgttttcttgtatttgtacattgtcagattctatagtttcctagataatttaaccaaattgctctatgtattattattctgtgagtataaagttctattttaatgtctgtaaatacttcagaactggcttcttttctcaaactcccactgtggggttattgtttacatcacagaaactgtagaatctctatgctcatgtactgtaaatagtgaagtgatctgcttataaataaacttaacaaatacactatggagattaaaaacaaaataccacccacaaaaaaaaaaaaaaaa

SEQ ID NO: 6001 - DNA, 6514 bp, Homo Sapiens
  NM_133265
ccaggagctgccttggcagtcacgccccttccttccgaggagctttctggctgcctaaactggtagaccccctgaattactcctccatctccgctctctttcgcctcctcttctcttagttctctccgcctccccctcaactaccaccacctccagtcagtctcgcctccggctatccgctgctccaccctctggcccggtatcctgcctgtccgctgccaccaaggagagcccggacggagcagcgaggaggggagcagccgggagttggggcttcccccctgcccatccctggccgctggcccgggaccgaagccacttgagcgagcagagagtcgtcaccttgtcttctttgccttcagggagctgctaagaaggacaaataagatagcagagtgaaagagcttttgtctccttagaaggaaggctgagaaactaaaggccagcgcaggacatctcattgccattgtcagccaggaactcgcagcctcacagccctacttcttctctgacctctggggggtccttgcccttgctacaatctccaccatccactagattgtctcctgcccgacaccccttggtcccaaaccagggagaccattcagctcacctgcctaggccgcagcagcatttccttcctaatcaggctcaccagggggatcattaccgtctctcccaacctggcctgagtcagcagcagcagcaacagcagcagcagcaccatcatcaccatcaccaccaacaacagcagcagcagcagccacagcagcagccaggagaagcctattcagctatgcctcgggctcagccatcctctgcttcttatcagccagtgccagcagacccttttgccattgtttccagagcccagcagatggttgagatcctctcagacgagaaccggaacttgaggcaagagttggaaggatgctatgagaaggtggcaagactgcagaaggtggagacagaaatccagcgcgtctcggaggcatatgagaacctcgtgaagtcatcctccaaaagagaggccctagagaaagccatgagaaacaagctagagggcgagattcggaggatgcatgatttcaacagggatctgagagagcgtctagagactgccaacaagcagcttgcagagaaggaatatgaggggtcagaggacaccagaaaaaccatctcgcagctctttgcaaaaaataaagaaagccagcgtgagaaggagaagctggaagcggagctggccactgcccgttctaccaatgaggaccaaagacgacacatcgaaatccgagatcaggccctgagtaatgcccaggccaaggtggtaaagctggaagaagagctgaaaaagaagcaagtgtacgttgacaaggtggagaagatgcagcaggcccttgtacagctccaggcagcatgtgaaaaacgtgagcagctagagcaccgtctccggacacgactggagagggaactggaatccctgagaatccagcagcgtcagggcaactgtcagcccaccaacgtttcagaatacaatgctgctgcactgatggagctccttcgggagaaagaggagaggattctggctctggaagctgatatgacaaagtgggagcagaaatatttggaggagaatgtgatgagacattttgctctggatgctgctgcaactgtggctgctcagagggacacaacagtcatcagtcactctcctaacaccagctatgacacagctctagaagctcgcatccagaaagaggaggaagaaatcttgatggccaataagcgttgccttgacatggagggcaggattaagaccctccatgcccagattattgagaaggatgccatgatcaaagtactccagcagcgttcccggaaggagccgagcaagacagagcagctgtcgtgcatgcggccagcgaagtctctgatgtccatttccaatgctggatcaggcttgctctcccactcatccaccctgactggctcccccatcatggaagaaaagcgagacgacaagagctggaaggggagcctaggcattctcctgggtggagactaccgtgctgaatatgtcccttccacaccctcgcctgtgccaccctcgactcccctgctctcggctcactccaagacaggcagccgagactgcagtacccaaactgaacgtgggacggaatcgaacaaaactgcagctgttgctcccatctctgttcctgctccagttgctgctgccgccactgctgccgccatcactgccactgctgccaccatcaccaccaccatggtagctgctgctccagttgctgttgctgctgctgctgctccagctgctgctgctgccccgtctccagccactgccgctgctactgctgctgctgtttctccagctgctgctggtcagattccagctgctgcctctgttgcctcagctgctgccgttgctccttctgctgctgctgctgctgctgttcaggttgctccagctgctccggctccagttccagctccggctctggttccggttccagctccagcagcggctcaggcttctgctcctgctcagactcaggcaccaacttcagctccggctgtggctccaactccagctccaactccaactccagctgtggctcaggctgaggttcctgcaagtccagctaccggtcctggaccacatcgtttgtctataccaagtttgacctgcaatccagacaaaacagatgggcctgtgttccactccaatactctggaaagaaaaactcccattcagatcctgggacaagagcctgatgcagagatggtggaatatctcatctaaacggccaaatcaagagctgcagattatcagcaaaaatgcttttaatcattttcccccttttattggttcttgttttgagggtgaggacaagggttgtggggaggggatgttttttaacaggactttttattggaacaatgtactacttgagtaataccatgtgaacaccagtctattttggtatgcttagggagtacctctaaagacagattaatcagaatgtgctctaaagcttattgtttgaatttatacgaatactgggactgttaacaggtggctatacatcgacgttttcaatgtgcttaaatttgtttaaattttccatattctagatcattttttattgaagagcacagtatgtgtggaagacagtgtataacacgtagtttggaagtgggaagctagagagaattgagtgtgtgctgttttgtatagttactatcctgtgcagcagctggagaaagcactcacctcaggcttacaaaagggaatagtttcaggagctatgtaagctggaaaaaaggtagggagttttggggtgcagaagggtactggagctaattttttcttccagtttcccagctaccctgccccagggaattgtgtttgtcttcatttcagtggtgctttggaaatggattcttttggttccctcctggaggttcatacattcatatatatgctctggagtaatttatgcatttggataattaatatattgctttcagatgctgggagagtacattaactgagtgatgcgcaacttcctctctcttagggaattagaccatcagaggccttgatggagagttgcatggggtgctatatgcagacttccatggtttgtgtgtagccatgaacacagcttgcttgcatttagtaagaccaatcagcttagtgtttatttcttctacagcacagattcactggctgggtctccagtctcaaattgccaatcatttgcaaagtgaggaaggatctttgttgacaggttgaatgctttgaatttctggtgactactttgaaataacttgttttgtttgtcaaattctaagcatatgtcttaaaaggcatttttgactatcacctccaagggaatagcttgagaaacccaaagtactatgctgcagtcgggggagaggtggattgcagcagtatcctcaactacctcttctcactgtcagtgacaccatcttggaatacctttgggaagcagcaggaaatgtgcatgtgggtagagatcaaaggaggcaatggctccaagccttgccatagggctgcctccaaggacacagaaggatgccagttgccacaggtccctgccctgtgtcacctgtctgcccttcattaaggtgagaaatctgcagatagcatcattaagatcagttttaaggggtatagggagggtgagggaagtggggggtgttaggtaagggttgggggtagaggttttgggatgtcttagttagaaaccagattaatagaagagtaggcctgatatattacatcatgagccatagtggtgggaaagaactttagcaatatagccctacctcctcattttagtgatgaggaatctgagaactggagaggttcagtgactttttgaaagtcatacaacacagctaaccattatgccaatcaccatgcttattttgggaaactctttatcttttttaaattccattttatgaaaaggcatcttcatggtccagggaatatgtatcttgtaaaatgtacctggttggagtagcttgtccagtcttgacaaactactgaatttctgtcttgcctctccttcagtgccttttaaaaggttttcccttttctgatctgcatttcaacatagagtcacataaatgtccccctgagaaaccaatcccacttctttctaggagattgggtatcttagataatcttttggggttcctctgtgagtataggaatggtatccttcctaattatcttccaaaggaattattttgtgtgtgtgcctgtgtgtgtgtagagacataaaggagggtgatgtgattttcagctagtcctttcacattttcaataatgaggtaatcatgttacatacacattagtcctcagttataaagtgaatctcagatagaaattaaaagtgcagttgtgttaagactctttcatactaccctttagtcataaggagaaaaaaacactcaaatagtagaagcagcaagtagcaaacttcaggagagctactttctatccaaataatttaaaaaacacttttcacctactcctttcatggttataacacattggcagactttttgctggctctgggagccatgattttaatcacattctgcaaggtgacaaatgtcatacattccacattgtgtggtagccatctctttagactcatgtgttttggggaaaggaagaagttcttggctgagtactattttgaactttccagaaccctctcacaccagagacagttcttctctgttcagtttccaatccccgataatttgctaaaataacattgtacatccaagagagggaagaagagtatgtcagtatattatgcagaagatagatacagccttttcagaagatctccactagtttttgttccaaaaattcaagtttatgggagaaatctcaattagccaccttttcacagttgtgtggatataacatttgggggatctttctggactcctacctatctgtgcattttaccggcacctcaggaaaggagggtgaccaggttgtcttagcttgtactgcttggtgatctctgaggaccttctaattcagttgtaccccagtgttccatgtatagaaaaacttcattagaacaaactttacttgatatgaaactcctattaacagtctttttttgaaataaaaagtagcttgagctttcttttaaaatcatgtatcttgattgttgatttaatgaaggatttccttttaatgctgcttttgagcttcaaggtaataggacagcaggaacctaaaatatctgccatcatctgccataggaaagatacccagagacccatcatgttctctttttgttgttacactgttgggtgggtataacaattggaaaatgaacaaactgattgattgtgcaaactactttttatgacaagcctaaaccctcataatgcggcagcttaaagtgtatacatatgcactaactttgatcaattatattctcatatctgttagctacacagtctcctattatctcaattgcttatgtgcatatggaatatgttacttaaaacgtgtgcattcttactgaaaatgttttcaaaggaaggtatcagctgtgggctaattgccaccaatttcagcctgccacgattcttggaaatatgtcttccaagtgccatccatcatcagtaggacaagtgtcgggagtttgtttatttttttccagtagcaacgatgggttacatggagccatgaaacctccttctggcctcccttgtgattaatggcatgtgtttgtaaaatggatagctggggttggcagatggctagagaagaatcgcctttggtttaaaatgtatgtggtcccctaatgattgtgaccccattctgtaatcaactgagctagttccaataaagttaagcaggtttaaatccactttgtgcctatcttttcactgacaataaagttagctattttaaaatgca

SEQ ID NO: 6002 - DNA, 1383 bp, Homo Sapiens
  NM_133271
tccacccaagagcaacctggaactaagttattcggcaacgaactgttccactttgttgtgaggcaatagatgtggaaattccctgacgaggggctctgtcctcatacttcctgcggagcttattgtcgtaagaatatctgtcatcctgctaatgtgcattgaaaggagagcaacggggctgaggccgtgtcagcacgatggaccccaaacagaccaccctcctgtgtcttgtgctctgtctgggccagaggattcaggcacaggaaggggactttcccatgcctttcatatctgccaaatcgagtcctgtgattcccttggatggatctgtgaaaatccagtgccaggccattcgtgaagcttacctgacccagctgatgatcataaaaaactccacgtaccgagagataggcagaagactgaagttttggaatgagactgatcctgagttcgtcattgaccacatggacgcaaacaaggcagggcgctatcagtgccaatataggatagggcactacagattccggtacagtgacaccctggagctggtagtgacagactccatccaccaagattacacgacgcagaacttgatccgcatggccgtggcaggactggtcctcgtggctctcttggccatactggttgaaaattggcacagccatacggcactgaacaaggaagcctcggcagatgtggctgaaccgagctggagccaacagatgtgtcagccaggattgacctttgcacgaacaccaagtgtctgcaagtaaacacctggaggtgaaggcagagaggagccaggactgtggagtccgacaaagctacttgaaggacacaagagagaaaagctcactaagaagcttgaatctacttttttttttttttgagacagagtctggctctgtcacccaggctggagtgcagtggagcaatctcggctcattgaacctcttgggttcaagtgattcttgtgcctcagcctcccaagtagctggaattacaggcacataccactgcacccagctaatttttgtatttttagtagagatggggtttcactgtgttggccaggctggtctcgaactcctgacctcaggtgatccacccaccttggcctcccaaagtgctgagattataggcatgagccaccacgcctggccagatgcatgttcaaaccaatcaaatggtgttttcttatgcaggactgatcgatttgcacccacctttctgcacataagttatggttttccatcttatctgtcttctgattttttatatcctgtttaatttcttccttcattgttcttctctttttttatttattttatttatttttatttttatttttatttgagacagagtctcactctgttgcccagg

SEQ ID NO: 6003 - DNA, 1267 bp, Homo Sapiens
  NM_133280
tccacccaagagcaacctggaactaagttattcggcaacgaactgttccactttgttgtgaggcaatagatgtggaaattccctgacgaggggctctgtcctcatacttcctgcggagcttattgtcgtaagaatatctgtcatcctgctaatgtgcattgaaaggagagcaacggggctgaggccgtgtcagcacgatggaccccaaacagaccaccctcctgtgtcttggggactttcccatgcctttcatatctgccaaatcgagtcctgtgattcccttggatggatctgtgaaaatccagtgccaggccattcgtgaagcttacctgacccagctgatgatcataaaaaactccacgtaccgagagataggcagaagactgaagttttggaatgagactgatcctgagttcgtcattgaccacatggacgcaaacaaggcagggcgctatcagtgccaatataggatagggcactacaggttccggtacagtgacaccctggagctggtagtgacaggcttgtatggcaaacccttcctctctgcagatcggggtctggtgttgatgccaggagagaatatttccctcacgtgcagctcagcacacatcccatttgatagattttcactggccaaggagggagaactttctctgccacagcaccaaagtggggaacacccggccaacttctctttgggtcctgtggacctcaatgtctcagggatctacaggtgctacggttggtacaacaggagcccctacctgtggtccttccccagtaatgccttggagcttgtggtcacaggtaggtaccgcccagtccagccctgtgtctgggttggctgtccagggccttgccaccgggcaggaatatgaagacgtgcactgagagtgaagtgaagagaggcaaaggctctcactccaggacagtggagagagaaaggcttccccaccacactttccgctttcacttcctcgctagagttctccagacagggttcattgaaaacttagtctgtggagaacagaagggctaactcagtttgtttcattttatttatttcattttattttccgggatagagtcttgctctttcgccaaggctggagtgcagtggcacgatctcgactcactgcaaccttcgcctcccaggagaatcacttgaacccaggaggcagctgttgcagtgagccaagatcacgccattgcactccagcctgggtgacagaacgagactccacctcaagaaaaaaaaaaaaaa

SEQ ID NO: 6004 - DNA, 1686 bp, Homo Sapiens
  NM_133325
ggcggcggcggcagcggcggcggcggccgggacaaggcggaggcgacggcggcggcggcggcgcggggcgctcgggctgatggcggcggcggccgggcccggggctgcgctgtccccgcggccgtgcgacagcgacccagccacccccggagcgcagtccccgaaggatgataatgaagataattcaaatgatgggacccagccatccaaaaggaggcgaatgggctcaggagatagttctaggagttgtgaaacttcaagtcaagatcttggttttagttactatccagcagaaaacttgatagagtacaaatggccacctgatgaaacaggagaatactatatgcttcaagaacaagtcagtgaatatttgggtgtgacctcctttaaaaggaaatatccagagcgacgagatttgtctcacaaggagaaactctacctgagagagctaaatgtcattactgaaactcagtgcactctaggcttaacagcattgcgcagtgatgaagtgattgatttaatgataaaagaatatccagccaaacatgctgagtattctgttattctacaagaaaaagaacgtcaacgaattacagaccattataaagagtattcccaaatgcaacaacagaatactcagaaagttgaagccagtaaagtgcctgagtatattaagaaagctgccaaaaaagcagcagaatttaatagcaacttaaaccgggaacgcatggaagaaagaagagcttattttgacttgcagacacatgttatccaggtacctcaagggaagtacaaagttttgccaacagagcgaacaaaggtcagttcttacccagtggctctcatccccggacagttccaggaatattataagaggtactcaccagatgagctgcggtatctgccattaaacacagccctgtatgagccccctctggatcctgagctccctgctctagacagtgatggtgattcagatgatggcgaagatggtcgaggtgatgagaaacggaaaaataaaggcacttcggacagctcctctggcaatgtatctgaaggggaaagccctcctgacagccaggaggactctttccagggaagacagaaatcaaaagacaaagctgccactccaagaaaagatggtcccaaacgttctgtactgtccaagtcagttcctgggtacaagccaaaggtcattccaaatgctatatgtggaatttgtctgaagggtaaggagtccaacaagaaaggaaaggctgaatcacttatacactgctcccaatgtgagaatagtggccatccttcttgcctggatatgacaatggagcttgtttctatgattaagacctacccatggcagtgtatggaatgtaaaacatgcattatatgtggacaaccccaccatgaagaagaaatgatgttctgtgatatgtgtgacagaggttatcatactttttgtgtgggccttggtgctattccatcaggtcgctggatttgtgactgttgtcagcgggcccccccaacacccaggaaagtgggcagaagggggaaaaacagcaaagagggataaaatagtttttgactctaatactgtatatgcatttaagtggaatatttggtgccatttacaacattattttcatgccaataaaagattttttttgcaaaaaaaaaaaaaaaaaaaaa

SEQ ID NO: 6005 - DNA, 6821 bp, Homo Sapiens
  NM_133337
gccctgggagaaatcctcccttcactgggagagaacttctctcccagggcggtgcgacccggagctccagcgcccgagtctccacttcgtttgctgaaacttgctttctaccagctaagaaccatgctgcgagtgattgtggaatctgccagcaatatccctaaaacgaaatttggcaagccggatcctattgtttctgtcatttttaaggatgagaaaaagaaaacaaagaaagttgataatgaattgaaccctgtctggaatgagattttggagtttgacttgaggggtataccactggacttttcatcttcccttgggattattgtgaaagattttgagacaattggacaaaataaattaattggcacggcgactgtagccctgaaggacctgactggtgaccagagcagatccctgccgtacaagctgatctccctgctaaatgaaaaagggcaagatactggggccaccattgacttggtgatcggctatgatccgccttctgctccacatccaaatgacctgagcgggcccagcgtgccaggcatgggaggagatggggaagaagatgaaggtgatgaagacaggttggacaatgcagtcaggggccctgggcccaaggggccagttgggacggtgtcggaagctcagcttgctcggaggctcaccaaagtaaagaacagccggcggatgctgtcaaataagccacaggacttccagatccgcgtccgagtgattgagggccgacagttaagtggtaacaacataaggcctgtggtcaaagttcacgtctgtggccagacacaccgaacaagaatcaagagaggaaacaaccctttttttgatgagttgtttttctacaatgtcaacatgaccccttctgaattgatggatgagatcatcagcatccgggtttataattctcactctctgcgggcagattgtctgatgggggaatttaagattgatgttggatttgtttatgatgaacctggccatgctgtcatgagaaagtggcttcttctcaatgacccggaagataccagttcaggttctaaaggttatatgaaagtcagcatgtttgtcctgggaaccggagatgagcctcctcctgagagacgagatcgtgataatgacagtgatgatgtggagagtaatttgttactccctgctggcattgccctccggtgggtgaccttcttgctgaaaatctaccgagctgaggacatcccccagatggatgatgccttctcacagacagtaaaggaaatatttggaggcaatgcagataagaaaaatctcgtggatccttttgtagaagtttcctttgctggaaaaaaggtttgtacaaacataattgagaaaaatgcaaacccagagtggaatcaggtcgtcaatcttcagatcaagtttccttcagtgtgtgaaaaaataaaactaacaatatatgactgggaccgtcttactaaaaatgatgtagttggaacaacatatctacacctctctaaaattgctgcctctggtggggaagtggaagtaaacacaggagaaacagaggtaggctttgttccaacgtttggaccttgttacctgaatctttatggaagccccagagagtacacgggattcccagacccctatgatgagctgaatactggaaagggggaaggagttgcctacagaggcaggatcttggttgaattagccacttttcttgagaagacaccaccagataaaaagcttgagcccatttcaaatgatgacctgctggttgttgagaaataccagcgaaggcggaagtacagcctgtctgccgtgtttcattcagccaccatgttgcaagatgttggtgaggccattcagtttgaagtcagcattgggaactatggcaacaagtttgacaccacctgtaagcctttggcatcaacaactcagtacagccgtgctgtatttgatggcaactactattattacttgccttgggcccacaccaagccagttgttaccctgacttcatactgggaggatattagtcatcgcctggatgcggtgaacactctcctagctatggcagaacggctgcaaacaaatatagaagctctaaaatcagggatacaaggtaaaattcctgcaaaccagctggctgaattgtggctgaagctgatagatgaagttatagaagacacgagatacacgttgcctctcacagaaggaaaagccaacgtcacagttctcgatactcagatccgaaagctgcggtccaggtctctctcccaaatacatgaggcggctgtgaggatgaggtcggaagccacagatgtgaagtccacactggcagaaattgaggactggcttgataaattaatgcagctgactgaagagccacagaacagcatgcctgacatcatcatctggatgatccggggagagaagagactggcctatgcacgaattcccgcacatcaggtcttgtactccaccagtggtgagaatgcatctggaaaatactgtgggaaaacccaaaccatctttctgaagtatccacaggagaaaaacaacgggccaaaggtgcctgtggagttgcgagtgaacatctggctaggcttaagtgctgtggagaagaagtttaacagcttcgcagaaggaactttcaccgtctttgctgaaatgtatgaaaatcaagctctcatgtttggaaaatggggtacttctggattagtaggacgtcataagttttctgatgtcacaggaaaaataaaactcaagagggaattttttctgcctccaaaaggctgggaatgggaaggagagtggatagttgatcctgaaagaagcttgctgactgaggcagatgcaggtcacacggagttcactgatgaagtctatcagaacgagagccgctaccccgggggcgactggaagccggccgaggacacctacacggatgcgaacggcgataaagcagcatcacccagcgagttgacttgtcctccaggttgggaatgggaagatgatgcatggtcttatgacataaatcgagcggtggatgagaaaggctgggaatatggaatcaccattcctcctgatcataagcccaaatcctgggttgcagcagagaaaatgtaccacactcatagacggcgaaggctggtccgaaaacgcaagaaagatttaacacagactgcttcaagcaccgcaagggccatggaggaattgcaagaccaagagggctgggaatatgcttctctaattggctggaaatttcactggaaacaacgtagttcagataccttccgccgcagacgctggaggagaaaaatggctccttcagaaacacatggtgcagctgccatctttaaacttgaaggtgcccttggggcagacactaccgaagatggggatgagaagagcctggagaaacagaagcacagtgccaccactgtgttcggagcaaacacccccattgtttcctgcaattttgacagagtctacatctaccatctgcgctgctatgtctatcaagccagaaacctcttggctttagataaggatagcttttcagatccatatgctcatatctgtttcctccatcggagcaaaaccactgagatcatccattcaaccctgaatcccacgtgggaccaaacaattatattcgatgaagttgaaatctatggggaaccccaaacagttctacagaatccacccaaagttatcatggaactttttgacaatgaccaagtgggcaaagatgaatttttaggacgaagcattttctctcctgtggtgaaactgaactcagaaatggacatcacacccaaacttctctggcacccagtaatgaatggagacaaagcctgcggggatgttcttgtaactgcagagctgattctgaggggcaaggatggctccaaccttcccattcttccccctcaaagggcgccaaatctatacatggtcccccaggggatcaggcctgtggtccagctcactgccattgagattctagcttggggcttaagaaatatgaaaaacttccagatggcttctatcacatcccccagtcttgttgtggagtgtggaggagaaagggtggaatcggtggtgatcaaaaaccttaagaagacacccaactttccaagttctgttctcttcatgaaagtgttcttgcccaaggaggaattgtacatgcccccactggtgatcaaggtcatcgaccacaggcagtttgggcggaagcctgtcgtcggccagtgcaccatcgagcgcctggaccgctttcgctgtgacccttatgcagggaaagaggacatcgtcccacagctcaaagcctcccttctgtctgccccaccatgccgggacatcgttatcgaaatggaagacaccaaaccattactggcttctaagctgacagaaaaggaggaagaaatcgtggactggtggagtaaattttatgcttcctcaggggaacatgaaaaatgcggacagtatattcagaaaggctattccaagctcaagatatataattgtgaactagaaaatgtagcagaatttgagggcctgacagacttctcagatacgttcaagttgtaccgaggcaagtcggatgaaaatgaagatccttctgtggttggagagtttaagggctcctttcggatctaccctctgccggatgaccccagcgtgccagcccctcccagacagtttcgggaattacctgacagcgtcccacaggaatgcacggttaggatttacattgttcgaggcttagagctccagccccaggacaacaatggcctgtgtgacccttacataaaaataacactgggcaaaaaagtcattgaagaccgagatcactacattcccaacactctcaacccagtctttggcaggatgtacgaactgagctgctacttacctcaagaaaaagacctgaaaatttctgtctatgattatgacacctttacccgggatgaaaaagtaggagaaacaattattgatctggaaaaccgattcctttcccgctttgggtcccactgcggcataccagaggagtactgtgtttctggagtcaatacctggcgagatcaactgagaccaacacagctgcttcaaaatgtcgccagattcaaaggcttcccacaacccatcctttccgaagatgggagtagaatcagatatggaggacgagactacagcttggatgaatttgaagccaacaaaatcctgcaccagcacctcggggcccctgaagagcggcttgctcttcacatcctcaggactcaggggctggtccctgagcacgtggaaacaaggactttgcacagcaccttccagcccaacatttcccagggaaaacttcagatgtgggtggatgttttccccaagagtttggggccaccaggccctcctttcaacatcacaccccggaaagccaagaaatactacctgcgtgtgatcatctggaacaccaaggacgttatcttggacgagaaaagcatcacaggagaggaaatgagtgacatctacgtcaaaggctggattcctggcaatgaagaaaacaaacagaaaacagatgtccattacagatctttggatggtgaagggaattttaactggcgatttgttttcccgtttgactaccttccagccgaacaactctgtatcgttgcgaaaaaagagcatttctggagtattgaccaaacggaatttcgaatcccacccaggctgatcattcagatatgggacaatgacaagttttctctggatgactacttgggtttcctagaacttgacttgcgtcacacgatcattcctgcaaaatcaccagagaaatgcagattggacatgattccggacctcaaagccatgaacccccttaaagccaagacagcctccctctttgagcagaagtccatgaaaggatggtggccatgctacgcagagaaagatggcgcccgcgtaatggctgggaaagtggagatgacattggaaatcctcaacgagaaggaggccgacgagaggccagccgggaaggggcgggacgaacccaacatgaaccccaagctggacttaccaaatcgaccagaaacctccttcctctggttcaccaacccatgcaagaccatgaagttcatcgtgtggcgccgctttaagtgggtcatcatcggcttgctgttcctgcttatcctgctgctcttcgtggccgtgctcctctactctttgccgaactatttgtcaatgaagattgtaaagccaaatgtgtaacaaaggcaaaggcttcatttcaagagtcatccagcaatgagagaatcctgcctctgtagaccaacatccagtgtgattttgtgtctgagaccacaccccagtagcaggttacgccatgtcaccgagccccattgattcccagagggtcttagtcctggaaagtcaggccaacaagcaacgtttgcatcatgttatctcttaagtattaaaagttttattttctaaagtttaaatcatgtttttcaaaatatttttcaaggtggctggttccatttaaaaatcatctttttatatgtgtcttcggttctagacttcagcttttggaaattgctaaatagaattcaaaaatctctgcatcctgaggtgatatacttcatatttgtaatcaactgaaagagctgtgcattataaaatcagttagaatagttagaacaattcttatttatgcccacaaccattgctatattttgtatggatgtcataaaagtctatttaacctctgtaatgaaactaaataaaaatgtttcacctttaaaaaaaaaaaaaaaaaa

SEQ ID NO: 6006 - DNA, 2666 bp, Homo Sapiens
  NM_133340
caagtgaattcatggtattttacttttttgggaaatactggaaatgaagacctgcaactgtaatttgaaataaggaaaactttaattttcagtataaaaattgctcaaatagaattgcctgattttaatgacaaaaggtaacagactgggttgacccatcatttgatgattttctagagtgtagtggcgtctctactattactgccacatcattaggtgtgaataactcaagtcatagaagaaaaaatgggccttctacattagaaagcagcagatttccagcgagaaaaagaggaaatctatcttccttagaacagatttatggtttagaaaattcaaaagaatatctgtctgaaaatgaaccatgggtggataaatataaaccagaaactcagcatgaacttgctgtgcataaaaagaaaattgaagaagtcgaaacctggttaaaagctcaagttttagaaaggcaaccaaaacagggtggatctattttattaataacaggtcctcctggatgtggaaagacaacgaccttaaaaatactatcaaaggagcatggtattcaagtacaagagtggattaatccagttttaccagacttccaaaaagatgatttcaaggggatgtttaatactgaatcaagcttccatatgtttccctatcagtctcagatagcagttttcaaagagtttctactaagagcgacaaagtataacaagttacaaatgcttggagatgatctgagaactgataagaagataattctggttgaagatttacctaaccagttttatcgggattctcatactttacatgaagttctaaggaagtatgtgaggattggtcgatgtcctcttatatttataatctcggacagtctcagtggagataataatcaaaggttattgtttcccaaagaaattcaggaagagtgttctatctcaaatattagtttcaaccctgtggcaccaacaattatgatgaaatttcttaatcgaatagtgactatagaagctaacaagaatggaggaaaaattactgtccctgacaaaacttctctagagttgctctgtcagggatgttctggtgatatcagaagtgcaataaacagcctccagttttcttcttcaaaaggagaaaacaacttacggccaaggaaaaaaggaatgtctttaaaatcagatgctgtgctgtcaaaatcaaaacgaagaaaaaaacctgatagggtttttgaaaatcaagaggtccaagctattggtggcaaagatgtttctctgtttctcttcagagctttggggaaaattctatattgtaaaagagcatctttaacagaattagactcacctcggttgccctctcatttatcagaatatgaacgggatacattacttgttgaacctgaggaggtagtagaaatgtcacacatgcctggagacttatttaatttatatcttcaccaaaactacatagatttcttcatggaaattgatgatattgtgagagccagtgaatttctgagttttgcagatatcctcagtggtgactggaatacacgctctttactcagggaatatagcacatctatagctacgagaggtgtgatgcattccaacaaagcccgaggatatgctcattgccaaggaggaggatcaagttttcgacccttgcacaaacctcagtggtttctaataaataaaaagtatcgggaaaattgcctggcagcaaaagcactttttcctgacttctgcctaccagctttatgcctccaaactcagctattgccataccttgctctactaaccattccaatgagaaatcaagctcagatttcttttatccaagatattggaaggctccctctgaagcgacactttggaagattgaaaatggaagccctgactgacagggaacatggaatgatagaccctgacagcggagatgaagcccagcttaatggaggacattctgcagaggaatctctgggtgaacccactcaagccactgtgccggaaacctggtctcttcctttgagtcagaatagtgccagtgaactgcctgctagccagccccagcccttttcagcccaaggagacatggaagaaaacataataatagaagactacgagagtgatgggacatagaagccagcctgctaatcagattgctacttcacagcttcatttttgtttcattcagtggtacttcagcagagttaatatgcttttctgatgaattacacaacagtttgttaattcttcattcttgtagtatttcatcacaagaaacctactcttctgtcatcttgaagtaaatagaagatcaagccttcaaatctcttaattttttcggtatttattaaatctgtgagtggtttaaggagcggtcagtgtgtataaagtgtgtttgaacattatgccaaatatcaagatgtgaaggactaattcaggatgcaaaaacgttattggggggttgtaaatatcaactattcaacagtttaggatgcaattacgagtgtaaactgtgtgccttatttacactttattgtctcccgcttctcagatagttttgatgtgttgtacagtggaatatcttagatactttttggaaagtatttacataagttatatcacaattaaaatgttgaatttaaaaaaaaaaaaaaaaaa

SEQ ID NO: 6007 - DNA, 4758 bp, Homo Sapiens
  NM_133367
cccgagccgagcccgccgcggtcacagccacccgcgggaagctcgtggccgggaccccgaggcgggagcgcgggctgggccgggctgggctacgcgcacgggctcggccgccgcccctgccggttgcataccctgtcctgagggcgcggcacggagtgcatgcgggccgctgccatgacgaccgccatcttggagcgcctgagcaccctgtcggtcagcgggcagcagctgcgccgcctgcccaagatcctggaggatgggcttcccaagatgccttgcactgtcccagaaacggatgtgccccagctcttccgggagccttacatccgcaccggctaccgccccacggggcacgagtggcgctactacttcttcagcctctttcagaaacacaacgaggtggtcaacgtctggacccatttactggcagccctggccgtcctcttgcgattctgggcctttgccgaggctgaggccttgccatgggcgtctacccactccctgcctctgctcctcttcatcctgtcgtcaatcacttacctcacctgcagccttctggcccacctgctgcagtccaagtcagagctctcccactacaccttctactttgtggactatgttggcgtgagcgtttaccaatatggcagtgctttggctcatttcttctacagctctgaccaggcctggtatgaccggttctggcttttcttcttgccagcagctgccttctgtggctggttatcttgtgctggctgttgctatgccaaatatcgttaccggaggccttatccagtcatgaggaagatctgtcaagtggtgccagcaggtctggcttttatcctagacatcagccctgtggcacaccgtgtggcgctctgtcacctggctggctgccaggagcaagcagcctggtaccacaccctccagatcctcttcttcctggttagcgcttatttcttctcctgccccgtgcctgagaagtacttcccgggttcctgtgacatcgtgggccatgggcatcagatcttccatgcatttctgtccatctgtacgctctcccagctggaggccatcctcctggactaccaggggcggcaggagatcttcctgcagcgccatggacccctatctgtccacatggcctgcctctccttcttcttcctggctgcctgcagtgctgccaccgcagcccttctgaggcacaaagtcaaggccagactgaccaagaaagattcctgaggctggcaagtggggcaacgtgtggaggaagcccctcataatttggagaaaacttgatacaatagaagctgacttttaaggcattggcttttaaattaatacatatatccaaggatatgttatagctgcagtgtttgaaagccaaaggatttaagagttttgttgttgttaataaaaggaatactccttttccttttggatcatagcttaacaaggcacaggaagggaagggatcttgactaagattcatgagacattgaattaaggagaatcatcttcatgcctgaaaatttagcaaaattccgactatggcctccaggggcaattcctaaaagctgaatggataataaaattggactggaaagtaagtaggtggctggtcctcaccctgttggaatggctatcctactatgctgttctttggtaatggaataaattgacccaaggaccgaatttcatttggatttcaaattgtccagagtggaaaagccttcaagatgacatgatgaattactcagttcatctgatttctggtccctcctttctcgacaactataatactaacccttttctcaggataactgtctacacctggcagttttctctgacgtgctgttcactcacatccctaccttgcatggtaatataaaggactaggaagcagtcatacttccaggaaatgcttggattcatgtggacattcaggaagcttattctcatataatactaatctaaacagtactagaaattacagtgccaagagccaccaggaggcccagccaataagcatagatactatatggtatcatgggacccatctattttttaccagtggactacaggattacttgagagttatcagggctgcctaacagaccaggagatctgggggttgcaccagggaatcgccatatttgaccagcatgttttaaaagctcttggtaggattagttggttctaaggatccctctagggacctcattatttcaagaggaacccaaagtccagcctcctacatagatgctgccccacgaaggacccacaaaactaacctagttcagggttctcaggcaggcagttctgcttcagcttagagcagaacccataaaatactcaagtactgggataggcaagcatgtgtgtttactgtggattggtccctgaaggctcctttgggtgagaacatgtgaaccaggcaccctggtttgtttggagcattgctgcccagaagcttctatgggataggtggtgcttgggattgatgtgttgtggccatgcagccctccctgaggattgacttctgcactaatccagtgaaggaggctgtgtcaaaagaagggctcagaagccctcttttcagaggcaatgattcctgtcagtatgaggtcccttagttactaaaaagggacatgatttaactccagtttgatgaacctcctccgagtttactttattgtcttcaaatcttttgttttcttcctttttgtgagatttgtgggttttgtgccttataaatggaaatgtatgaacacaatatatgctcatgtagaattttctgttctgggttattgggataagaaaaaatatatattgctcttcaactagtgaatgaaagaaacttcagaaagctagaattgcttatcaatcaaaagactttctcaatctattttggccacaaacaaacatattcaactgaagctttccaataatctttatatcaagaaagcatgcgtcttgtcagctacattgttttcttagatggatttctcctgttaatcctcaaatatctgaacttctgtgttacccaagtgtcttatacaagcttctggtgtctaggacaaatttatggcaaataaaattagcaaaactgaactgggttgaactgaacaagaggatgggggaattgtgcaaatacgttgttagtagaaggtcaatttaaaatagggactagaaattatttgaagttttctttattacggattcaaagacttattttgaaagttggaaggagaagggagggaagagagcagaagggaagaaggtgtaagtcaagctcttgaatataactggtggtattgtgggcagagatctttagttcaaatccacgtattttttaaaagagagaaccggaggtagagcaatgatcagatgggtgcacagaccagtgccaatctgaacattgttaatggcctgtgacatgatgagcacaggaacaggcatgaagatattgccatacaattttaatttatacaagtattggcccctcaagtggttggaaattttttttttaatctctttttctgagacagggtcttactctgtcgcccaggctggagtgcagtgatgcaatcacggctcactgcagcctcgacctccccagctcaagcaatcctcccacctcagcctcctaagtacctggtactacaggcgcgtgccaccacacctggctaatttttgcattttttgtagagacagggttttgccacgttgcttaggctggtcttgaactcctgaactcaagtgatccgcccacctcagcctcccaaagtgttgggattacagacattagccatcacgcctgccctagaaacagttttttaataggagatatttgagaggcattgaggtaggagactctatgacatgccctcagaatatcagaatcttcttagaaataaactaggaaatgcagatgtttttaactactcagacttttgaggaattaatccttttaaaacatttttgttaaagttagtgtatcagtaagaaacagacctagtttaaaaggaataatcaacaattttataaaggagatggcttattcaaccatagcccctccaacatatctactggaaattctgctggttaactttatctctctctctcttaatttagactttcaacctatgaaaatgtaaatacctttgaaaaaactaaactatcagtcatttacatcctctcatgaatgaaatgcagtgtagggagaggagatggcaggacacagcaaacaggacacatttgcctgcttctctcttgcctaattcttcctgacctgtatttactgatgcttaataatacttgtaagactctaggggttcatttcccatttcagcggaaagtacttcactcaacaacaatattctcaagagtcttctactggaagctagaaagaaataggaatttaagtccatagaatgaaggtagttattcctgcctgtgttgcccacctgttcacaaaaagtacctttatgcttgaaaacattaggttctttggttactgcactgtagtttcaaatggatcctccagatggcattcatgtcttactcagaaagggcactgccattgtccccaaggcttctgtctactaattctattggtcttgtgttttgcttgcttggcaaaaaaaaaaaaaaaaaaaaaaaaaaaaaaaatggagctattttctgtctatataaatctacttatatgaataaccattaaagtgattttgtatatgcaaaaaaaaaaaaaaaaaaaaa

SEQ ID NO: 6008 - DNA, 2084 bp, Homo Sapiens
  NM_133368
ctctgcgcgtaatggcagcgccgtggcctcgcgtccatctttgccgttctctcggacctgtcacaaaggagtcgcgccgccgccgccgccccctccctccggtgggcccgggaggtagagaaaaactgccattggatgtccagaatcccctgtagttgataatgttgggaataagctctgcaactttctttggcattcagttgttaaaaacaaataggatgcaaattcctcaactccaggttatgaaaacagtacttggaaaactgaaaactacctaaatgatcgtctttggttgggccgtgttcttagcgagcagaagccttggccagggtctgttgttgactctcgaagagcacatagcccacttcctagggactggaggtgccgctactaccatgggtaattcctgtatctgccgagatgacagtggaacagatgacagtgttgacacccaacagcaacaggccgagaacagtgcagtacccactgctgacacaaggagccaaccacgggaccctgttcggccaccaaggaggggccgaggacctcatgagccaaggagaaagaaacaaaatgtggatgggctagtgttggacacactggcagtaatacggactcttgtagataatgatcaggaacctccctattcaatgataacattacacgaaatggcagaaacagatgaaggatggttggatgttgtccagtctttaattagagttattccactggaagatccactgggaccagctgttataacattgttactagatgaatgtccattgcccactaaagatgcactccagaaattgactgaaattctcaatttaaatggagaagtagcttgccaggactcaagccatcctgccaaacacaggaacacatctgcagtcctaggctgcttggccgagaaactagcaggtcctgcaagtataggtttacttagcccaggaatactggaatacttgctacagtgtctgaagttacagtcccaccccacagtcatgctttttgcacttatcgcactggaaaagtttgcacagacaagtgaaaataaattgactatttctgaatccagtattagtgaccggcttgtcacattggagtcctgggctaatgatcctgattatctgaaacgtcaagttggtttctgtgcccagtggagcttagacaatctctttttaaaagaaggtagacagctgacctatgagaaagtgaacttgagtagcattagggccatgctgaatagcaatgatgtcagcgagtacctgaagatctcacctcatggcttagaggctcgctgtgatgcctcctcttttgaaagtgtgcgttgcaccttttgtgtggatgccggggtatggtactatgaagtaacagtggtcacttctggcgtcatgcagattggctgggccactcgagacagcaaattcctcaatcatgaaggctacggcattggggatgatgaatactcctgtgcgtatgatggctgccggcagctgatttggtacaatgccagaagtaagcctcacatacacccatgctggaaagaaggagatacagtaggatttctgttagacttgaatgaaaagcaaatgatcttctttttaaatggcaaccagctgcctcctgaaaagcaagtcttttcatctactgtatctggattttttgctgcagctagtttcatgtcatatcaacaatgtgagttcaattttggagcaaaaccattcaaatacccaccatctatgaaatttagcacttttaatgactacgccttcctaacagctgaagaaaaaatcattttgccaaggcacaggcgtcttgctctgttgaagcaagtcagtatccgagaaaactgctgttccctttgttgtgatgaggtagcagacacacaattgaagccatgtggacacagtgacctgtgcatggattgtgccttgcagctggagacctgcccattgtgtcgtaaagaaatagtatctagaatcagacagatttctcatatttcatgacacatgtgaagaggcatcgtggacttttttctactcaattccagccaatgttgaaaagaaaaaaaaaaaaaaaaa

SEQ ID NO: 6009 - DNA, 9133 bp, Homo Sapiens
  NM_133374
ggcggcggcggcggcggcggcggcggcattgtgcgcgcaccagcagcccggcccgggaggagcaggacgcgccggggccgcctcctcccgcacggacccatgaaccagccgggcggcgcggcggctccgcaggctgacggagccagtgcagccggaaggaaaagcactgcgagcagggagcgcttgaagcgcagccagaagagcaccaaggtggagggcccagagccagtgccagccgaggcctcgctgagtgccgagcaaggaacgatgacggaggtgaaggtgaagacagagctgcccgatgactacatccaggaggtgatctggcagggcgaggccaaggaggagaagaaggcggtcagcaaggatgggaccagcgacgtgcctgccgagatctgcgtggtgatcggcggcgtccgcaaccagcagacccttgggtcttacgaatgcggaatctgtggcaagaagtacaagtattacaactgcttccagacccacgtgcgggcgcaccgagacaccgaagccacctcaggggagggagcctcccaaagcaacaatttcaggtacacatgtgatatctgcgggaagaagtacaaatactacagctgtttccaagagcaccgagacctgcacgcagtggatgtgtttagtgtggaaggggcccctgagaaccgggcagaccccttcgaccaaggtgtcgtggccacggacgaggtgaaggaggagcccccggagccattccagaaaatcgggccaatgaacaatattacatcagacatttttaagaagaaagaagttaggcagtgccaaaagagagaaactggcaattacacctgtgaattctgcggcaaacagtacaagtactacactccctaccaggagcatgtggccttacacgcccccatcaaaagcgctttcagtcggagagtagaaggcaaagcacaaaaccactttgaagagacgaacagcagttcgcagaactccagcgaaccctacacctgcggcgcctgtgggatccagttccagttctacaacaacctgttggagcacatgcagtcccatgcagctgacaatgaaaacaacattgcctccaaccagtcccgatcgccacctgctgttgtagaagagaagtggaaacctcaggcccagaggaacagtgccaataacaccactaccagtggtttaacacccaacagcatgatccccgaaaaggagcggcagaacatcgcagagcggctgttgagggtcatgtgtgccgacctgggtgcactgagcgtggtcagcgggaaggagttcctgaagttggcccagaccttagtagacagtggtgcccgctatggggccttctcggtcactgaaatcctgggcaacttcaacacgctggcgctgaagcacctgccacgcatgtacaaccaggtgaaggtgaaagtgacctgtgccttgggcagcaatgcctgcctaggcatcggtgtcacctgccactcccagagtgttggccctgactcctgctacatcctcacagcctaccaggccgagggcaaccacatcaagagctatgtgcttggtgtgaagggtgcggacattcgcgacagcggtgaccttgtgcaccactgggtgcagaacgtgctgtcggagttcgtgatgtcggagatcaggacagtgtacgtgacggattgccgggtgagcacgtccgccttctccaaggccggcatgtgccttcgctgctcagcctgtgccttgaactcggtggtgcagagcgtgctgagcaagcggacactgcaggcccgcagcatgcacgaggtcatcgagctgctcaacgtgtgcgaggacctggcgggctccacgggcctggccaaggagaccttcgggtcgctggaggagacgtctccaccaccctgctggaactcggtgacggactcactgttgctggtgcatgagcgctatgagcagatctgcgagttctacagccgggccaagaagatgaacctcatccagagcctcaacaagcacctgctcagcaacctggcggccatcctgacgccggtgaagcaggcagtcatcgagctgagcaacgagagccagcccaccctgcagctggtgctgcccacctacgtcaggctggagaagctgttcacggccaaggccaacgacgcaggcactgtcagcaagctctgccacctcttcctggaggcgctcaaggagaacttcaaggtgcacccggcccacaaggtggccatgatcctggacccgcagcagaagctgcggcctgtgccaccctaccagcacgaggagatcatcggcaaggtctgtgagctcatcaacgaggtgaaggagtcctgggccgaggaggccgacttcgagcccgctgccaagaagccccgctctgctgccgtcgagaaccccgcagctcaggaagatgatcggctaggcaaaaatgaagtgtacgattacctgcaggagcccctcttccaggctacccctgatctcttccagtactggtcgtgcgttacccaaaagcacacaaaactcgccaagctcgccttctggctcctggcggttccggccgtgggcgccagaagcgggtgtgtaaatatgtgtgaacaagcgcttctaatcaaacggaggcggctgctcagtccagaagatatgaataaactcatgtttctgaaatccaacatgctttaagacttgacttcgggggaaaaaaaaagaaaaagagaagataacattagaaaaaaaccacacaacactgtcacaaagaaaaggaatttaagttctaaacactgtggacctcattataaatgccccctggaaacttaagtgctttttttatatgtgtgtgtgtgcgtgtatgtacacagccacacgtgtgtgcacgtgtctgaacacgtgctgtggttgtgggggtgtgggggggtctctgtgctcatctccatggccagagaaactttgcacacacgcacacacacacacacacacacacacacacacacgaccctggtgcgtgtacatacgcctgtgcttggacgggtgtgcattgaactgggcgtgtcaggaaagctgagcgattgggaaagagggagatgtttcacctccttttctcagtaagggggctttagaagactccgctttcaggtgtgcagattggcagaaagctgatgttgtgaaatgttcaggcagctgagatctgaagtgacttgacgctctctgtccttcaccccggtcctccttttccctctttgaccctcttccagccctcctaccctcctgatcccattgtgcacccccccacacactcggctgctctgctgtggactctccacactgcatcagatggacggtttctgcactggactttgtttcttgttcaccttcagggcattgagctgctgcctttgagataccccttgggtgtcccggggcagccgccttagaaacacacctatctatctccccaaatcaggaaaggagacttaaagagtataaagctgacattttgctttttaatataagagaggagaaaaagacatttttcagagaagtatagatactgtctccactccctaataatttctctccctaacattttagcaatttttaccttgtttgggggttcattttgtttcttcagatttgatttagactctgctaggaggcactgaatgtctataacttatgttttggagttttgtttttttacttgccccttttgttcctcaagtcacactgtaaactagctcatctctgtggtgtactcagtatcctacagtctttcttggccttccctgtacagttcagttttcacatattcgaacggccaagaccaggttcttggctgtgctatttggagaccaggcgttggggaggattcacgggttccacagctgcggggtttggtggccgtaggggaagcagtggtttgggagttctgaatgtaagcgccagagctgccctcctggtccgctgtgcgtggtacccagtgtgcatcacactactcaccccctcccggaccctggcagtccacagcgactccgaagtcagcccatagtcacatccaccacacctcagacctgccacagcctctcctcacttcccaggaccctgaggcttccaggagctctgctgcccacagccctcggggtcctcactcacacctccgacttccaggacggcagtgagcatggtgccttgtggccccaacagttgatgttccgagggtgggatggtgtttggccatgttcgactcgatgctgtgaaagatgtcttcaggcttttctctcctgttcccccagctgtgagcaaattaggttctacacacacagttcggatgccaagggtgacaccccattcccttcacaagaggcggttctgtcacaaatcagcactccacccccaccacacctctcagtgaatgaagtgctggtggtctcactcccctggtgacccttagccgtgggatggggtggttacactaaggcttcaagctgagaatggccatcatggcgggaggctgtttgcaaaggcaccttctgtcatcctggggttggctaagtcaactccaccccttcccaataataaagcatcactcaactgtgagatacctcgactacaaaaagcactgtaccacagccctctccccctgggtccatgacaggagcagggagtaaagttgattgcaaacctcatgaaggcttaggatcatggacctggaacatagtgtttgggggccaagcctgcacactttgcctcatgagaactcacccagctctccccttgaaacttggacacactgaaatggatcaaagtgggccatttccacatttgctccagcaaactgtggtctcaggaactaccatgccatttcctctcctggagaagttctaggtattacctccacaacatttccaactgggggactgagcccacttatcagagaagagccgccatccacactggagcaggaacagggagaaatccagacaggaacctcatgtcacttcctagggaatatgggaagaaacatcagcagactttatgatgtcagttgggcctttggaggcattctggaaggtggcctcagcatcactgatgattgacagatgctacagcaaaaggtccctctagcgttgcttgactgctggggaagggacagtgaccggcactttgacccacacaaggataggagctgcctactttgtgtggtaggtgagagcagagcctgggagcccatcctccctctacttggagcaaagttgtgctggtgatgccccattattgggccagttgattagaaaataggcatttcactttcttggaaagccatcggactaagcccagatgtgcatttagagcactcagcattcttctctttgaagcatgggatgtctgtcctccaggaagagatttgatcttaggttgttacctccctttcacttcttttccacctcaattcaatacttaggggttggcttgcctctgcaggtttgatgtgaatgccactgggtactcagaaagctgtcctctggggctgccttgtccagttagataacaagatagcagatgattgtttcttgcaacctctggttccctccggaaactggtgtcaccaacaggaaaggctgtaccaaggtgccctcttctcagacaggctgttctcagagtgcaaatcctgctgcaactaacagcttaataaaacccaaagatctcacaggtccagccactggcccctttatctccaacaatatccacctcaccaaattctagttcagccaaaggattgagacaggctcttccagttcatctcctggtgtccagcctgaccttcacatctggaaggattttgtcgtctgcctcccagttctgggtccactgtaggtctttccatcacaagcctttgggggatctgggaccaggaatttgggccgtttctaccatattctcagcagcctaaggtggtggcctgctgatgtggagactactcaccttgagccatgtggtccccaggacagaaatggcctttgttttgacatacatggacccaaaaggggaggtgaagaaaacacacctccacctggcaagtttttctccctcatctgaggtcagttgcttcaccaacaaagcccaagccaagaactgcagcgttgagggttgtccctcggagtggagtagcccaaggaatctcaggtccaccaagagcattggtaccatctgggccacgggtggatgcctttgttctggcacagttctccacttcccgattcctggctcagccagccaggcctccctctaatggcatttagtaaccaggaaacaaaacacatgccacctgagcaaaactgcctgcacttcatctctggaggttcgctgcacagaggccacctgccgcatcaccagtgaggaagctttgccaccatcctgcttggcagcttcacacttgacatctgaggattggtttttggctggaaaaagggtaccagggtttcctggcaaggacaggagagcagtgcagtgacacagatgagaagctgtgagtctccaggattcaaggaagccaccaggtgtgcaggctgggaagagacatctctttcagtttgaccctttatctcctgcacttttaaagaaacaccagagaaaaaatctacaaggcgtgtttccactgaagctgaacctctgcctttaggagtcccctatatttgagcaaggccacctgcttcccctggacttgagctggactccttgaagagtgggcttctggagagatgttaggaatatagcacatgctctctgggggccacagggtcattgggaaggtttgaaatgaagatgggatgtggctggaacagcctgtgagatggctccattggggacactcccctcatcttgtcatcacgatggatatgctggaagaggaggtgtcccagtgagccgcccgaagttcatagctttgccctcgccttggcaacagcggcaatgcctctatctctgggatgcatcttaaggagggctcctaacaaggccgatgatttagacagaacaagagactaagtaaggtccggctatcccgtggagccagtagtaggtgggagctcctgtccccgccagccctgctccagcccccgtgtccagctgggccagtggaagaactgggaaggaggaagcccctccctttcactgtggctaatgtttgctaggccagttatggtgaaccaatgatacagtgttttccctcttaacgttcccctcctggttttgccttttcagggttttctgggggattttgttgtagtagttgcttttcttcctctctcatttgggtttgaggattgtggtcgggggagccctggctttcaccaaaggagcccagtggtttctgtggaagaggcgcccactcccactttaatgagggtgaagattgtcaggtcactgtttgacatattcatgccccgtcccttccccccccacccccccgcccacccaccacgggtgtcgctttaaagagtcaattcttgtacagagaaggatttgctaggtttgcatttgggtgttagcatcacgacccacgagggccctgcccaaccgtgcgtcccatggggcaccttgactcttcaaaccaaaattccttaaaggggcacagcccagccttgtccgcaacctcaggggcctgggattcctgtggcgcttcctgaattccaggttggcacagatgatgaggtctgagaccagccggaaggaggggctcctgccataacccaggtgccagccggtctccgcctaggaccttccctcccgcccagccagggtgggcggcatcctacgcggtgaaacgagctcatggactgacccggggctgggcctcgccagccaggagagagcgagggccgcacggcagggctggcccaggcagctcgtccagggccattcagatcccaagcatcaggaaatcattttgtacaaccacccgaagcagagatattttttaagaagcgtaaattattttcagttgttttctgatcctgcctttttcttttccccacaacttcacgccagtgagtcgttcacatcaggtaaatcttgagaaagccttggtgccctcctccccaccccccactcagtaaccacgtgcgtgcacccccgcatcctttctcagtagttaagacgttctaggcaataccatagacacatctgactgtgtctctctctttgagtgcaagaaactcaagtcatcttaaaaaaaaaaaaatacaaaaaaaatttacaaaaaaacaaacacaaaaaaaatatcttttttaggccagagttttctacaggtattaatgaatatttttcttaatccttataagttttatgtgtttaatatttcttaataccggtagcattaatttatacttttgtagcaacacaatatttttataaacagccggtgcttggctcaagtcttcacgaggggtttaggcagggccatcttggggaccctgtgtaccatgtactgtatttaaaaaaaaaaaaagttacctattgtcacacttgctgtgttaattaacaaaagatgttgtgtgcggtctcctgtatcggtgtggatccaacagctctccagggagtcacattgcatgggggttgagttgacggttcttgtgatatgtaaacccccgagaccaaacttgagggtttatttagggttttctgtttgtcctttgggtttttgtttcactttgttttggtgccgtttctccatttacagccaaatcagtttcatgatgttcaaaacatttactgatgtcaaatggaggaaaggaacagaaaaaaagatttttacaaagtaataaaatttaaaactgagctgtttaatgttgctgtttttacctgtctgttcttgtccaaaagtggaacattcccagggagaagaggaaggttccactcggttctttaagtcgccaaaagccccagcccgggattcagtacctcccctgccccccgaattcttgcagcactatttcccagttggttgatgccaaggcaaaaagataacttttaacagttagagaggatcagttgcttaaatgatttcatgtcagtgttgtatttatggttttacaataaaacaacctttaggaagaaaaaaaaaaaaaaaaaaaaa

SEQ ID NO: 6010 - DNA, 3714 bp, Homo Sapiens
  NM_133375
tcttggacagctgcgcccagcccttcttcacctgccgtccaggtatcatcctagtcttccctccgtctctgggatgggaaactcttgtctagtgatgtgactcattacgtgatcccagactggaaagttgttcaagattatcttgagatccttgagtttcctgagttgaagggaattattttcatgcagacagcttgtcaagctgtgcagcatcaaagaggcaggagacagtataacaaactgcgaaacctgctgaaggatgcgcgtcatgattgcattctctttgctaatgaattccagcaatgctgctatctgccacgggaaagaggagagtccatggagaagtggcagaccaggagcatatacaacgcagctgtttggtactatcatcactgccaggacaggatgccaattgttatggtgacagaagatgaagaggcaattcagcagtatggaagtgaaacagaaggagtattcgtgattactttcaagaattacctggacaatttctggcctgatttaaaagctgcccacgagctttgtgattctatccttcagtctcgacgggagagagagaatgagagtcaggagagccatgggaaggagtacccagaacatcttcccctggaagtgttagaagctgggattaaatctggacgctatatccagggaattctgaatgtcaacaaacacagagcccaaatagaagcttttgttcgacttcaaggagccagcagtaaagattcagatttagtcagtgacatcctaatccacgggatgaaggctcgaaaccgctcaattcatggagatgtggtagttgtggagctgcttcctaaaaatgaatggaaaggaagaaccgtagccctgtgtgagaatgactgtgacgacaaggcttcgggcgagtccccaagtgagcccatgcctacaggtcgagtggtgggcatacttcagaagaactggcgggattatgtggtgacatttccgtccaaagaagaggtccaatctcagggcaaaaatgctcagaaaatcctggttacaccttgggattacagaattcccaaaattcgaattagcactcagcaagcagaaaccctccaggacttcagggtggtcgtgcgcatcgattcctgggagtcaacatctgtgtatccaaatggacattttgtgcgtgttttaggaagaatcggagatctggaaggggaaattgcaaccatcctggtggaaaacagtatttcagttattcctttctcagaagctcagatgtgtgagatgccagtaaacacaccagaaagtccctggaaggtgagtcctgaagaggaacaaaaacgtaaagacttgaggaaaagccatctcgtattcagcattgaccccaaaggttgtgaagatgtggatgacacactctcagtcagaaccttaaataatggcaacctggaacttggggtccacatcgcagatgtaacacactttgtggcaccaaattcttacattgatattgaagctagaacaagggccaccacttattatctagcagatcgtcgctatgacatgctgccttccgtcctcagtgcagatttgtgttcccttctgggaggcgttgataggtatgctgtaagcatcatgtgggaactggataaagcctcttatgaaattaagaaagtgtggtatggcagaaccattattcgatcagcatacaaactgttctatgaagcagcccaagaactactggatggaaacttaagcgttgttgatgatattccagaattcaaagacttggatgagaagagcagacaagccaagctggaggagttggtgtgggcaattggaaagctgaccgacatagctcgccatgtcagagctaaacgagacggatgtggtgccctggaactggaaggggtagaggtttgcgtacagctagatgacaaaaagaacattcacgacctcatccccaagcagcccctggaagtccacgagacagtggctgaatgcatgatcctggccaaccactgggtcgccaaaaagatctgggagagcttccctcatcaggccttgctgcgccagcaccctcctccacaccaggagttcttttcagaactccgggaatgtgctaaagccaaaggcttcttcatagatacacggtccaataaaacactggctgattctctggataatgcgaacgacccccacgatcccattgtgaacaggctactgcgctccatggccacgcaggccatgtcgaatgctctgtacttctccaccggatcctgtgcggaggaggagttccatcattacggtcttgcattagataaatatacccactttacttctccaataagaagatattcagatattgtagtacaccgcttgttaatggcagccatttcaaaagataagaaaatggaaattaagggaaatctgttcagcaacaaagatcttgaggaattatgcagacatatcaacaacagaaaccaagcagcacagcattctcagaagcagtctactgagctcttccagtgcatgtacttcaaagacaaagaccctgccaccgaggagcgttgcatatctgacggagttatttattcaattagaacaaatggtgtgcttctatttataccaaggtttgggattaaaggtgctgcttatctaaaaaataaagatggtttagtcatctcatgtggcccagatagctgttctgaatggaaaccaggatcccttcaacgatttcaaaacaaaattacctctactacaacagatggggaatctgttacgttccatttgtttgaccatgtaaccgtaagaatatccatacaggcctcacgttgccattctgatacaatcagacttgaaataattagtaacaaaccatacaagataccaaatacagaacttattcatcagagttcccccttgctgaagagtgagttagtgaaagaagtaactaaatctgtggaagaagctcagcttgcccaagaagtcaaagtaaacatcattcaggaggaatatcaagaatatcgccaaacaaagggaaggagcctatacacacttctagaggagatacgggacctagctctcctggatgtttcaaacaattatggaatatgagaggctcttacttcactaagagctgtcatatgtgaatgttttacagtcttttcaaacttaacatttaatgtgtgtcactcagtgctctagtcgatcaggactgggtagctatttcgcatatatgtaaaatgttctcagccgggcacggtggctcacgcctgtaaccccagcactttgggaggctgaggcgggcggatcacgaggtcaggagattgagaccatcctggctaacacggtgaaacccagtctctactaaaaatacaaaaattagcccggcgtggtggcatgcgcctgtagtcccagctacttgggaggctgaagcaggagaattgcctgaacccaggaagaggaggttgcagtgagccgagatcgcaccactgcattccagcctgggcaacagagcgagactccatctcaaaaaaaaaaaaaaaaaaaaaaaaagttctctcattcattaaagttgcattaaataaagtataattaggtcactatggaaacagagttttcagtaatgagtggacagtaagtggtggctctgcagatggcccctttctaataagtttaataaacccgaaattactggttaaaaaaaaaaaaaaaaaaaaaaaaaaaaaa

SEQ ID NO: 6011 - DNA, 4765 bp, Homo Sapiens
  NM_133377
gctgaagtgctcacggctcactgcagtttcaagttcctgggctcaaagatgggagtctccctatgttgcccaggctggtctccaacacctgggctcaagtggcttggcctcccaaagcgctgggattataggtctgtgccgcctccttccggtctcggtggcgcggcacgcgcggctctctaggcctccttcagctctgtggtgacggtggccgaggtggagggccggtctgaagagtggcgggactggcttcacttcctccgcggttcctcggagccgcctcgctcctcttcagggactttgctgagaagggctctcgggcgtccagaccccaccgcaaaggtgtttggcgatccgccgagaagttgttggccccaggagcatccctcggggccgaatgcgcagtggacgatgccccttctgacccaacagatccaagacgaggatgatcagtacagccttgtggccagccttgacaacgttaggaatctctccactatcttgaaagctattcatttccgagaacatgccacgtgtttcgcaactaaaaatggtatcaaagtaacagtggaaaatgcaaagtgtgtgcaagcaaatgcttttattcaggctggaatatttcaggagtttaaagttcaggaagagtctgttacttttcgaattaatttaactgtccttttagactgtttatctatttttggatcaagtcctatgccagggactttaactgcacttcgaatgtgttaccaaggttatggttaccctttgatgctgttcctggaagaaggaggagtggtgacagtctgcaaaatcaatacacaggaacctgaggagaccctggactttgatttctgcagcaccaatgttattaataaaattattctgcagtcagaggggctccgtgaagcattttctgaattggatatgacgagtgaagtcctacaaattaccatgtctcctgacaagccttatttcaggttatctacttttggaaatgcaggaagttcccaccttgactatcccaaagattctgatttgatggaagcatttcattgtaatcagacccaagtcaacagatacaagatttccttactgaaaccctctacaaaggcattagtcctatcttgtaaggtatctattcggacagataacagaggcttcctttcattacagtatatgattagaaatgaagatggacaaatatgttttgtggaatattactgctgccctgatgaagaagttcctgaatctgagtcttgagtatgacaattcactgatatttatgtgtacatttatgatagatgaagttcttattctgagtacagtactctttgtcatttcatattggattttctatagagaagaagcacaatggggaagataggagcaaggtcatgtaccctaatagttactatgttttgtaaatccattttgtagagggcatgtaaataaatgttttcctgtagtcatagattattcaggactgtcctttagttctgtcttttgaactcatgggaataattgtgagtcagcgtaacatttcaagagtctaaaggtggccgggtgtggtggctttaatcccagcactttgggaagccgaggtgggcggatcacctgaggtcaggagttcgagaccagcctgaccaacgtggagaaaccccatctctactaaaaatacaaaaaattagccggacgtggtggcacatgcctgtaatgccagctactcgggaggctgaggcaggagaattgcttgaacccgggaggcggaggttgtggtgagctgagatgacgccattgcactccagcctaggcaataagagcaaaactctgcctcaaaaaaaaaaaaaaaaaaagtctaaaggcttaaagtttgatgcagctacctgaaatgatcttttatttatttattattagaaaaagcaaaggcatatgggcattgcttattagtttgaattctagagactagatcttaaagtagtggttctcaaagtgttgtgcccgcaccaacatcagaatggcctgcaaacttgtagcaaactctggggaggaggccagcattctgtattttaacaagcttccctcaggagattctgatgcctgctaaattttgggaaccactgttttaaaggaaactttttttttctttaatagcatttaattgtatgagatgattgcttttacatgtgatttccttgcaaatgttctgaagttgaggcatcaccaaacaagtctgaacaattctttatgtgatttatttttaaagtagaccttttgaagagatctatgaatgggatataaagcaattttcagtgttacaggttttcttcttcttctcaaaactgtttgctgtaagtaactgcaatcagtacttactactttccatttgcttatgagtttcttgacaaatcaaggtgtagaaaaccagttattaagtgattttgtactttcctggtagttgtcactaaaataatttttgtggcatataaatatatttaataaaatgcaaaaattatcttcctgtctagtagaaaaaattacatgagtaaagtgaagcttctgtctttgttactgtaccaggtgacaacagctgagtgtccctccatggacagtcactattggccttttgagtgagacagttctttaggataaaaacctgtcatcccattgcaggattcatttagcctttctggcccttacccactgatgctagtcattgtgaccaccccacctcccccaaataaaagtgtgccaaactattcattgttgagaaccattcaattgtattcaccaaaattggaggatatattggaatgccctaccttaatataggtcacatagcattagagaaaattggtttggagagtattacagcaaagtgtgctgcaaggaggctactccagcacaatggcaggcactgcttcccaggcatatggacaattctgggaggtggccagggtcagcacctgataactagtaagtgtctcaatctcagcatacaaaatttagcagtgactacaaaagaagttggaattttctaaaatgtttgtattcaagaaggaaacaaatgaatttactaaatgttgtcagagtattttttgtttagataaccaccaagaacagaacaaacctaaaagatacttgggaaaatatctaatcagtcaacattctaaggactgttaaatgtgaaatagcatagttattttttgtcttttgttactagtgtgaacaaagaacggcgcctaacatataatgggcatttagtaactctgttagatgaaagactctccaatttcagattttcttttagcatcttattagtcactacttaattctgatgatttagctctaaatttattttgatctcagtttttttatttttatttttggagacaagatcttgctctgttgcccaggctggagtacagttgtaggattacagttcactccagcctcaatctcctaggctcaagcaatcctcccatctcagcttcccaaatagctacgactacaggtgcatgcctccatgccctgctaatttttgtattttttgtagagatggggttttactatgttccctaggctaatcttgaactcctgagctcaagcaatccacccgcctcggcctcccaaagggctgggattacaggcgtgagctatcatgcctggcctaatgtattttttaaaagttgaatctaaaaagaatttaaaacaaatataaatcagctcagtaaggatggatatttttgtacatttaaaactattattttaggccgggagtggtggctcacacctgtaatcccagcattttgggaagccgaggcagggggatcatctgaggtcaggaagttcgagatcagcctggccaacatggtgaaacccctacctctactaaaaatacaaaaattagctgggtgtggtggtgggtgtctgtaatcccagctacttgagaggctgaggcaagagaatcacttgaaactggaaggcgggggttgcagtgagccgagattgcaccattgcactccagcctgggtgacagagcaagactccgtctcaaaaacaaaaaaaattaaaataaaaattattgttttagctgcatgtcttcagctatttagaattcaaagactaatgaattgtttctaagtcaccctaacatcaaggtacttattttataaagaatttcctccttatttgtgttctaattgacccaggaatttttactttaataaaagtttaactttatttcctatggaaaatcactagggggagtgctccctcaggcagagcaggcgacactttggtgccactacaaattgatgtgtagtatatagaagaatacagtcttatatttaaagacttttagttctgtctttttgaagtttatctctctttctagtaaaatggtgcttactgtgaatggataatcttttttttcatttttcatttgttgatttcccattcgatgatgtagtgcttccaccgagaattgatgaaatgcttcaaaataataaaagtatttgttaaattccactttaataaaaataaggcatgtaacacagtcattttaacaggaagccacagggtttctgtggtgttaccaaagtcctagtaaaaattaattaaaattgctaaaagggcagaatgtggcactctcaacagtggggtaggcagtccttcagaacatagagacttccttctttccttccctgtcttcacattgcttgtcccttatccccacctgaaataaaatctattgggtcctgagaaa

SEQ ID NO: 6012 - DNA, 3954 bp, Homo Sapiens
  NM_133444
agggtctgtgtcaagagcggcaggggctgcaggagataagagaaacgggctgccgtggggtgtgtgtaggcttcagagacatgggatcacggaagactgaagcagaaacagtggattaagacttcctgagcgatagctggcactgccttccccacaatggcagaggtggtggctgaggtggccgagatgccaacacagatgtcaccaggggcagtggagatgtcaacacctatgtcggcagagatgatggagatgtcaacagaagtgactgagatgacacctggggaggcccttgcctcatccctcttcttccagcatcaccagttcatgtgctctgagtgtggcagcctctataacacactggaggaagtcctctcacaccaggagcagcacatgcttgctgtctcagaggaggaggcactgaccacacagaatgttggcctggagccggagctggtgccgggtgctgaggggcccttccagtgtggtgaatgcagccagctcatcctctcccctggggagctcctggcccaccaggatgcccacctccgagagtctgcaaaccagatccaataccagtgctgggactgccaggagctgttcccctcgcccgagctgtgggtggctcatcgaaaggcccagcacctttctgctacggtagctgagccaccagtgccacctcctttgcctcccccaacaccactgcctccaccttctcccccatccgaagtcaagatggagccctatgagtgtcctgagtgctctaccctctgcgccacccctgaggagttcttggagcatcagggcacccactttgactccctagagaaagaggagcgcaatgggttggaggaggaggaagaggacgatgaggaggatgaagaagatgatgaagagatggaggatgaggaggccatggcagaggtcggtgatgatgctgtgggaggtgacgagtccacagctggctgggctcagggctgcggggactgtccccagcaccagccctcagcaggggctcgccggcaacaccggcggacggctcacagcccggcatctgccacccaccccttccactgcagccagtgtcagcgcagtttcagctccgccaaccggctgcaggctcatgggcgggcccatgttggtggcacacatgagtgtacaacctgctccaaggtcttcaagaaagcagcatcgcttgagcagcacttgcggctgcatcgcggggaagcccgctacctctgtgtagactgtggccgcggctttggcacagaactcacgttggtggctcaccggcgggcccacactgccaacccattgcatcgctgtcgttgcggcaagacgttcagcaacatgaccaagttcctctaccaccggcgcactcacgccggcaaaagcggggcacctcccacaggagcaacagctcccccagctccagcggagcccacccctccaccaccaccccctgccccacctgcccagctgccctgcccacagtgctccaagtcctttgcctcagcttcccggctgtcccggcaccggcgtgcagtacacgggccccctgaacggcgtcaccgctgtggggtttgtggcaagggcttcaagaagctgatccacgtgcgcaaccacctgcggacacacacgggtgagaggcccttccagtgccactcatgtggcaagacctttgcttctttggccaacctcagccgccaccagctgacccatacgggtgcacgtccctaccaatgcctggactgtggcaagcgcttcacacagagctccaacctgcagcagcaccggcggttgcacttgcggccagtcgcctttgcccgcgccccccgcctccccatcactggtctctacaacaagagtccctactactgcgggacttgtggccgctggttccgcgccatggcgggcttgcgactgcatcagcgggtccatgcccgagctcggactttgacgctacagcctcccagatcaccatctcctgccccacccccacctccagagcctcaacagactatcatgtgcacagagctgggggagaccatcgccatcattgagacatcccagccactggcgcttgaggacaccctgcagctgtgccaggctgcactgggggccagtgaagcaggcgggctcttgcagttggacacggccttcgtgtgacgcagctgaaaagcaacaacaaaagggtttggttgcaacagccagtgtgggtacctctggggagagaggacctcctctgacaaactggtctggtacccaccatgtgccaggatccaccctggcctctttttacccactgactccccagaacaacccttccaggcttctcttgtcatctttctctgcctgaggggaaactgaagctctgaaatgcgatgtgatctgtaccaggtcacccagctatgctgcaaagtgggttggccaaggccctttgcactgcatcaccctggtgcccagcaacatcaggtaaccttcactgagcaccaagcttatgccaggtctgtgctggccactctcatatacctcttcagatcctctgcttgtacccccagcccttgccttccctggattttgggcacccaggactttgctctgcctggtggagggtacttgatttctctgggcttccttcatctcaattctgacagtgtggaaggaaatctgtaggtacccaggtcctcagctccagactgggtgatgctggagacccaggagcaagtcagcacaggctctgcccacaggaggcatgcacaatctggtaggagaaacgcacaagtacagatagcttgctctctgagtgtgtctcattgattcattcagcctgtgtgtcctaaagcctcccttctcccatactgggtgatgctgggggcagagatgagtcaggcctaaggcttctctgggctgtgatggggatgtgcagggacagtgggatcccaggaaacagacctccatggtgggagatcaggagttaaggacttcctagagaaggtagtccctgaaggaaaagtaggaatctggcagtgaaagaggaaaagaacattccaggcagacagcactgcaagagggtgagctcttggtgtatttggagaccatccagttattcatctgactgcctacctgaggcaagcaccacacttaccactgtatgtgtactatgatcccaacaggcttgtgacatagatttcatattatccctgttgtatagatttttaaaactggtggctgggcgtggtggctcacgcctgtaatcccagcactttgggaggccgaggcgggcagatcacgaggtcgggagatcgagaccatcctggctaacacggtgaaaccccgtctctactaaaaatacaaaaaattggccaggagtggtggcgggcgcctgtggtggccagctactcaggaggctgaggcaggagaatggcgtgaacccgggaggcggagcttgcagtgagccgagatcgcgccactgcactccagcctgggcgacagagtgagactccctctcaaaagaaaataaaaataaaaataaactggccaggtgcggtggctcacgcttgcaatcccagtgctttgggagactgaggcaggaggatcacttaaggccaggagttcgagaccagcctgggcaacagcaagacctcatctctacaaaacttaaaagttagccaggcctggtggcacatgcctgtaatccgagtgctttgggaggctgaggcaggaggatcactcgagctcaagaattcaagacctgggcaagagagagagactttgtctctattaaaaataaaaatgattggccgagcatggtggtgcacaccagtattcccagctactctggaggctgaggcggaggcaggattgcttgatatgagggagattgaggctgcagtgagctgtgttcacaccactgcactccagtctgggcaacagtgcaagaccctgtcactt

SEQ ID NO: 6013 - DNA, 2431 bp, Homo Sapiens
  NM_133446
gtgggcaggcgaggagcgggaagaccatctctgcaagtgcagcatagcctcggcctaggacagcgggagtgcgtggccaaagctgtgagcagaggcacaggtggtggcagacagtagaggcgccccatggggaacatactgacctgtcgtgtgcaccctagcgtcagcctcgagtttgaccagcagcaggggtcggtgtgtccctctgaatctgagatctatgaggcaggagctggggacaggatggcaggagcgcccatggctgctgctgtacagcctgctgaggtgactgttgaagttggtgaggacctccacatgcaccacgttcgtgaccgggagatgcctgaagctttggagtttaacccttctgccaatccagaggcaagcacaatattccagaggaactctcaaacagatgttgtagaaataagaagaagcaactgtacaaaccatgtatctactgtgcgtttcagtcaacaatacagcttgtgttcgacaatattccttgatgacagcacagccatccagcattatcttacaatgacaataatatctgtgaccttggagatacctcatcatatcacacaaagagatgcagatagatctttgagcatacctgatgaacagttacactcatttgcggtttccaccgtgcacattatgaagaaaagaaatggaggtgggagtttaaataactattcctcctccattccatcgactcccagcaccagccaggaggaccctcagttcagtgttcctcccactgccaacacacccacccccgtttgcaagcggtccatgcgctggtccaacctgtttacatctgagaaagggagtgacccagacaaagagaggaaagccccggagaatcatgctgacaccatcgggagcggcagagccatccccattaaacagggcatgctcttaaagcgaagtgggaaatggctgaagacatggaaaaagaaatacgtcaccctgtgttccaatggcgtgctcacctattattcaagcttaggtgattatatgaagaatattcataaaaaagagattgaccttcagacatctaccatcaaagtcccaggaaagtggccatccctagccacatcggcctgcacacccatctccacctctaaaagcaatggcctatccaaggacatggacaccgggctgggtgactccatatgcttcagccccagtatctccagcaccaccagccccaagctcaacccgcccccctctcctcatgccaataaaaagaaacacctaaagaagaaaagcaccaacaactttatgattgtgtctgccactggccaaacgtggcactttgaagccacgacgtatgaggagcgggatgcctgggtccaagccatccagagccagatcctggccagcctgcagtcatgcgagagcagtaaaagcaagtcccagctgaccagccagagcaaggccatggccctgcagtcgatccaaaacatgcgtgggaacgcccactgtgtggactgtgagacccagaatcctaagtgggccagtttgaacttgggagtcctcatgtgtattgaatgctcaggaatccaccgcagtcttggcacccgcctttcccgtgtgcgatctctggagctggatgactggccagttgagctcaggaaggttatgtcatctattggcaatgacctagccaacagcatctgggaagggagcagccaggggcagacaaaaccctcagaaaagtccacgagggaagagaaggaacggtggatccgttccaaatatgaggagaagctctttctggccccactaccctgcactgagctgtccctgggccagcagctgctgcgggccaccgctgatgaggacctgcagacagccatcctgctgctggcacatggctcccgtgaggaggtgaacgagacctgtggggagggagacggctgcacggcgctccatctggcctgccgcaaggggaatgtggtcctggcgcagctcctgatctggtacggggtggacgtcatggcccgagatgcccacgggaacacagcgctgacctacgcccggcaggcctccagccaggagtgcatcaacgtgcttctgcagtacggctgccccgacaagtgtgtgtagtatctgttttatttgactgcagtctccttggtgcaaaaacaaaatgggaaaaataaggataactcagaatttcaaaaggaaatcacaaattcagctaataatagcattttcagtacttttcgtaaactaagtaaatacacaaaatgttgatttttctgaccataagacgtattttatgtccttttgccaaggtggatttgttagtctcaggccctcctggccacattgcccaagtcacacaggcttctgtattatgtatttagataaaatgtgtgaaaatatatttgaaataaagttcataaatatgcattga

SEQ ID NO: 6014 - DNA, 3606 bp, Homo Sapiens
  NM_133452
ttagccaacggggcaaggggggcgggaaggaggtggggtttctcccagccaatcgacgggcgcgccctcgttgccgctctatgccgctccgccccggctcgctggtcccagaaggcgccgggtttcccaagatggcggcggacgtgtccgttactcaccggcccccgctgagccctaagtctggggccgaagtcgaagccggcgatgccgcggagcgccgggcgccggaagaagagctgccgcctctagatccagaagagatccggaaacgcctggaacacaccgagcgccagttccgtaaccgccgcaagatactgatccggggcctcccgggggacgtgaccaaccaggaagtacatgacctgctcagtgactatgagctcaaatactgttttgtggacaaatacaaagggacagccttcgtgaccctgctgaatggggagcaggccgaggccgcaatcaatgctttccaccagagccgcctgcgggagcgtgaactgtcggtgcagctgcagcccacggatgccctgctgtgtgtggccaacctgccccccagcctcacacagcagcagttcgaggagctggtgcggcccttcggcagcctggagcgctgcttcctggtctacagtgagcgcactggccaatccaagggctatggctttgctgagtacatgaagaaggactcggctgcccgtgccaagtcggacctgctgggcaagccgctgggaccacgcaccctctacgtgcactggacggatgccgggcaactgacgcctgcccttctccactcccgctgcctctgtgtggaccgcctgccacctggcttcaacgatgtggacgctctgtgccgggcgctgtcagctgtccacagccccaccttctgccagctggcgtgcggccaggatgggcagctgaagggcttcgcggtgctggagtatgagacggctgagatggcggaggaggcacagcagcaggcggacggcctgtccctggggggcagccacctgcgagtctccttctgcgcccctgggccccccggccgcagtatgctggccgctctcatcgctgcccaggccacggccctcaatcgggggaagggactcctccccgagcccaacatcctgcagctgctcaacaacctgggcccatccgcgtccctccagctgctgctcaaccccctgctccatggcagtgcgggggggaagcagggcctcctgggtgcccccccagccatgccgctgctcaatgggccagccctgtccacggcgctgttgcagctcgccctgcagacccagggccagaagaagcccggcatcctgggagactcacccctgggcgccctccagcctggggcccagccagccaaccccctcctcggggagctgcctgcaggagggggcctgcccccggagctgccgccccggcgagggaagccaccacccctgctgccatccgtgcttggccctgctgggggtgaccgggaggccctgggcttgggtcccccagcggcccagctcactcctccccccgcccctgtggggctccgaggctctggcctcagaggcctccagaaagacagtgggcctctgccgacgccccctggggtctcactgctgggggagccccccaaggactaccggattcccctgaatccctacctgaacctacacagcctgctcccggccagcaacctggcgggtaaggaggcccggggctggggaggcgccgggagaagccgccgcccagctgagggccccccaactaaccccccagcccctggaggtggcagcagcagcagcaaagccttccagctcaagtcccgcctgctcagccccctcagcagcgcccgcctgccccccgaaccaggactgtctgacagctacagcttcgactacccctcggacatgggacctcggcggctcttctcccacccacgggaaccagcccttgggcctcacggacccagccgacacaagatgtcccccccgcccagtggcttcggcgaacggagcagcggtgggagtggcgggggccccctgtctcacttctattcaggctcgcccacttcctacttcaccagcggcctgcaggctggcctcaagcagagccacctcagtaaggcaatcggctcttccccgctggggtccggagaagggctcctgggcctcagccccgggcctaatggtcacagccacctgctgaagaccccactgggcggccagaaacgcagctttgcccacctgctgccctcgcccgagcccagcccagaaggcagctatgtgggccagcactcccagggcctcggcggccactacgcggactcctacctgaagcggaagaggattttctaagtggctggcaccagagataactcaagggcctgcaccaaatcgcttttgggttttctgatgttttgttttgtgttttttttaaaccattttctctctttcggtaatagaaaaatctctgaaagactttactgaccaatcagccggagccccaggagcccaaggggtgtgggggagtctggaggcctcattatgtctctggcttgctccccacgctgaaaccctgcagccttaagagagaggggccccggcctgctctccctccctccccccatctcctcctccgctgtgcccgtctctccggagccctcctgcctcattgctcctgtaattttggcctttcgagtgccttggaggtttccctgacctcccgtgaagatacagagactgtctcctttttttttaactttgacaactgacttctgtttccttttctaagttttatttttcaaaccaccccggacagcccccagctctgattccttcaaggcccggcctgtccgggccaccattccacaccttgcggtttgaaacagctgtttttcccacatttgctgcaggcatggctgtctcctgcccctgcctgcccatctggcctataccccagccgtggggcccggggtccctgccgcagccccctccccttctgatgccttaaaagctgggccccaggccctgctggccagagccacagatgccaagctctgggagcttgactatggaccaaacagctctggcctagggattgggccaccctacccaggatctccaccctggggacagtagaaggggaaagccttcatcttggcgaaccggccccaccaccccctcctacccgggcctccgtgcagagatgggctttctctgccagtcccctgctgtctgtctgtgggagtcggacattgtgcccatctcccggagcctctgctgtcactcgcttgttgaagatgaattcttgaattctgcctgcccacccccggccagatccctggagctggcctccttccagcccagtgccagaaaccagcactccatgaagataaactctgggcccgcccaccagcaggacctgtcgacctgaggtgaccctgggccttgcccccagccaactgggccaccagcttccctcccttgactctgggggtccacatccactccaaggggactattcccccgaccccaccccagtctccccacacggacctttgctgaattaaagtttgtaagtaaatggttttaaagaaaaaaaaaaaaaaaa

SEQ ID NO: 6015 - DNA, 4384 bp, Homo Sapiens
  NM_133458
ctcctgccccggagccgggccctggcgaggcaggaatggccccgaggcctccgaccgccgcgccccaggaatcagtgacattcaaagatgtgtctgtggacttcacccaggaagaatggtaccatgtcgaccctgctcagaggagcttatacagggatgtgatgctggagaactatagccacctggtttctcttggatatcaagtttccaagccagaggtgatcttcaaattggagcaaggagaagagccatggatatcagagggagaaatccaacgacctttctatccagactggaagaccaggcctgaagtcaaatcatcacatttgcagcaggatgtatcagaagtatcccactgcacacatgatctcttacatgctacattagaagactcctgggatgttagcagccagttagacaggcaacaggaaaactggaagagacatctgggatcagaggcatccacccagaagaaaataattacaccacaagaaaattttgagcaaaataaatttggtgaaaattctagattgaacaccaatttggttacacaactgaacattcctgcaagaataaggcctagtgaatgtgagacccttggaagcaatttgggacataatgcagacttacttaatgagaataatattcttgcaaaaaagaaaccctataagtgtgataaatgtagaaaagcctttattcatagatcatcgcttactaaacatgagaaaacacataaaggagagggagctttccctaatggaacagatcaaggaatttatcctggaaagaaacaccatgaatgtaccgactgtgggaaaacctttctctggaagacacagcttactgagcatcagagaattcacactggggagaaaccctttgaatgcaatgtatgtggaaaggccttcaggcatagctcatctcttggtcagcatgagaatgctcataccggagagaaaccctatcagtgtagtctctgtgggaaagccttccagcgcagctcctcccttgttcaacaccagcgaattcacactggagagaaaccctatcgatgtaatctatgtgggaggtcctttaggcatggcacatccctcactcaacacgaggtcacacacagtggagagaagcccttccagtgtaaggaatgtgggaaagcctttagtcgatgttcttcccttgtccaacatgagaggactcatactggagagaaaccttttgaatgtagcatatgtgggagggcttttggtcagagcccatccctttataaacatatgaggattcataagagaggcaaaccttaccaaagcagtaactacagcatagatttcaagcacagcacatctctcactcaagatgaaagcactcttaccgaagtgaaatcctaccattgtaatgactgtggggaagactttagtcacattacagactttactgaccatcagaggatccatactgcagagaacccctatgattgtgagcaggcttttagtcagcaagctatttctcatcctggagagaaaccctatcaatgtaatgtatgtgggaaagctttcaaaaggagtacaagtttcatagagcatcacagaattcatactggagagaaaccctatgaatgtaatgagtgtggagaagcctttagtcgacgctcatcgcttactcaacatgagagaacccacactggagagaaaccctatgaatgtattgactgtgggaaagcctttagtcaaagttcatctctcattcagcatgagagaactcatactggagagaagccctatgaatgtaatgaatgtgggagagccttccgaaaaaaaaccaacctgcatgatcatcagagaattcatactggagaaaaaccctattcttgtaaggaatgtgggaaaaacttcagccgaagttcagctcttactaaacaccagagaattcatactcgaaataaactctaggaaccgtgaaattaaggaatttgcagaatgctttagctaaaatgttctgattcaggatcagaggattcttagagagcttgggaatgtaatgaattacgtgtgtgtttatacgttgtgtgtggagaaaactgccagtagacagattttttttttttaacataaagacacattctcagatctgattacagactagtgtaaaaacagctacatgtatgtagctggttggggatgatatgcctgtatgttggactttgcttttgaatatatgtatgcaggatatcatcaagtttcaacatcttgacttgtgacccccaatgtcaacagcttttttaaaaagcaaattcctgcagtaatgaccaaaacccattttaaaaattgcttgacaactgcactcaactgcagctcttacattaacttcaccatggaaaccagttccaactccaggaagtcaccattcaaagaattagatcaactagcccaaccacttcattgtacagatgaagactgaaagccaaagatgtgaagtggtttccacagtatgatacagcctataagggtaaagctgggttaaaaatgcaggtttcctggatttggggccccatggccttgccagtgaaaaggttatttttggactcagagggctttaaaataaattttaagatgtatcagatacacaaacatttaatgggcacctatgggttggacactttgagaattcttaaaagtataagtgggagcaaaatgtatgcaaatttatcacaaactatttaaagcaacttcttggaggcttacaaaccacaatttaacagaaactgtagatggttgaactactagtgacttttttccccttttcccagttacaattatactttcagctaacatatgccagtttcacagaactattaagtccccttattgtactttttatggcatgcccatgaaaaagcactttcttaagcctacagtatcagatcaatgggaaaacaacagaaaactaagaggagaattttcccgttaattttcttgcagaaaagttaagtctaattgcccattgccataaattttgccttgtactcagagaagcaacatgcactggctcattttatgtgcaaagaaaagatttcaccattaaaaaaattaacttggctaggtatggtgtctcacacctgtaatcccagcactttgggtggctaaggcagatagactgcttgaacccaggagttcaagaccagcctggacaacatggtgaaaccccatctctttaaaaaaaaaaaaaaatccaaaaattagctgggcatggtggcatgcagtggtagtcccagctactcaggaggctgaggtgggaggatcactggaacccgggagcagagactgcagtgagctgagatcacactactgcattccagcctgagcaacagagcaagacacacacacatcaatttattttagttgtataatgcttttctattagtaaagcatcagctaagcttcagtggcctgctccatcccctaatgactcccatgggctatcctaaaggaacttccagaacctttgttggtgtgttgacattgaccatgcagaccaatttgggcacaactggacattgattccttttacacaagagctgcctcccaaagatagataaattttcccagccctaaatatgaatcatggggcaagatattggtcgtattgatggtgaacctttcctactggattctttgcatgccacatagcaggattcattgcctttctctcatcatggatggcatgcagcagcacccaagtattcttcattctttgcagggaaaaaattgtgcatgggggctgaaatgtaatatgtgtagctcaattagtctctcctctgtgatgcaaaatggaatattcaatggcagatctgcccttctgagatgctgaccatccaaaacaccttgtttatggtgcaccatgattagctcacacacaatgccaaggctgtgcttctattatctgatacatagtttgacaatgggtaattctactcagaccctccctactgattggctaggatgcctgtcaggaactcattatgctactggttgtttggggatccccatagtggactactttcaggaatggcatgaattgtaaccaactgagtgctgcccccactgttacggaagtttataaaaccttagttccagaagacccaaaggagagtactggtttgtgtttggtgcttggcctagatccagccaccactctgaaactcagcacatcttcattgacagggagggagcccaggacatatgtgtggctcattgaccagaaggctttcttagtcccaacagccatgaaccatgcacttatggatacccagccttttagggctacgtgaaatgcatccttgtaacatcattgtattctttcaataaatagccttctgagttgaatggga

SEQ ID NO: 6016 - DNA, 3059 bp, Homo Sapiens
  NM_133462
ggttgtgctgtctgtgtacttccggcagcctccagacagtttcttccgcttcctgtaccacccggctcaagtagcggacacggaacagggaactatcagcccgtcggcctccgggccctgcattctctagccatggaccgggaccttttgcggcagtcgctaaattgccacgggtcgtctttgctctctctacttcggagcgaacagcaggacaatccacacttccgtagcctcctggggtcggccgccgagccagcccggggcccgccgccccagcacccgttgcagggcagaaaagagaagagagttgacaacatcgagatacagaaattcatctccaaaaaagcggatctgctttttgcactttcctggaaatcagatgcacctgcaacttctgaaattaatgaagacagtgaagatcattatgcaatcatgccacctttagagcaattcatggagatacctagtatggatcggagagagctgtttttccgagatattgagcgtggtgatatagtgattggaagaattagttctattcgggaattcggttttttcatggtgttgatctgtttaggaagtggtatcatgagagatatagcccacttagaaatcacagctctttgtcccttaagagatgtgccttctcacagtaaccatggggatcctttatcatattaccaaactggtgacatcattcgagctggaatcaaggatattgacagataccatgaaaagctagcagtatctctgtatagctcttctcttccaccacacctatctggtattaaattaggtgtaattagctctgaagagcttcctttatactacaggagaagtgttgagctaaatagcaattctttggagtcctatgaaaatgtcatgcagagttccttgggatttgttaatccaggagtagttgaattccttctagaaaaactaggaatagatgaatctaatccaccatctttaatgagaggcctacaaagcaaaaatttctctgaagatgattttgcttctgcattgagaaaaaaacaatccgcatcttgggctttaaaatgtgtgaagatcggagttgactattttaaagttggacgccatgtggatgctatgaatgaatacaataaagctttggaaatagacaaacaaaacgtggaagctttggtagctcgtggagcattatatgcgacaaaaggaagtttgaacaaagcaatagaagattttgagcttgcattagaaaactgtccaactcacagaaatgcaagaaaatacctctgccagacacttgtagagagaggaggacagttagaagaagaagaaaagtttttaaatgctgaaagttactataagaaagctttggctttggatgagacttttaaagatgcagaggatgctttgcagaaacttcataaatatatgcagaaatctttggaattaagagaaaaacaagctgaaaaggaagaaaagcagaaaacaaagaaaatagaaacaagtgcagaaaagttgcgtaagctcttaaaagaagagaagaggctaaagaagaaaagaagaaaatcaacttcttcttcaagtgtttcttctgctgatgaatcagtgtcttcatcatcatcctcttcctcttctggtcacaaaaggcataagaaacataagaggaaccgttcagagtcttctcgcagttccagaaggcattcatctagggcatcctcaaatcagatagatcagaataggaaagatgagtgctacccagttccagctaatacttcagcatcttttcttaaccataaacaagaagtggagaaactactggggaagcaggataggttacagtatgaaaagacacagataaaagagaaagatagatgccctctctcttcatcttcacttgaaataccggatgattttggaggtaggtctgaagatccaagagatttttataacagctataaaacccaagcaggtagtagcaaaacagaaaagccatataaatcagaaagacatttttccagtagaagaaattcctcagattccttctgtaggaattcagaggacaagatttatggttataggagatttgaaaaggatatagagggaagaaaagagcactatagaaggtgggaaccaggttctgtgaggcattctacctcaccagcaagctcagaatactcttggaagtcagttgagaaatacaaaaaatacgctcactctggatcacgtgatttcagtagacatgagcaaagataccgtttaaatacaaatcaaggagaatatgaaagagaggacaattatggggaggatatcaaaacagaggttccagaagaagatgcactaagtagcaaagaacactcagaaagcagtgttaagaaaaatttacctcagaatttactgaatatatttaatcagatagctgaatttgaaaaagaaaaaggaaataagtcaaaaaattaatacaccaaggatatcggcaccattacacaaaatgccattaagtgaagtttttggttgtattagtcataacagttgagtgcagaaatctctgcttctaaaattatttgtagagattacaggaaacaaatgcttttaagtaagtttttctcaaattttgtttcagttctaggtcccttgtcacagcttggtttttagactttttatgtatatgtttatgtacagtatattactcttgacagtttgaatttcttcacctaaagataattctctgaaagtactgtttcttcattctattgcggtatatgagaattcctgggtgcatcttattctgctgtttgagagaaaaatttgtgcattgaacacttggatcatttttataaaaattaatttcattttcttttctgttaaattaaaaatcgtcagcttttgaaagattatatgttcgaatgtttcttgaacacttttatatttatcagtttaaatattacattttttgcccaattttttttaaaatttttaaatggtagattatatgtcttaattttcctctaaagcccaatttgattaaaagtggtttgtgaacagtcaaaaaaaaaaaaaaaaaaaaaaaaaaa

SEQ ID NO: 6017 - DNA, 2635 bp, Homo Sapiens
  NM_133466
cgttaggccccggggattgtggcgtgacccggcagcggcttcctccgttcgggcatcgctgtgcctcgggttcgcgccccgagtgagcagtcctggcccggagcgtcggtcctggtaatctgtaggaaaagcgctgcggcccagggggtaaagagagatcagcctctgtggactcggtgcttctcctggcaagtaaaccccaaggaggactgaccagttcttgaatttctataccatggcccttcgatcagtgatgttcagtgatgtatccatagacttctctccagaagagtgggaatacctggacttggaacaaaaggacttgtacagagatgtcatgttggagaactacagcaacttggtctcactgggatgcttcatttctaaaccagatgtgatttcctcattggagcaaggaaaagagccttggaaagttgtgaggaaaggaagaagacaatatccagatttggagaccaagtatgagaccaagaagttatctttagaaaatgacatttatgaaataaatttatcccagtggaagataatggaaagaattgaaaaccatggccttaagggtctcattttaaaaaatgattgggaatccacaggaaaaattgaaggacaggagagacctcaagaaggatacttcagtagtgtgaaaatgccatctgaaaaggtgtcctcttaccagaaacgcacatctgttactccacatcagagacttcattttgttgataaaccctatgaatgtaaggaatgtgggaaggcgttcagagtgcgccaacagcttacttttcatcacagaattcatactggtgaaaaaccgtatgaatgtaaggaatgtgggatggccttcagacagactgcacaccttactcgacatcagagacttcattctggtgaaaaactctatgaatgtaaggaatgtggggaagctttcatatgtggtgcagatcttagagtacatcagaaaatgcatattggtgagaagccctatgaatgtaaagaatgtgggaaggcttttagggtacgaggacaacttactctgcatcagaggattcatactggtgagaaaccctatgtgtgtaaagagtgtggaaaagcctttagacagtacgcacacctgactcggcatcagaagcttaatagtgctgacaggctctatgaatgcaaagaatgtgggaaggcctttttgtgtggctctggtcttagagtacatcacaaacttcatactggtgagaaaccctatgaatgtaaggaatgcgggaaggcctttagagtgcgacaacaactaacactccatcagagaattcatactggtgagaaaccctatgaatgtaaggaatgtggaaagacctttagccgtggttatcatcttattctccatcacagaattcatactggtgaaaaaccttacgaatgtaaggaatgctggaaagcctttagtcgctactcacaacttatttcacatcagagtattcatattggtgttaagccctatgactgtaaggaatgcgggaaggccttcagactactttcacaactcacacagcatcagagtattcatattggtgagaaaccttataaatgtaaggaatgtggcaaggcctttagattgcgccaaaaacttactctacatcagagcattcatactggcgaaaaaccctttgagtgtaaggaatgtaggaaggcctttagacttaattcatcccttattcaacatctgagaattcattctggtgagaaaccctatgaatgtaaggaatgtaagaaggcctttaggcaacattcacaccttactcatcatctgaaaattcataatgtaaaaatctaagaaagtcttttcaacttctgtgttatagaacattctatgaatgtagtaattaatctattttgctccatacatgcaactgcgttggcattagaggttttataccattaaaagagtgtgacaatgtattgtagtccatcatcactcaaacctgaaacttcagcatatttgttctaaaaactaatcctgttataagaatgaaaaagacatttaccgtcatccctatcccatcactttgtgtcatactggacaagacgcttaactgctctgtgctataattttttaatttatgacatggtcatataagagtgcagcagtttgacacactttcaatcaagaggtggaatctacatccctctgttgtatacaggaatctacatccctctgtgactgcttcgcccagtagaatatggtagacgtactgctgtgctggtttcttgactcagactttactggtagggttacttcatctcatgaaatgacagaactgtcttgttacaaagtctggctactttgctgaagagaccacatgaagaggccctgaaactacgtagagagggagaggcacctgctgaaccctgtcttcttgacatccaccaagataccagacatttgagtgaaattttggatccaccagaccagccaccagctaaatgccagtgagcgacttggtaacctgaactgatgccatgtagaatggaagaattgaccagctgagcccctggcccaaatttctgacccacaaaaacatgagatataataaaatggttgttgttttaagccacgaaaaaaaaaaaaaaaaaa

SEQ ID NO: 6018 - DNA, 1312 bp, Homo Sapiens
  NM_133467
ctacaggttgcgggcctttgtgaccccaggctgcggccgcaaggtgcgcagtagtgggctgggccggggcaccagtcgggtttggttttgctccgcccggccgagctgcagggaccgcacggtgcccgggtctcccgccgcagagcagccgctggcccgggccgggggagccggcgctgaccaccgcgcgctgtccccgcaggcagccggcctgccgccatggccgaccacctgatgctcgccgagggctaccgcctggtgcagaggccgccgtccgccgcggccgcccatggccctcatgcgctccggactctgccgccgtacgcgggcccgggcctggacagtgggctgaggccgcggggggctccgctggggccgccgccgccccgccaacccggggccctggcgtacggggccttcgggccgccgtcctccttccagccctttccggccgtgcctccgccggccgcgggcatcgcgcacctgcagcctgtggcgacgccgtaccccggccgcgcggccgcgccccccaacgctccgggaggccccccgggcccgcagccggcgccaagcgccgcagccccgccgccgcccgcgcacgccctgggcggcatggacgccgaactcatcgacgaggaggcgctgacgtcgctggagctggagctcgggctgcaccgcgtgcgcgagctgcccgagctcttcctgggccagagcgagttcgactgcttctcggacttggggtccgcgccgcccgccggctccgtgagctgctgagggcggccggcgcccgcccggcgtgccggagaggagaaagggcccgactgcccgccggaccctgcacccagcgactgggccccgcgcgcgccctccgcgagggtggaggcggcggctgtgtgcgcagggcccggcaccggactgggaccctggcgtccctccaggccttgcctcctgcgggaggacagtttggcttcacttctctgaccccagcctcggccgtaaagtgaaagagaccggaccagcttcagctttcggactctggttcttggatcgtgtcctctccccctcgccgccctcttcccccaatctgagccattgcaggcctctgcctgctgccccctctctcctcgggatcgggtccccagagccaccatctcctgagcctcccaccccgctgcctgggccctgtggttgctgggcctcccacctcaaggaggggaaggttgtacagcccgaacccgtggagcaatgccctgtctggcctccaaaaccaaaataaaactgggtcactttaaaaaaaaaaaaaaaaaaaaaa

SEQ ID NO: 6019 - DNA, 4615 bp, Homo Sapiens
  NM_133471
actttgccagagcggccgggtccccattcccattccttcaaatcccctttttcccggcagccgacctgtagacccaagggagacaggttgaagctagaaagagtcggggcagcagctctggtaggggagggagcatccaaaacctctggcttctgagcgcctctcctgccgcccatccacaaagccccccacagcctggcggctgccctcgaccccgcaaaacaaaggacttcagaggctggacctacagacccagatgagaaggcaaaagcgtagggaggagcggcaggagatgggaagggcgggccccgctcggagcagctgccgcttcctcccaaagtcccacgaggggcctgagtcacgggccaccgccctgggtcggcgagctgggggaagggatctggacacctggcgtgtccgggcgggaagctggtgagggcccctggggacagagcggaggaccagtggttggggcgagaagagggcagtcccgcagcgagtcccacgcggggtgggagggatctaggccccgccctctcctcggctccgccctgcgcccccttccctctcctcattgtccttagacaaagcggtcgccgcccccgcccggccccctggtctctgtctccgtccctcctcctttgctgcctctttccctcctcctctccctccctcctcccctccctccagtctccggatctccctcggtccctctctcctcctcttcctctctctggacgcccggctcctccgcaccccctcccccgggggtcccgcggcctgtgagttgactgaggggctcagacttggggagtgggtgtctcctcgcccctgtccttgctcccgtccctggcccggaccttggctgtctcctctttgtgccgagattgtcagtctgtgcggctacagcggggtggagacggccggctctgtcacggcttcatgagagcggggacggggcgcaggacttgcaggcgccggggagaagagacatggagccggcccttggcactctggggtcgcgtggggcagtcggtgggggaggcaggcggtggtgacaggacagggtgggggtggacgccagggttctgggaacgcgctggcagccctgacgcccgggttccgaaagtctcgggggtggctatttcccccgacccgcctcgggggcggagtgcggggcagaggggtgggggctggggagaggcgtggcccgagcggtgctggaagcggagccgggacctttggggcccgcgctgagacgcgcccggctgctgccgccgccctcctttcccctcttccctggtttcccttctcctctagacctgttcgctctccgcccctccttgcctccccaacaccccctcaggtcccgttgcctcctggtcctttcagggattcctggtccttccttcccacactagcctccctggggtatcgctgaggcagcctggcctgcacccaggttcccctcacccctgccacatttctctcttctccctcacgccaactttccttttcgcccttctctctctttctcacatcctagagacggtctttaatacgcattaaccctgtgctgccacatctggctcctgccctcattgcctccaatccggactcttcctctcacatcacccccaccacccccaacttgggctcacaacttctcttcactttttccatttccccagttctctgccttccgtctttccctctgtcctcatccttagcccctctgccctgctttgtgtcccacctctccccctccacttcctctcctcccaccctcagtctcacccccgggctgtctcactctctggagcctctccttcctgttctctgtccccagtgctccctaccctcacctcaagacgaccatggccaccatcccagactggaagctacagctgctagcccggcgccggcaggaggaggcgtccgttcgaggccgagagaaagcagaacgggagcgcctgtcccagatgccagcctggaaacgagggctcctggagcgccgccgggccaagcttgggctgtcccctggggagcctagccctgtgctagggactgtagaggctggacctccagacccggatgagtctgcggtccttctggaggccatcgggccagtgcaccagaaccgattcatccggcaggagcggcagcagcagcagcagcaacaacaacggagtgaagagctgctagcagagagaaagcctgggcctctggaggcccgggagcggagacccagccctggggagatgcgggatcagagccccaagggaagagagtcaagagaagagagactaagtccgagggagaccagagagaggaggctggggatagggggagcccaagagttgagcctgaggcctctggaggctcgggactggaggcaaagcccaggagaggtgggagacaggagctcccgactgtcagaggcatggaaatggaggctgagtcctggagaaactccagagcggagtctgagactagcagagtctcgagagcaaagccccaggagaaaagaggtggaaagtagactgagcccaggggaatctgcctaccagaagttgggcctgacagaggcccataaatggagacctgactccagagagtctcaggaacagagtttggtacaactggaggcaacagagtggaggctgaggtcaggagaagaaagacaagactactcggaagaatgtgggagaaaagaagagtggccagttccaggggtagctccaaaagagactgcagagctgtccgagaccctgacaagggaggcccaaggcaacagttccgcaggagtggaggcagcagagcagaggcctgtggaagatggcgagaggggcatgaagccaacagaagggtggaaatggaccctgaactccgggaaggctcgagaatggacacccagggacatagaggctcaaactcagaaaccagaacctccagagtcagcagagaagcttctggaatctcccggtgtggaggctggagaaggggaggctgagaaggaggaggcgggggctcagggcaggcctctgagagccctgcagaactgctgctctgtgccctcccccctcccaccagaggacgctgggactggaggcctgagacagcaggaagaggaagcagtggagctccagcccccaccaccagcccctctgtctcccccacccccagccccaactgccccccaacctcctggggatcccctcatgagccgcctgttctatggggtgaaggcagggccaggggtgggggccccccgccgcagtggacacaccttcaccgtcaacccccggcggtctgtgccccctgcgaccccagccaccccaacctctccagccacagttgatgctgcagtcccgggggctgggaagaagcggtacccaactgccgaggagatcttggttctggggggctacctccgtctcagccgcagctgccttgccaaggggtcccccgaaagacaccacaaacagcttaagatctccttcagcgagacagccctggagaccacgtaccaatacccctccgagagttcggtactggaggagctgggcccggagcctgaggtccccagtgcccccaaccctccagcagcccaacccgacgacgaagaggatgaggaagagctgctgctgctgcagccagagctccagggcgggctgcgcaccaaggccctgattgtggatgagtcctgccggcggtgaccatcttccaacatagggatatacctccctccttcttataactgaagatcctggagcccggaagattcagggcagacagaccctgataatgagcctggcagggaagggcaaccaacatcttgtaacttgctttccccaccctgtttctgggggcagagccaattgcccaatttctaccctaatccaaagtccctggtgtgggtggggttaaacgtgctggtgcatcctaggtcatccaagagtgagcgccaagtcctgagaaggggcacagaactccctggagggtggagatggagcacctgccccccatggcagggtacactctccccacagccttcctccccaccatcccgtggggactctcgggatttaagcactcgtctctctgggaggcccagaccccactccatttataggcacatctccttcatttcctaggtcactgcccctttgtttacagctcctgcctcctcccttgaccacagcctggtttacaaattccatcagctcccagccccacctgccaaagtcccaggtttacaagccacgcttacttgctgtgtctgcgtggaattctctcctctgtcccctccagtctcctcattggagtgacctgaaggtgtggcttcctccactttttctcagtattactttgccttagttttccccaagagggaaggctggaactcttaactctgtaccccttgatagttatttaattctgtttctcctagtggttcacaattgaactgaattgagatggtgtcgggtggctaaggagacacctcacctctccttccccattgtgccgcctttatcaattgcctgttttgttttgtttgttttttaactttccataataaaatggagttctcttcaaaaaaaaaaaaaaaaaa

SEQ ID NO: 6020 - DNA, 3861 bp, Homo Sapiens
  NM_133473
tttgtctctcgccgcagcctgagctccaggtctccccttcgctgctctgtgtcctctgctcctagaggcccaacatctgtggccctgtgacctgcaggtattgggagacccacagctaagacaccgggaccccctgaaagcctagaaatggacgacttgaaatatggagtgtatcctctcaaggaagcaagtggatgccctggggctgagaggaatcttctagtttactcttattttgaaaaggagacattgacatttagggatgtggccatagaattctctctggaggagtgggaatgcctgaaccctgctcagcagaatttatatatgaatgtgatgttagaaaactacaaaaacctggtcttcttgggtgttgctgtctctaagcaagacccagtcacctgtctggagcaagaaaaagagccctggaatatgaagagacatgagatggtggatgaacccccagctatgtgttcttattttaccaaagacctttggccagagcaagacataaaagattcttttcaacaagtaatactgagaagatatggcaaatgtgaacatgagaatttacagttaagaaaaggctccgcaagtgtagatgagtataaggtgcacaaagaaggttataatgagctaaaccagtgtttgacaactacccagagcaaaatatttccatgtgataaatatgtgaaagtctttcataaatttttaaatgcaaatagacataagacaagacatactggaaagaaacctttcaaatgtaaaaaatgtggcaaatcattttgcatgcttttacacctaagtcaacataaaagaattcatattagagagaattcttaccaatgtgaagaatgtggcaaagcttttaaatggttctcaacccttactagacacaagagaattcatactggagagaaacccttcaaatgtgaagaatgtggcaaagcttttaagcagtcctcaacccttactacacataagataattcatactggggagaaaccatatagatgtgaagaatgtggcaaagccttcaaccggtcctcacaccttactacacataagataattcatactggagagaagccctacaaatgtgaagaatgtggcaaagcttttaaccagtcttcaacccttagtacacataagttcattcatgctggagagaaaccctacaaatgtgaggaatgtgacaaagcttttaatcgattctcataccttactaaacataagataattcatactggagaaaaatcttacaaatgtgaagaatgtggcaaaggctttaattggtcctcaacccttactaaacataaaagaattcatactggagagaaaccctacaaatgtgaagtgtgtggcaaagcctttaatgagtcctcaaaccttactacacataagatgattcatactggagagaaaccctacaaatgtgaagaatgtggcaaagcttttaaccggtccccacaacttactgcacataagataattcatactggagagaaaccttacaaatgtgaagaatgtggcaaagcttttagccagtcatcaatccttactacacataagagaattcacactggagagaaaccctacaaatgtgaagaatgtggcaaagcttttaaccgatcctcaaatcttactaaacataagataattcatacaggagagaaatcttacaaatgtgaagaatgtggtaaagcctttaaccaatcctcaactcttactaaacataggaaaattcatactagacagaaaccctacaactgtgaagaatgtgacaatacatttaaccagtcctcaaaccttattaaacaaaataattcatactggagagaaactctacaaatgtcaagaatgtgggaaagcctttaagcagtcctcaactcttactaagcattaaatattggccgggtgcggtggcttatgcaaaatggctcccagcattttgggaggctgaggtgggtggatcacaaggtcaagagatcgagaccatcctggccaacatggtgaaaccctgtctctactaaaaatacaaaaattatctgggtgtggtggcacgtgcctgtattcccatctactcgggaggcttaggcaggataatcacttgaacctgggaggtggaagttgcagtgagccaagattgtaccactgcactccagtttggcaacagagtgagactccgtctcaaaaaaaatttatactgtacaaaaaccccacaagtgtgaaaaacatggcaaagcctttaagaagccctcaattcttaacagacataagataatttatactggagagaaactctacaaatcagaaagatgtgactacttttgacaacgcctcaaacttttctaaccataaaagtaattatactggtgagaaatcctagaaatctgaagagtgagataaagcctttaaatggttgtcacacttcattgtaggtaagataattcatactggagaaaacgcctacatgtgtgaacaatatggcaaaacttaatgctcacactttattgctaggaaagcatttatacttgagataaattatacaaatataaagactgtgaaaaagccatcattatctgctcacattttactcaacacagagagttcctgcttaataaaagcattataagtgcaattactgtcaaaagatctttcagaaaatataagcttttttagtgaagagtatttattttgaagttgaacatcacaaatataaaaagggttgtagtgcctttacttgtatcacagatctttttgtagacattttcttctagaggaaaactctgaagcagttgatcaaactttgttcaacatcagggaatttatattgaaaaattgtgcaaatataataaatttggaaaaacaatttttcaaaaactacagcttagaaatcaacagttatactagaatatattttttccagatgcagtaaaagtaaaatatttaatccataattaagtctatgcaaatatcagagaatttatggtagaaatatataaggtactgacacttcagatatactaaatcagagtgctaagtatagaaaatctgaaactaaagttggtagaaaagttatttgtatagaactttaagaggatcagaaggttttttgcagagttataattacattcaaagtatactttatttcttgaaaaatattacagattttttgaaaattgaataatgtcatcattcaactctgaaattatttcctgttgtttcttcattcctattggattcacatgtgaaagcatggggttaattgttgctacatcaaagagagagattcttttgtttgtttgttcgtttgttttttgagactgagtttcactctttcgcccaggctggagtgcattggcatgatctcagctcactacaacctctgccttctggtttcaagcaactcttctgcctcagcatcccaagtagctgggataacaggtgccagccaccatgcccagctaatttgtgtatttctagtagagatggggtttcaccatattggccaagctggtcttgaactcctgacctcatgtgatccgcccgcctcagcctcccaaagtgctgggattacaggcttgagccaccacgcccagcctgtagcatattttaataggagaatacaatatataatagtagcagggttaagtaaggcatccatcatctgtagcatttctcctttgttttacaaacaatccaattctacactttaaaaaaaaatttttaaatgtacaattaaatttttatttaccacagtgttatttttatcgtcataataaaaattatatacgagtataaatgaaattcatttctaaattcttaataaatattttctcatgcaaaaaaaaaaaaaaa

SEQ ID NO: 6021 - DNA, 5170 bp, Homo Sapiens
  NM_133474
aaaagagacgctggagcggttaaaaaaaatttctgaggtggggaccataatggaagagaccaccggggagcgccgagaagaaatccgagcagcgaggctcagaaaaaaggtcttctaggggatgtggggtcaggggagcggagacgccggggaggggtccgtaccagccgagggttcgggcgctgggggctccgctccgtgttccgctctggcagaggaacgaacgggagccgggaagaatccccgaaggaagaccgcgatccctagcacctcgatcgctacgcaacaggtagcgaaagtcccggagcccagccgcatcgtggacacgctaggctggatgcggaaccgaccccacctggagcctcgccctgctgcagccgcgcttccggctccaggtagccgcctctaagcaataacgccaggccttatcgtcgcagcgacagtggcgtcacgtccgccggcgcgccacagcagcgcgtcacttccgccagcccgccacagcggggcgtcacctcggacatacgaacagcgggcggtgttcccggctccgtggggccgtcttcccggcgagtccgcgacggtcgccgcccacggcgaggaacccttaacattcagggatgtggccatagaattctctccagaagagtggaaatgcctggaccctgcccagcagaatttgtatagagatgtgatgttggagaactacagaaacctggtctccctagctatgtgttctcatttcacccaagactttttgccagtgcaggggatagaagattcattccacaaacttatactgagaagatatgagaaatgtgggcatgataatttacaattaaggaaaggctgtaaaagtatgaacgtgtgtaaagtgcagaagggagtttataatggaattaataaatgcttgtcaaatactcagagcaaaatatttcaatgtaatgcacgtgtcaaagtttttagtaaatttgcaaattcaaacaaagataagacaagacatactggagagaaacactttaaatgtaacgaatgtggcaagtcatttcagaagttctcagacctaactcaacataaaggaattcatgctggagagaaaccctacacttgtgaagaacgtggcaaagactttggatggtacacagacctgaatcaacacaagaaaattcatactggagagaaaccttacaaatgtgaagaatgtggcaaagcctttaataggtcaacaaaccttactgcacataagagaattcacaacagagagaaagcttacacaggtgaagatcgtgacagagcctttggatggtccacaaacctgaatgaatataagaaaattcatactggagataaaccctacaaatgtaaagaatgtgggaaagcctttatgcattcctcacacctgaataaacatgagaaaattcatactggagagaaaccctacaaatgtaaggaatgtggcaaagtcatttcctcatcctcaagctttgctaaacataagaggattcatactggcgagaaaccctttaaatgtttagaatgtggtaaagcctttaatatttccacaacccttactaaacataggagaattcatactggagagaaaccctacacatgtgaagtatgtggcaaagcctttagacagtccgcaaacctttatgtacataggagaattcatactggagagaaaccctacacatgtggagaatgtggcaaaacctttagacagtccgcaaacctttacgtacataggagaattcatactggagagaaaccttacaaatgcgaagactgtggcaaagcctttggacggtacacagccctgaatcaacacaagaaaattcatactggagagaaaccttacaaatgtgaagagtgtggcaaagcctttaatagttcaacaaaccttactgcacataagagaattcacaccagagagaaaccctacacatgtgaagatcgtggcagagcctttggattgtccacaaacctgaatgaatataagaaaattcatactggagataaaccctacaaatgtaaagaatgtgggaaagcctttatacattccttgcacctgaataaacatgagaaaattcatactggaaagaaaccctacaaatgtaagcaatgtggcaaagtcattacctcatcctcaagctttgctaaacataagaggattcatactggcgagaaaccctttgaatgtttagaatgtggtaaagcgtttactagttccacaacccttactaaacataggagaattcatactggagagaaaccctacacatgtgaagtatgtggcaaagcctttagacagtccgcaatcctttatgtacataggagaattcatactggagagaaaccctacacatgtgaagaatgtggcaaaacctttagacagtccgcaaacctttatgtacataggagaattcatactggagagaaaccttacaaatgtgaagagtgtggcaaagcctttggacggtacacagacctgaatcaacacaagaaaattcatactggagagaaactttacaaatgtgaagagtgtggcaaagactttgtatggtacacggacctgaatcaacagaagaaaatttacactggggagaaaccttacaaatgtgaagagtgtggcaaagcctttgccccatcaacagacctgaatcaacacacgaaaattcttactggagagcaaagttacaaatgtgaagagtgtggcaaagcctttggatggtccatagccctgaatcaacacaagaaaattcatactggagaaaaaccttacaaatgtgaagagtgtggcaaagcctttagtaggtcaagaaaccttactacacataggagagttcacactagggagaaaccctacaaatgtgaagatcgtggcagatcctttggatggtccacaaacctgaacgaatataagaaaattcatactggagataaactctacaaatgtaaagaatgtgggaaagtgtttaaacagtcctcacacctgaatagacatgagaaaattcatactggaaagaaaccctacaaatgtaaggaatgtggcaaagtcattacgtcatcctcaagctttgctaaacataagaggattcatacaggtgagaaaccctttaaatgtttagaatgtggtaaagcgtttactagttccacaacccttactaaacataggagaattcatactggagagaaaccctacacatgtgaagaatgtggcaaagcctttagacagtcagcaatcctttatgtacataggagaattcatactggagagaaaccctacacatgtggagaatgtggcaaaacctttagacagtctgcaaatctttatgcgcataagaaaattcatactggagagaaaccctacacgtgtggagactgtggcaaaacctttagacagtctgcaaatctttatgcacataagaaaattcatactggagataaaaccatacaagtgtaaagaatgtggcaaagcctttaagtcatactacagcattcttaaacataagagaactcataccaggggaatgtcttacgaaggtgacgaatgtcgcggtctttaaatgctcctcaatcctttctaatcataagataattcataatgaagagaaactctaaaatgtgaaaaatgtgagaaggcttttaatcacacctcaatctgttgtagacataagagtaattatattgatgagaagccaaattaaaattaaaaatgtggcaaagacttccaattctagtcagttcttaatgtaattcctactgaagaaaacacctggaaatacaaaaaatgtggcaaaacttgtaaccaatgcttagcatttttgcacatgatagtatttatatgtgagactacttgtacaaacataaaaatatacaaaagctattgtctacttgaaatttatagttaataaaagcattataaatgtaatttctgttgaaagaccttttagaaaatataggccattaaagtgaagaatagtcttaagacagagaatacaaagataaagagggctctagtacctgtacttgtatcccagaacttactatatgcattttgtactagaggaaaactctgaagcagttgcttaaactttgttcaacatcagagaatttatattggagagaaatcctacaaatgtaataaatgtggaaaaacctctgttcagaaactgcaggttaagaaaccagaggccaggcgcggtggctcacgcctgtaatcccaacactttgggaggccaaggagggtggatcacctgaggtcgggagttcaaggacagcctgaccaatatggagaaacctcgtctgtactaaaaatacaaaaattagcaggacatggtggtgcatggctgtaatcccagctactcaggaggctgagacaggagaatggcttgaacccaggaggtggaggttgcggtgagctgagatcgtgccattgcactccagcctgggtaacaagagtgaaactctgtctcaaaacaagataaaaagaaaagaaacaccagagaatttttactagaatataatttgtaggtgcagtaaatgtgaagaaatatttaggctaaaattaagactatgtaaacatcagaggatttacagtagaaagaactaaggaactaacacttcagactttaaaataaatcagagtattaagtataacaaaagttgaacctgttagaaaatttccttgtatataagttgaaaagtaggtttttgaagagatatattcgaaatatattttttcacttgaaaaaagtaaaaatttttttcaaaagcaaataattcaactctaaaattatactatttcaacattctcatttatgtgaaagcatgtgataaattgttgctgcgtcagagatatgagaaactcctttgcattaggtgggcattattcatagacttctacatgaaagagaagagaaataaaagatgcaccaggaaaatctgagcagagaggcttttagtggttgacttactgagtgatgcctgaagtaggtgttcagagtaatactttgcgttatactgagagagaatctgaattttagtagtaaattgttttgccaactgtatatttatgtaataagtgcaataaaatgcagtaaattttaaaattctcttaagataatgtgtgaacttaatttttgaaataaaaattgttattgtgttaaaa

SEQ ID NO: 6022 - DNA, 3117 bp, Homo Sapiens
  NM_133476
gcaaggggagggcagcaaggagggggggccacccactacctcgcgcccccgccctgcgggtgtctcgcgcgcgttccgtgcgtgtgagtgtgtgggtctgtctcgctccagaagtgcgtgcccgcgcgctgcgccttgcgctttttcccctccctcgccccttcctggtcctcccaccctcctcggctccctcctttcccagcaaacgccgcccctcccgcgccctggctcaggctctggcgccgccgcagccgtcgccgcccgaaagttcaggagccctggaaaggagaaggaataagacggcaggaggaagagagagagagggtagaatggaagaatctcacttcaattctaacccgtacttctggccttctatccccacagtctcaggtcagatcgagaacacaatgttcatcaacaagatgaaggatcagctgttgccagagaagggctgtggtctggccccacctcactaccccaccttgctgacagtgcctgcctcagtgtccctgccctcaggcatcagtatggacacagagtccaagtcagaccagctgaccccacacagccaagcgtccgttacccagaatatcacggtggtccctgtgccgtctacaggactgatgactgctggagtctcctgttctcagaggtggagaagagaagggagtcaatcaaggggtccgggtttggtaatcacgtccccctcaggctctcttgtgaccacagcatcatcagctcagaccttccccatttcggctcccatgattgtctcagctcttccccctggctcacaagccctgcaggttgtccctgacctctccaagaaggtagcatcgaccctaaccgaggaaggaggcggaggtggtggtggaggtggcagtgtggctcctaagccaccccggggccggaagaagaagcggatgctggaatcagggctgcccgagatgaatgacccttatgtcctctcccctgaggatgatgatgaccatcagaaagacggcaagacctacaggtgccggatgtgctcactgacattctactccaagtcggagatgcagatccactccaagtcacacaccgagaccaagccccacaagtgcccacattgctccaagaccttcgccaacagctcctacctggcccagcacatccgtatacactcaggggctaagccctacagttgtaacttctgtgagaaatccttccgccagctctcccaccttcagcagcacacccgaatccacactggtgatagaccatacaaatgtgcacacccaggctgtgagaaagccttcacacaactctccaatctgcagtcccacagacggcaacacaacaaagataaacccttcaagtgccacaactgtcatcgggcgtacacggatgcagcctcactagaggtgcacctgtctacgcacacagtgaagcatgccaaggtgtacacctgcactatctgcagtcgggcatacacatcagaaacataccttatgaaacatatgcgcaaacacaacccgcctgatcttcagcaacaggtgcaggcagcagcagcagcggcagcagtggcccaggcccaggctcaagctcaagcccaggctcaggctcaggctcaagcccaggcccaggcccaggcctcccaggcatcacagcagcagcagcagcagcagcagcagcagcagcagcagcagcaacagccaccaccacacttccagtctcctggggcagccccccagggtgggggtggtggggacagcaatcccaaccctccaccccagtgttcctttgacctgaccccgtataagacggcggagcatcataaggacatctgcctcactgtcaccaccagcaccatccaggtggagcacctggccagctcttagagatccgtgctgccacccactgggaagaggaagaagtagtcctggtgtcttctttctccaactcttggtgggaaaagtccttttcttccttgacaggccttggctccatctccttgggcctctgtcacggctttccttcacaggataccatcctttttctgaactcttcttcaaaaggaacatcagccctcctgattgcaaaggaatactgagctgatggtgtcatccagcagcctcccctcccaagcaaagcttctaaaactgggggtcggtgctcaagggaaggatttgctatgacctcatagaaccttgtccagtgtggccacttaccctatccttaccctccttatcctcaaagtttgggctgatgtaagactagaggctggccctcccagataacagagaaaagggagccccaaatgcaaccagcctcttgttctattcttgcctgcaaaagaacagaggtttctcaaatgcctcagtccctgagagccatttcttcccctacatcgtctcactttgcttcctattgactgctggtagaaggagatttggggtaggggctagacctccttttatttgaagggggcaagggctgagatgtggtccccaaggggccagaaattcccaagttggtcacaggtggcttagaagtgtgtgttatggttttacggatttccttgaagcctctctccttctctgcctacaaagaccctatactctcagtctccccaacccacccccaaggagctgtgggaggctttgtgttatctgtgaaactccaaaacaggggtgttgcggagaagggagagttcaaggcaaacgcaaggactggacttagctccctaggtgccacagtcagatgccggacacggatttatatataaatatatatatataaatatattatactcactcatcacggccatctttgttgtaaccatttctgtgtttataaatgcattatctctgagaattttcatatttgatgttttgtttatttttgtcctttttttccctctctccacccctgtcctctagccacagcatttttctttttgtcttttttttttttttttaaatcatggcagatttcagaggaaaggaaattaaaaaaaaaatcaggaaaccagttgttataaagtaatttaaaaatgaagaaaaaaagaaaaaaacttatgtacaaaccaaggggtgtttttagaacattgtatagaaataaattcatgtaaaagga

SEQ ID NO: 6023 - DNA, 8232 bp, Homo Sapiens
  NM_133496
gcggcccgggccggaagtaagcgaattcccgggtgtgtgtctgtgtctgtctgtgtctcgcagcggcgcgcggccccggacaagcgctggggattcccgtttgaggcgtcactactgtcactgccatcaccccacggagccacttctagaggggagtagacccggcccttcgccgggcagagaagatgttgcccctgtccatcaaagacgatgaatacaaaccacccaagttcaatttgttcggcaagatctcgggctggtttaggtctatactgtccgacaagacttcccggaacctgtttttcttcctgtgcctgaacctctctttcgcttttgtggaactactctacggcatctggagcaactgcttaggcttgatttccgactcttttcacatgtttttcgatagcactgccattttggctggactggcagcttctgttatttcaaaatggagagataatgatgctttctcctatgggtatgttagagcggaagttctggctggctttgtcaatggcctatttttgatcttcactgctttttttattttctcagaaggagttgagagagcattagcccctccagatgtccaccatgagagactgcttcttgtttccattcttgggtttgtggtaaacctaataggaatatttgttttcaaacatggaggtcatggacattctcatggctctggccacggacacagtcattccctctttaatggtgctctagatcaggcacatggccatgtcgatcattgccatagccatgaagtgaaacatggtgctgcacatagccatgatcatgctcatggacatggacactttcattctcatgatggcccgtccttaaaagaaacaacaggacccagcagacagattttacaaggtgtatttttacatatcctagcagatacacttggaagtattggtgtaattgcttctgccatcatgatgcaaaattttggtctgatgatagcagatcctatctgttcaattcttatagccattcttatagttgtaagtgttattcctcttttaagagaatctgttggaatattaatgcagagaactcctcccctattagaaaatagtctgcctcagtgctatcagagggtacagcagttgcaaggagtttacagtttacaggaacagcacttctggactttatgttctgacgtttatgttgggaccttgaaattaatagtagcacctgatgctgatgctaggtggattttaagccaaacacataatatttttactcaggctggagtgagacagctctacgtacagattgactttgcagccatgtagtgaatggaaagaaattatgcaccttttatggaccaaatttttctggtactgtacgatccaaaacattgtacccagctttttaaaagagagaaattatcactacaactcccgagcactaagtagacggggtagagtcagccgttcatgctttgtggggagttcacagctaagggatcagatttaagaggatatctcctggacttttggtcttttcttttgtgctctttcctccaaatctttttgacttctgaggtttttagcttaggatgttaatttgtccttttgtctttctttttttgtttttgttttctgtttgtttgttttcatgttgaatgcccacaccaccatcctctcatcccagccagtaagaatttcagttgtgggcctccagtcttctggaatgtcttcactgcagctgctggaaatcactgctttcattcccacaaaaccagtattacttttttttaaaaaaagaaagaaattggaaatctgtgctatacgtaatgtcataattgttgacgttcttcagtataatcatgtttgttaaattgtttgtaccttgcaaacttatgaaccaaaccatattgggttttcaaagtgcctttgtatccaaaaatgtatttgccagcatagaaatgtaccatcaagagtcatgtatgttttatttttgtttttattttttattttttgagatggagtctcgctctgtagccaggctggagtgcagtggcataatctcagctcactgcaacctctgcttcccgggttcaagctattctcctgcctcagccttctgagtagctgcgactatgggcgtgtgccaccatgcccagctaatttttgcatttttagtagagatggggtttcaccatgttggccaggatggtcttgatctcttgacctcgtgatccgtccacctcagcctcccaaagtgctgggattacaggtgtgagccaccacgcccggctatgtttttttttttttttttttttttttttaacaatggatattctgtaaaatatcctgtacaaaacaagactattgccagtaatgtatacaaattgtctttttgtgtacttccagcataggtttggatatatgaacatttttcttttattgttttatcttcacagaaaataaaaggtgttaatttgctttttaaaacaaatttaattatcacattttaaattactttgtggactgtgttttcaaaactttgcaaattcatctgttacacagaaaattttgacttaaaacatctgctgaattccaaatttctgtaatagctactgtatctgtgataaactttcctatatctttccttgccatttctatggattttataatgaaagaaaaaggcattggagactgaaggcagaaatggttgtgacagtgctgtttggctttttcattcttcaaatgccaagtcatccactttgttttcctgtttaggctttgcacaaatacaattgctttcaggaatcctaaagcagcattttattgagtttgaattattaaaggtacagaggaaatgtggtgatgtagaacttttcctaacacaggtatctaggaagtaagtgctgagttgattttctaggttcttacgtatttgaaaaataaaattgcaattcgagataagtgcttgagcactctacttaagtattctctgtgttttatgaagagaaaatgatctgattttcccttatacttcattttacaatacatattcccttttaacttaaaaaaattgtaaatgtgggagaaaaaaccctgcaggatggaaacaattattaagaatgtagatcaataagtactttttagtgatgtggcagaaatccctgttgattctaagttttagagtgtcttttcccctatttctgacctacaactataaactactctctattaggagaactagaccactttcttcattcttttctaaactgctgcagattgccgtgaactctatcaatagtctcttttccgcaggcaaagtggcattttctaaacatgtttgcttactgccaggtggtttgaaatctatgatttactgcagtagtatgtgcttaaaacaactgttgaggtcttttaagcaggaaagttcaaaaggaagtgtcctgataatggtactggtttttctacaaatataagtagtcattagaagtttgcaaccaccaccaagtctgagagaactctgggatattctgtgggttttggcatattagatagagaaaatgacagatctagatgaagggagcttttggatgtgtgcctttaaaaactgattatgtataaatactgatatttcacatacggagatatttgaagacccaagtctgcctttcacagagccctccattccaagtttagtttttgtcaaaatatgaatcattttatttgactgtactatcagtacacaaatgcatgagtatgtttatacagtgttagactgatgtgaatttgcatttgttacattacattgccagcgcatatcatttagcaagttggcattaacatttatgctttaattaaatgccagtatacctatgtgtgcagcagtaaaaaattagtgagaaaaagcaactttttgtcactcttaggaaatattttgtcttattagtgttcttggcacatgtatattactaaagtagataattccaatgagaaatactaccagattattgttataaaattaatttacaatgtccctgatattgagctaactcttaaaaaaaccaaacaaaactcgtatctgagtgtaactttgccaatattttaaaagccaaaatattctctggacaacaaatttgtattgctcagggacagtttaccttgcctggtaaaccttcccaaacagaaatatagctatactatctttggttttgtttttttgttttttttgtttgtttgtattagatggaatttcactcttgtcgcccaggctggagtgtagtggcgcagtctcagctcactgcaacctccacctcccgggttcaagtgattctcctgtctcagctccctgagtaactggaattacaggtgcacgccaccacgcccggctaatttttgtgtttttagcagagacagggtttcaccacgttggccagggtggtcttggactcctgacctcaggtcatcctcctgcctcggcctcccaaagtgctgagactacaggtgtgagccaccgtgctcagccactagctttggttttttaaacatagattatattcctcaagatgaagggcttaacatatccacagcttcctcagtttgctaactccccatgcatctttgtgaaggacagtatctagtttatctgtaggtcagtgttccttgtgctgtcatttcccttatatctggaatttgtcagcattcctgaaaacctacacgtgtatatcagtaaccaaaatgctatgccttttttgcacctttgtacagcagccaaatcatgaactcaaaatgtatttgatcacagttctataatgtttttacctacctattatggaataatcagtttttacagagattattaatatggtagaaccctgttatgtaattccaaaacttaagaaccatatttacattgcttaacacagaattttacatctaagcaaggactggctttagaagcagtgtagttctacctctcattttacagatgagaaaaccgaagcccagaaaaactctcatttgctcaaagtcacagagaaaattagtggcaaagccaaaaagattcagatcttctgactcgaagttgagagttctttatactctattatgctgcctctccagtgtaatatttgcctttctgtaaatgggattaaatatgatttgtaaataaaggacatctgacctccttttttggtacattaaggcactttataaatggacttttattgtctcatttttcgtatataattatttccatcatattctttatggaagatgcaattaattttaacttttttactcttataaaaccagttcctgacattttaaaaaacaatatctgtaaaatggatccttttatgagtgaatttttctgctaattgcccaaggctaaatccaatttaaggattgcttagtttctttattttgtttatggtctctgaactggtatttttttataaaccaggctaattcacaggtcataccatttcattcttgtcgtgttggcttccagtcactggaaaagcttttgcattttaaagatttttagagccatgcaaaactgggcattaaatgttgcataaagcaaatcttttaagtaaggtaaaatgttgaagtcttaaccagaattcctacaactaattactaaaactgctatttctaactcttcatgaaagcattacctttggaaagttaaactttttttttcctttcatcaccgtctttgaaacaaattattttccaattcataagaactttggtaaaaaaaaaaataaaaggaaattatatgtttttctttggacattcattggaaggcttgttgaagacatgatcccccagaagccttagtgacccagatctcaaccagagactcaagatagcctcaaatacagtgaaagattatgtatccaaaaaaaaaaaaaaaaaaaaaagaaaaggagcagggaaggacagttctagttaaagccaaatggatgtgagtctgacaagggtgtctttgatttatatttcctaactgcaaattacacagaaagtgagaatggggaataacttttattaagtatttatgtgccaggcggttagtgtggccttcatgttattacatttaatcctcaaatttctacaaaggaataattttgcatgattttatgattgacggagcattttcaaatctcctctaattctcataacatctctgtgaggaaggaatttttatccttattttacagatgaggaagctgtttggagataatttaagtgacttgcctggggaatctagccagtagtagagtactgattaatcaggtgctgacatctgctctgctttgtgtatgtaattcagcagtgcttcaaagatccaagaagctgtagcagatctcaatacactctcctataaaattagtgaataatcaccatgacaaaattggtatggcggaacagtcattatacattatttagactcattccttcttccagtgcccttatgattatttcctacctttaccattgatcttaaactgtgcaggctaaaaagaggaaccagaactcccttaagcacttttaagactatttaaaaaataaagttttgttggcattgaagagtaagctgcttaagggactgaatgaaaagatagtaccctttgtggctgtatgaagagagaaactgaatttctatccaagagaccttaatttagtttattagggaattatcttccccaaaagtacaagtaattttgcactgcaggagaaggataagtagatttgatttacatcacattttatacacacctttcaaaaggaagaaatctgtttcataaatagtagtaatctatgcttaaacttaacatttaatgttgacttcttacaacagccttgaaaattatttgtaattttgatcatgatgttggaaagcttgtaataaagaatatctttctcttctgcatccttttatcctcaaacttagcatggattcacatgctgagtaaatgtttggttaactagtgaacattttagatagttgtgtcaaaaataagggttagggataggtaaaaccagtaatttactgttttttacagaagacatctcagcatttctttggcatttttgcacaaataaatgactatatattcaccttggccatttttttttttaagtagccctatgagctgctcattctttttcatatacagtggaagtatacagatgttatccattttacaaattgttggatcggaatttgacagaattgggactgtggaacctgggtcacttgaattttctatattttgtatggccaaatcaggaaccagacagtctccatagtctcctttgtttttatggaaaattgccatattcacatatttcatttatcctaatgtattgtcatccaaaatgaaagaggtctttcttgaaggtgctttaaagacatcactacatgtattcaattactgatttaaatattcccagaattattttttacctttctctttttcctctcaaacacaaaattttagtagtacctccctctatttcttcactgatttttcatctgttttcattgttatttccactatagaacttctactttatactagcggggaaaatttttttatttagaattttaatatttgaattttgtttatgtatcacatactgtgctacagttagcctcaatgaagattctattttgaactagacatcctgtcaatagtttgtcaagtaacttcattgcttcctttgatagcaattcagtgaaattttttcccaagtgatattttcccccaacttttgtgagtttgataaataggatgagtcttttatattggaaatactgtgaatggaaaattgccaaatcccttcttagtatattttaagcaccctacaacactttacctccctgcctttagtggtatttaaacatatggccaagttagtatttgggtttgattcctttggtgaagattaaggcatcaaaacatttcttaaaatgtttgagtacaaggctaagttataatgtcaactttcaaagactatgttgtgattcggtttgaatatgctgaagtgagcaattatgatttgcccaagtgcaatacaacaaatctataatgtatatttcacattttctacttgaacacattcatgtatatattttgttaaacttcatatgtatttaaaaagaatcatgaactgtatcaaaattctttcaataaaatttctatttaaaaatctcaaaaaaaaaaaaaaaaaa

SEQ ID NO: 6024 - DNA, 3320 bp, Homo Sapiens
  NM_133625
agaccgccgctgctgtctgcggggtctggtgccggggcctgagtctctgctggctaagccgacgcctcagccgcctcagtcgcctcaatctcgccttccgccctcgctctccctccgcgccaccggaccccgtagccccgcgcgcccccagacctttaagccagatgatgaacttcctgcggcgccggctgtcggacagcagcttcatcgccaatctgcccaacggctacatgaccgacctgcagcggcccgagccccagcaaccgccgccgccgccgccccccggcccgggcgccgcctcggcctcggcggcgcccccgaccgcctcgccgggaccggagcggaggccgccgcccgcctcggcgcccgcgccgcagcccgcgccaacaccgtcggtgggcagcagcttcttcagctcgctgtcccaagcggtaaagcagacggccgcctcggctggcctggtggacgcgcccgctcccgcgccggcagccgccaggaaggccaaggtgctgctggtggtcgacgagccgcacgccgactgggccaagtgctttcggggcaaaaaagtccttggagattatgatatcaaggtggaacaggcagaattttcagagctcaacctggtggcccatgcagatggcacctatgctgtggatatgcaggttctccggaatggcacaaaggttgtccggtccttccggccagacttcgtgctcatccggcagcatgcatttggcatggcggagaatgaggacttccgccacctgatcattggtatgcagtatgcaggcctccccagcatcaactcactggaatccatatacaacttctgtgacaagccatgggtgtttgcccagctggtcgctatctataagacactgggaggagaaaagttccctctcattgaacagacatactaccccaaccacaaagagatgctgacactgcccacgttccctgtggtggtgaagattggccacgctcactcaggcatgggcaaggtcaaagtggaaaaccactacgacttccaggacattgccagcgtggtggctctcacccagacctatgccactgcagagcctttcattgactccaagtatgacatccgggtccagaagattggcaacaactacaaggcttacatgaggacatcgatctcagggaactggaagacgaacactggctctgcgatgctggagcagattgccatgtcagacaggtacaaactgtgggtggacacctgctctgagatgtttggcggcctggacatctgtgctgtcaaagctgtacatggcaaagatgggaaagactacatttttgaggtcatggactgtagcatgccactgattggggaacatcaggtggaggacaggcaactcatcaccgaactagtcatcagcaagatgaaccagctgctgtccaggactcctgccctgtctcctcagagacccctaacaacccagcagccacagagcggaacacttaaggatccggactcaagcaagaccccacctcagcggccaccccctcaagggggccctgggcaaccccaaggaatgcagcccccaggcaaggtgctgcctccacgccggctcccccctggaccatcactgccaccttcctcctcttcctcctcttcttcctcctcctcggctcctcagcggccgggcggccccaccacccacggagatgcaccctccagcagcagctccctggcagaggcccagccacccctggctgctccaccacagaagccccagcctcacccacagctcaacaagtcgcagtccctgacaaatgccttcagcttctctgagtcctccttcttccggtcttcagccaatgaggatgaagccaaagcagagaccatccggagcttgaggaagtcctttgccagcctcttttcagattagctcttcagacacacggggcacccagcccaaccgggaaaggcatctaagacattcaccaacaacagtcagccagcttggtggttatgtcccatgaccttgacgtgtgtggtcccttcctctgctctgttgtactaagtgatgttgtgcagcccagaaaggaccatttgacagtctcagggcaggtgcctacccagcaaggggtacctggcatcagagaggaaagagctgcttccctgtagtcatgagagcttccttctgaagtcatcgttcgctgtgagtttagtggccttattgtgacagtgccatcatgtcttattcttccctgtgaaaccaggattaatcgtggactcctggcagcttaacctagctcagttgcagtgctaagcatgccccgcccccattcagtgatacctgtttgggaagtatatacttccccaaaagtactcttggccctaagttttaggaactttccccgacctggatcccttgtcatacctgtgttactgtttaaagcacacccacccaacttacaagatcttaggctgctgtggtggtgaagcaccttgagtctgctgatattcgggagaacaaggatctgcagtttccccttttctcccctctgaagagtggttcttatgtgcaatctgcagtaaccttgaactccagagctgcactatagaggagaatgcatgccactatgacagcagtatgccaagctttgtgttcatctcctaataaacgttaagacctttggtgtaataaaagcagcagcattcaccaacatttgattcagccatgaggtcttgaccccttggccaccctttaggctgagagagtgtccatgaggggtgtgtgtgtgtgtgtgcttgagtgtagggagtgaaaaatctaggtgtgtgaagctgtttgtgtcagtttgtgtgtgtgactgcaggtgtacatgtgtttgcaagtgtttgagaatgtgtctgtcctttacataccacttctgggcctcctcgcacctccccagtgaatctgtctcctccaagacacctagccttccttcagcaactcagcgtttctacctatattacggactttgtaacctttcaaataagcacagaacccttgctcccggaggagtcaatttagactcacttgcctggtctatcatcaagctcctcagctgaggcccacatggtggtgccaatgaggctggaccaacctgctctgacaaccaggctcccacagatctcaacgaaggcatcctaaagaggcctgcaattgagggtgggctctgagggatttcactctggctgcttcatgactccctgatactcaagtatattttcccaaagaccacggatgctgtgaagataaacactacatctgcaccaataaaaaatccatatattaaaatgttaa

SEQ ID NO: 6025 - DNA, 2878 bp, Homo Sapiens
  NM_133635
cggaagtgcgtggccgcccggggccatggcgacactcagcttcgtcttcctgctgctgggggcagtgtcctggcctccggcttctgcctccggccaggagttctggcccggacaatcggcggccgatattctgtcgggggcggcttcccgcagacggtatcttctgtatgacgtcaaccccccggaaggcttcaacctgcgcagggatgtctatatccgaatcgcctctctcctgaagactctgctgaagacggaggagtgggtgcttgtcctgcctccatggggccgcctctatcactggcagagtcctgacatccaccaggtccggattccctggtctgagttttttgatcttccaagtctcaataaaaacatccccgtcatcgagtatgagcagttcatcgcagaatctggtgggccctttattgaccaggtttacgtcctgcaaagttacgcagaggggtggaaagaagggacctgggaagagaaggtggacgagcggccgtgtattgatcagctcctgtactcccaggacaagcacgagtactacagaggatggttttggggttatgaggagaccaggggtctaaacgtctcctgtctgtccgtccagggctcagcctccatcgtggcgcccctgctgctgagaaacacatcagcccggtccgtgatgttagacagagccgagaacctacttcacgaccactatggagggaaagaatactgggatacccgtcgcagcatggtgtttgccaggcacctgcgggaggtgggagacgagttcaggagcagacatctcaactccacggacgacgcagacaggatccccttccaggaggactggatgaagatgaaggtcaagctgggctccgcgctagggggcccctacctgggagtccacctgagaagaaaagatttcatctggggtcacagacaggatgtacccagtctggaaggggccgtgaggaagatccgcagcctcatgaagacccaccggctggacaaggtgtttgtggccacagatgccgtcagaaaggaatatgaagagctaaaaaagctgttacccgagatggtgaggtttgaacccacgtgggaggagctggagctctacaaggacggaggcgttgcgattattgaccagtggatctgcgcacacgccaggttttttattggcacctcagtctcaacattttcttttcggattcatgaggaaagagaaatcctggggttggaccccaagacgacgtacaacaggttctgcggagaccaagagaaggcgtgtgagcaacccacccactggaagatcacctactgaggaggatcctccagggccgctccccggacccgacaggcgcgggtggatgcaggttctgtcgccgtggagtcaccgtctactgccagccgggagctgggcggacaggaccgtccctcgcagggtcccaggcccagaagaggccccacgcctctagagctgggctccgtcctcggcgttgccagccgccatggctgatgaagaggctccgctgctctcgggggtggcggttgttttcaggcagcgtctgtgaacccacagctcggttgccagcagtgcccgcgtggtgacccagaagcaggagtgtttgtcaggctcccgctctggcctttccagccacctttcatgtcttcatattttaagtgcattgaggatagatgcaggcgggtgagctgccctccgtcaggtggacccgggctgacatttccctgggagctggtgcaaggagaagcgtcattttaaatgtctgcagagcgaccaggggcctcatgaatctctccgttgccctccgcgcagcaggaggctgcctgtgtgtttcctcctgggatgcgtgcaaggcagacctggtgctgcaaaggaaagggcctgaggcctcagggagccccgtggagggatgacagttcaggccctactgctggcacgtcagagcactgggaagtttttcagtgacgtctctggggcactcagtggattgtctgtaggaaacttgcagctctgctcctcacaccaggcccggctggccacccaccctcgcccccactggccacccctccctcgccccgactgccccgccccaccctcaccccgactgccccgccctcgcccggctggccgtccctgccctcgccccggctggcaggtgcacatggggcctccaggtctgccattcgctattgagaactagaaatgaggaaggacagttacgctaactccaaaaggctgtctaggatgagctgctttatcagggagctccttgtacccattttacagaaatcatttttaggtctttgtgccaccaccacgaggggcatctgcaaagagggcaacgctagacacagaatccgtggaaggtgcagcagtgcctcaggggtcctcagggtcagggagcccccctcaccctcttggcccgttaccctttgtgactttccaccatggtgtcgtgtgaccctcagtcaggttggtgggggctgagtcctcactgagcagccactttccacatctgctagaggaacagtgacatggacacctgtgacagagagaggacagttaggagggacagacagctcttcctttcggagcctggctagtctaggacatcaccttgctgtgtcttctcaagcttttaaaattgaccctgaacgtgtgacagggtcctatggtgttactcaaagctgtgcagggtaaatgatgacatatttattctttttccatttgttctagaaacagtgcctttttcatcagttgcattttccaggctgagagctgtataaaacattttggactgtgaccatgtaccttcctttttaagaaaaataaactgctttatggaagttggtaaaaaaaaaa

SEQ ID NO: 6026 - DNA, 3596 bp, Homo Sapiens
  NM_133636
atgattggacagggtagaagtttatgcgtgcttccggtccgcgagccctgagagctaacttggggtcttttcccaaggtggatgtagaagcgggctccggcgtcccactctcccttccatatgggcttagcgtctgggtcactgagaacgacgtctgaatagggccctgggtccttgccatggatgaatgtggttcccgcatccgccggcgggtgtctctccccaaaaggaaccgtccaagcttggggtgtatttttggcgctcccaccgcggccgagctcgagcccggagatgaggggaaagaggaggaggaaatggtggctgagaacaggaggcggaaaaccgcgggcgtactgccggttgaggtacagccccttctactctcagattccccggaatgtctcgtccttggaggtggtgatacaaacccggacctcctacgtcacatgcccactgacagaggggtgggagaccagcctaatgacagtgaagtggacatgtttggtgactatgatagctttactgaaaactcctttatagctcaagttgacgacctggaacaaaaatatatgcaactccctgaacataagaaacatgctacagactttgccactgaaaatctttgctcggaaagtatcaaaaacaaactcagcattactaccataggcaaccttactgaattacaaactgataagcacacagagaaccagagtggatatgaaggtgtcactattgaacctggagctgatcttttgtatgatgtaccttcctcacaggctatatactttgaaaatttgcagaactcttcaaatgatttgggtgatcattctatgaaagaaagggattggaagtcatcctctcacaacactgtgaatgaggaactgccccataattgcatagagcaaccccagcaaaatgatgagtcctcttccaaagtcagaactagttcagatatgaacaggagaaaaagtattaaagatcatctaaaaaatgccatgactggaaatgcgaaggcccagacaccaatattttctagaagtaaacagctcaaagacactctcctatctgaggaaattaatgttgctaagaaaacagttgagtcatcatcaaatgaccttggtcctttttattcattacccagcaaagtgagagacctttatgcccaattcaagggaattgaaaaattatatgaatggcaacatacttgtttaacattgaattctgtgcaagaaagaaaaaatttaatatattccttgccaacaagtggtggaaaaaccctcgtggctgagattttaatgctgcaagaactgctttgctgtcggaaagatgttttaatgattcttccatatgtggcaattgtccaagaaaagatttcaggtttgtcaagttttggtatagaactcggtttctttgttgaagaatatgctggaagcaaaggaagatttcctccaactaaaagaagggaaaagaaatcactctatattgccactattgaaaaaggacatagcttggtgaactccttgattgaaactggaagaattgacagtctgggtctggttgttgtagacgagttgcacatgattggtgaaggaagccgtggagctacactggaaatgaccctagcaaaaatcctctacactagcaaaacgactcaaattattggtatgagtgcaacattaaacaatgttgaagacctacaaaagtttcttcaagcagaatattataccagtcaatttagaccagttgagttaaaagaatatctgaaaataaatgatacaatatatgaagttgacagcaaagctgagaatggcatgactttttcacgtcttcttaattataagtattctgataccctaaaaaagatggatcctgatcacttggtagcattggtgacagaagttattcccaattattcctgcttagttttttgtcctagtaagaagaactgtgaaaatgtagcagaaatgatatgcaaatttttaagcaaggaatatctgaaacataaggagaaagaaaaatgtgaggtgattaagaacttgaagaatattggcaatggcaacctgtgtcctgttttaaagcgcactatcccatttggagttgcctatcaccacagtggcttaacaagtgatgaaaggaaactcttggaggaggcctactccacaggagtgctctgtctttttacctgcacatctaccctagcggcaggtgtcaacctaccagctcgaagagttattttaagagctccctatgttgctaaggaatttttaaagaggaatcaatataaacagatgattggcagagctggtcgtgctggaatagatactattggggagagtatcctcatattgcaagaaaaagacaaacaacaggtattggagttaataactaaaccattggaaaactgttacagccatcttgttcaggaattcaccaagggaatccaaacattatttctctctttgattggtttgaagattgcaacgaatcttgatgacatctatcatttcatgaatggtacattttttggtgttcagcaaaaggttttattgaaagaaaaaagtctctgggaaataactgttgaatcacttagatacctgacagaaaaaggactcctacaaaaagacactatttataagtctgaagaagaggtccaatataattttcatattacaaagttgggacgtgcttcatttaagggaactatagatttagcttattgtgacattctgtacagagacttgaagaaaggtcttgaaggacttgtgcttgaaagccttcttcatctaatctacctaacaaccccctatgatctggtttcacagtgtaaccctgattggatgatatacttcaggcagtttagccaactcagtccagcagaacaaaatgtagctgccattcttggagtctctgaaagctttattgggaagaaagcatcaggccaagccatcggaaagaaggtggacaagaacgttgtcaacaggctatatctgtcttttgttctttataccttgctcaaagagaccaacatttggactgtatctgaaaaatttaatatgcctcgaggatatatacaaaatcttctcactggaactgcctcattctcatcttgtgtgttacatttctgtgaggagcttgaggagttttgggtttacagagcccttttggtagaacttaccaagaagctgacttactgtgtaaaggcagaattaatccctctcatggaagttactggagttttagagggtcgagcaaaacagttatacagtgcaggttacaaaagtctaatgcacttagctaatgcaaatcctgaagtgctcgtaaggacaattgatcatttatcaagacgccaagccaagcaaattgtttcatcagcaaagatgctgttgcatgaaaaagcagaagccctgcaagaagaggtagaagagttactaagattgccttctgatttccctggtgctgtggcttcttccactgacaaagcatgaagctatctgatgagaattttcatatatgaattatttattgtacatgtgtgttattaaagataacttatactttataaatgaaaaaatacatttcagttatacattaaaaaa

SEQ ID NO: 6027 - DNA, 2708 bp, Homo Sapiens
  NM_133644
actttactagtcaagccgcggagtgggcggggccccctgcccagacttgaagccacacaggcaggtcgggcaggcgggtcgcaggttgtaaatccatgtggcgggggctttggaccctggcggcccaagcggcacgtgggcctcgcagattgtgcacgcgccggagcagcggcgcaccagcccccggctccggcgccaccatcttcgcgctaagctctggccaaggccgctgcggcatcgcagtgatccggaccagcggccccgccagcggccacgccctccgaattctcacagcaccccgagacctgccccttgctcgccacgccagcctgcgcctgctcagcgatccccgctccggggagcctctggaccgcgcactggtgctctggttcccaggtccccagagtttcaccggtgaggactgcgtggagttccacgtgcatggaggcccggcagtggtgagcggcgtcctgcaggccttgggcagcgtgccagggcttcgaccggcggaggcaggcgagttcaccagacgggcgttcgccaatgggaagctgaacctgaccgaagtggaggggctggcggaccttatccacgcggaaacagaggcgcagcggcggcaggccctcaggcagctggacggagagctgggccacctctgccgtggctgggccgagaccctcaccaaagctctggcccacgtggaggcctatatcgatttcggcgaggatgacaacctggaggagggggtcctggagcaaggtgggtctacctggtggtgggggaggaagacacctcatatcagccctcaaaggctcccctcactgtctctctctgcctgccttctctcacccacagccgacatcgaagtacgggcactgcaggtggccctgggtgcacatctacgagatgccaggcgcgggcagaggctccgctcaggggtgcacgtagtggtcactggaccccccaatgcgggcaagagcagcctagtgaacctgctcagtcggaagcctgtgtccatcgtgtccccggagccagggaccacccgtgacgtgctggagaccccagtcgacctggccggatttcctgtgctgctgagcgacacggctgggttgcgggagggcgtggggcccgtggagcaggagggcgtgcggcgcgcccgggagaggctagagcaggctgacctcattctggccatgctggatgcttctgacctggcctctccctccagttgcaacttcctggccaccgtcgtagcctctgtgggagcccagagccccagtgacagcagccagcgcctcctcctggtgctgaacaagtcggacctgctgtccccggagggcccaggtcccggtcctgacctgcccccgcacctgctgctgtcctgtctgacgggagaggggctggacggcctcctggaggcgctgaggaaggagctagctgcagtgtgtggggacccgtccacagatcccccgctgctgacccgagcaaggcaccagcaccacctccagggttgcctggatgccctcggccactacaagcagtcaaaagacctggccctggcggcagaggcgctgcgggtggcccggggtcacctgacccggctcacaggtggagggggtaccgaggagatcctggacatcatcttccaggacttctgtgtgggcaagtgacgggatccagggaagtcgcacccaagctgcgtggagacccaggagcctcgggggatctggaaacagtttaggccaattgggattctcattcgcctgggaaagaacttgattctcaaatagtgaagcaacacagctgagaggtagtgagatccctgcagggactccctggagattcaggccctggaatggggctgaatggaggtcccgttcgacccttgatgctggggcatccgggttgggatggagataggaggatctcagtatatttgtttcgtagttttttatttattttgcaaataccaaaggaatgtaaaaaaaactcaggtgatctagaagtgtttattttcttcccttcccttcccttccctttccttttccctttccctttccccttccccttccccttccccttcccctacccttccctcctctgtctattgcccaggctggagtgcagtggtgcgaccttggctcactgcaacctccatctccggggctcaagcgcttctcctgcctcagcctcctgagtagctgggattacaggcatgtgccagcatgcccggctaatttttttctttttttgagacagagtctcgctctgtcacccaggctggagttcagtggtgcgacctcggcttactgcaacctccacctcccgggttcaagtgattctcctgcctcagcctcttgagtagctgggactacaggcgcacaccaccacgccaggctaatttttgtatttttagtagagacaaggtttcaccatgttgaccaggctggtcttgaactccttgacctcaggtaatctgcctaccttggcctcccaaagtgctgggatcacaggcgtgagctatcacacctggccccagaagtgtttcaacatggaaattttccttagcccttctgtggttgtcatggcttaatgtgtgtctttccagaactttgaatgtttgcatacttgtggatgtacctttcaaatatgtttgtcttgtgtatcatatataaatggtattgtgttcattgctctaaaaaaaaaaa

SEQ ID NO: 6028 - DNA, 7194 bp, Homo Sapiens
  NM_133646
actgtcttcctcattggcgccgtgcagagaggcggaatgttcaactcctaactgcggcggaaacgtgggagccgcgcgggccgctgtcgtcccaacccccgccgccctcgtcgcgcgcggggcctccgcgcccccggctgctgctcacgccccgcccgggagccagattttgtggaagtataatactttgtcattatgagatgtcgtctctcggtgcctcctttgtgcaaattaaatttgatgacttgcagttttttgaaaactgcggtggaggaagttttgggagtgtttatcgagccaaatggatatcacaggacaaggaggtggctgtaaagaagctcctcaaaatagagaaagaggcagaaatactcagtgtcctcagtcacagaaacatcatccagttttatggagtaattcttgaacctcccaactatggcattgtcacagaatatgcttctctgggatcactctatgattacattaacagtaacagaagtgaggagatggatatggatcacattatgacctgggccactgatgtagccaaaggaatgcattatttacatatggaggctcctgtcaaggtgattcacagagacctcaagtcaagaaacgttgttatagctgctgatggagtattgaagatctgtgactttggtgcctctcggttccataaccatacaacacacatgtccttggttggaactttcccatggatggctccagaagttatccagagtctccctgtgtcagaaacttgtgacacatattcctatggtgtggttctctgggagatgctaacaagggaggtcccctttaaaggtttggaaggattacaagtagcttggcttgtagtggaaaaaaacgagagattaaccattccaagcagttgccccagaagttttgctgaactgttacatcagtgttgggaagctgatgccaagaaacggccatcattcaagcaaatcatttcaatcctggagtccatgtcaaatgacacgagccttcctgacaagtgtaactcattcctacacaacaaggcggagtggaggtgcgaaattgaggcaactcttgagaggctaaagaaactagagcgtgatctcagctttaaggagcaggagcttaaagaacgagaaagacgtttaaagatgtgggagcaaaagctgacagagcagtccaacaccccgcttctcttgcctcttgctgcaagaatgtctgaggagtcttactttgaatctaaaacagaggagtcaaacagtgcagagatgtcatgtcagatcacagcaacaagtaacggggagggccatggcatgaacccaagtctgcaggccatgatgctgatgggctttggggatatcttctcaatgaacaaagcaggagctgtgatgcattctgggatgcagataaacatgcaagccaagcagaattcttccaaaaccacatctaagagaagggggaagaaagtcaacatggctctggggttcagtgattttgacttgtcagaaggtgacgatgatgatgatgatgacggtgaggaggaggataatgacatggataatagtgaatgaaagcagaaagcaaagtaataaaatcacaaatgtttggaaaacacaaaagtaacttgtttatctcagtctgtacaaaaacagtaaggaggcagaaagccaagcactgcatttttaggccaatcacatttacatgaccgtaatttcttatcaattctacttttatttttgcttacagaaaaacggggggagaattaagccaaagaagtatatttatgaatcagcaaatgtggtgcctgattatagaaatttgtgatcctatatacaatataggacttttaaagttgtgacattctggctttttcttttaatgaatactttttagtttgtatttgactttatttcctttattcaaatcatttttaaaaacttacattttgaacaaacactcttaactcctaattgttctttgacacgtagtaattctgtgacatactttttttttcttatagcaatacactgtaatatcagaaatggttggcctgagcaacctagtaagacctcgtctctactaataattaaaaaactagctggcatggtagcacacacctgtagtcccagatacttgggaggccaaggcaggaggattgcttgagacctagcaatcagtcagggctgcagtgagccatgatggcaccactgcactctagcctgggcaagagaacaagatcctgtctcaaaaaacaaaaaaaagaaagaattgatagtacaaaatccaacaacaatactgagatgatctaagaaggttataacaaaatgctcttcagaaatacctaagtgctgagaatttttagtactaaagagcacagctgctcaaagtaaagcctgagcagtgttctcagtaatgtatttgaaggaaaaataccctgatttgaaaccaacagcagatgttgcaaactttcataccactgctggccatggaagcctcttaacaacacactgtcatttaaggctgtgcttgtgctttatacaaagagaaagaggtggtcttaaggggatgcttccaggggggtgagttcatgcctctcctgtattttccagcaagtggggtatgtgtggtggtttgttttttagaggggcataataatccaggattctaagcatatgctcagctattttaaagaggaaattaaatattataaaagaaatagtaaagataagttatcctcacttaggcaaaagcacaggtcctttccatatcaagtttagcctaccagggttgttttttgttttaaccctgcttaataatgttggtgttttagaagtagatacaggcactgctctgaaaacctggctagccaaggatattctcagaatgttatcacctgtttgtcaaagcttgtttaaattataaaacacttttaattatatatatgaggcaaaagaactaagacttttttcaaactaaattagaaaggagtgtcattatttgactgttaaaccaaaatatttttggtgggtctttttatggaagtttaaagaaaggacatcatcatagatatgatctaacagtatttctaactatatttgatcattaaaagcctcttggaatttgaagcgtgacgtgtttctaatgccccttgagaggtgaaaaataccacataatgatcagtatgctgtgccagcttcatttggggagaaataactagtagaaagttctgggtgtgaggtgtacagcagtctaggtggcatagtgatgaagaaagggatcagagtctgactgtcactcagaatcctgggctcagttgcttgacaaccttgggaaaattgttttatctttgtgcgtctgtttgctgatcttcagcgtgggaataataacagtacctacttgaaaggatcattgtgcggattaaaagaaataatatatgtaaagcactttaacacagcaccaggcccacggaaagtggctaatgttagctactatgaatggtgccagtgaagacactgaaaaataagtgatttcagtaaccttctggaaagctatcagtttcaaataatattttctctgtagtatgagatgaaattaaaagtggatagctttcaggaaagataaagagaacatgcttagaatgtaagctaaacagattttttctgttgctctttgaaaactatgagccctggccagcttaacctggtctgaggtgagactaaacacaaaaacagtagataaatctctccctaaaagatggattcccccacatacccatgctactagtttctctgtctattcacacatatgtacaaatacatgaacacagcctgtctgtgctcagacatagagaagtactacctgacttgagtcaatgcacccaagaagaaaagcttggagtagagcagaagggagggcttgggactcctgtctttccagcatgccctggggtgcagtggtcagccacctgaagagagagccaatagcatggggtttacaaggcaaagatagtcattcattcaacacatattcatagagctccttctctgtgccagacactgttctggaagatagctagatgaaaatctttgcactcacagagcttacatgccagtgagtgaagatcgatgataaataaagcaaatgcatcatatgttcacatttgataagtatatgccaaaaaatgaagccgggaaggaggacaaggcccatgggtgggtgttgaggtttttaaagtgtggtcaggaaaggccccactgataaggtaacatttgagcaagtctgaaaaaggcaaggggatctttggggctaacttcgggatccctgcactttatgtaagaatgtaaacctggagtctcatttaagaatgatcagcaatacgtttagaacatatgaactgaatgaaatggacattttttcttaatttatgtataaatccatatgattatacataaagttctgatgcattaataaaagcagccaaatagggccaaagagaaaaataacaggactctgtactggacctaactttatcattaattaggtaatattttcctcatttctttactgctgccattttcctcaccagtattccagagatggtcatagctcattactctaccaccaagaacctaaaaggaattagaatacagcagaattggcctcagtgaagagcttaaaattgttctcctcgtagaactggactattgatcattaccacgtgacgttggctctattactttctgttcccaatgtccttctagtggtttgaaaatgttaaaacatccctaaaatctaaatcatataatcagaattctatagtgtcccactctatctgtaaagatcatttggaagactttagactctattaattttaaaaggaatatttattagccatatgcagaatttctaatgatgatattgtacagcttctaattcacttttcagatcagtgtttgaaatggcaattatcagtgttggatttagttccaactacttgatttacaaaaatgtacatttagaggttaaaagaaacagtgagaaatgtaaacattcaaaatgataattgaatctctcagttgtgggaataattatcagagacatgcaactgaaaatgtctcacctttcatctttttttcttaattcataaagttatcttgtagaatttgatgagaccctccctagtcattctcaactggggcggtgctgtcaccgaatggtgtttgagagtgttggggctagggcacatttttggttgtcacagcaactggggtggcatttgctgcccagtgccaggaatagtaacattatgaatgccagggacagtgtgctcagtaaagtcttccatccaaaaggggcagggcacggtggctcacgcctgtaatcccagcactttgggaggccaaggtgggcggatcacctgatgtcaggggttcgagaccagcctggccaacatggtgaaaccctgttgctactaaaaatacaaaaattggctgggtgtggtgtcacatgccagtaaccccagctactagggaggctgaggcaggagaatcacttgaacccgggaggcagaggttgcagtgagctgagattgcaccactacactccagcctggatgacagagtgagacttcatctcaaaaaaaaaaaaaaacaaaaaaaaacaacccggtagcattgtcccttccccactgacaaacttatcaaatccagaagctttagagtttcgtctctaattatttttctcctgaacaaaattacccaagtcaaaacaaaatgtatttttagaattacggcagcatacgacctgaattttgtgagtttcgtggctttatcttaaatcaccatttccctaaaaatggtttctttctccttagaaatgctggtggcaacttgatgaaacagccaaatgcaccagggcaggtcactttcccattacactgattccacaattaaaaaaaaaaaagaaaaaaaactcattgagatagctacagttctataggttaatttaaagcctcctttttctactcatttttgaaagcaaaattacattttactattttacataaccagtgaaaagacgttgaaagcctacagctcactgtttttggtgctctggaaatgttgagggtgggtttttaaccagtgatttttaacgtgcagtgaatttgttagacttttaaacaccagctaaggtagtcaaacttgatccccattaaaaatcaaggaattaggggtcgggggagggtttaggagtgatccagaatgacctcccagaattactgtgcgtacaactttatttttcagagttttcattggaatggtaagagttttatgaaagacagttttaaaacttattctgagttaaatattaatactttaaaaaattattgtactagacttattgcagccttttgaaagtagcagagtttcatcataccacatatataacagagcataaattttctataatcaggcaccttttgctgcttttgagtaagactgttttcctgtttaagtgttaagcatcgccagacataaaaatctattctctcctctcgattgtagcatagcctgacagctctagatacagcatttctatgatgaaaaatgagtatccatcaggaaatctagaagactagccgtgttttctcagactccacctttgtttgcactctgttgcctgtgaggagctttctggcatgtgattatttacttcaaaactagagttccaagcacctacattaattattttatattgtgtgcagaatagtatatcttttaatgtcagatatgatacactgcacatattgcttttgcactcttaaaatttttgtactaaataatagaaaatatttatattctttgagtgtgagctttgaatagatggcattatcactttattgtttttttaacaaaaactttttctcaattattctattgcaatgttattctgagcaagtcctatgccaaatatcttgtataatgtttgtatggaagattaaattttactcttgtgtggtaagactatttcagttactgattttatagttggaatttgatattccagcacaaagtccacagtgtattcagaaatccaagttggtgtcatacatttcattttgatgtgaacttttctttgctttcctttgttctaagactccattttgcaataaacgttttgacagtaaaaaaaaaaaaa

SEQ ID NO: 6029 - DNA, 10828 bp, Homo Sapiens
  NM_134261
ggtaccatagagttgctctgaaaacagaagatagagggagtctcggagctcgccatctccagcgatctctacattgggaaaaaacatggagtcagctccggcagcccccgaccccgccgccagcgagccaggcagcagcggcgcggacgcggccgccggctccagggagaccccgctgaaccaggaatccgcccgcaagagcgagccgcctgccccggtgcgcagacagagctattccagcaccagcagaggtatctcagtaacgaagaagacacatacatctcaaattgaaattattccatgcaagatctgtggagacaaatcatcaggaatccattatggtgtcattacatgtgaaggctgcaagggctttttcaggagaagtcagcaaagcaatgccacctactcctgtcctcgtcagaagaactgtttgattgatcgaaccagtagaaaccgctgccaacactgtcgattacagaaatgccttgccgtagggatgtctcgagatgctgtaaaatttggccgaatgtcaaaaaagcagagagacagcttgtatgcagaagtacagaaacaccggatgcagcagcagcagcgcgaccaccagcagcagcctggagaggctgagccgctgacgcccacctacaacatctcggccaacgggctgacggaacttcacgacgacctcagtaactacattgacgggcacacccctgaggggagtaaggcagactccgccgtcagcagcttctacctggacatacagccttccccagaccagtcaggtcttgatatcaatggaatcaaaccagaaccaatatgtgactacacaccagcatcaggcttctttccctactgttcgttcaccaacggcgagacttccccaactgtgtccatggcagaattagaacaccttgcacagaatatatctaaatcgcatctggaaacctgccaatacttgagagaagagctccagcagataacgtggcagacctttttacaggaagaaattgagaactatcaaaacaagcagcgggaggtgatgtggcaattgtgtgccatcaaaattacagaagctatacagtatgtggtggagtttgccaaacgcattgatggatttatggaactgtgtcaaaatgatcaaattgtgcttctaaaagcaggttctctagaggtggtgtttatcagaatgtgccgtgcctttgactctcagaacaacaccgtgtactttgatgggaagtatgccagccccgacgtcttcaaatccttaggttgtgaagactttattagctttgtgtttgaatttggaaagagtttatgttctatgcacctgactgaagatgaaattgcattattttctgcatttgtactgatgtcagcagatcgctcatggctgcaagaaaaggtaaaaattgaaaaactgcaacagaaaattcagctagctcttcaacacgtcctacagaagaatcaccgagaagatggaatactaacaaagttaatatgcaaggtgtctacattaagagccttatgtggacgacatacagaaaagctaatggcatttaaagcaatatacccagacattgtgcgacttcattttcctccattatacaaggagttgttcacttcagaatttgagccagcaatgcaaattgatgggtaaatgttatcacctaagcacttctagaatgtctgaagtacaaacatgaaaaacaaacaaaaaaattaaccgagacactttatatggccctgcacagacctggagcgccacacactgcacatcttttggtgatcggggtcaggcaaaggaggggaaacaatgaaaacaaataaaagttgaacttgtttttctcatgcatatgatttccattatgcctacagatatggaccctttttctgtcttgacttcttgatcattgacctctgtttacaacaggaggagggtactaaagtcggaggatttccttttcttgtagctcactgcccacagactttctacagagtcaccaatctgtcagtaacaacagagagtccagcaataatcggtgactggtgtgcatagcggaggttgcggcattactttgcacaactagctctttgtttcatgaaggaagtttttattttttcaccgattattgccagtccgcaggatggcatgaaaagggtccatagcagtagcaacaatagcattataatatattacagggtaaatgggcatgaagactatatatagctaaaagagatattgtttatatattgttttaagtaatataaaatgtagttactggtgtagcttttcctgttgaattgataaggcactttcattttgcacctttttctttaaattaaatgctagcgtgttcactgtcgtgtcgcatgtgcaccagaaacacaagtttaactgagaaggcttggaaggtacgttgggaggtatttatgctgctgtttacaaaattatttttaagagactggctggtcatatctagaaatcaccacgttggattttttttttaacatgtgaatttggaattagaaacggaactctccctaaattatactttgctttttggtaagtttaatgatagatgtgtttatgcttcatacaaagttgaatgattgattggcgtggtggacatataccatcatgctcattttttttttttaaagctttttaaaatgccacctcatggaggcgagggggaggagaagctcattttacacaattcagtagttaaatatggactcggtctcaacttggaattcttatgctttgagaacaaatcaacaaccagaatatttattggaatctagcttttattataagaaggacccaaagattatatcctgagcaaatgcacactccccatgtgaggacatgaagtatttactttgtgaatgtttatgttcttggtataatctaggaaccctatgagtttatctcagagtgaactaattctagatttgttgtcaatagatgctataattcaagaatgttgctctccatatttgaaaaacgatggataggagggtgagggaagcatacaatgttgaaccagtttctcttatttaaatattaaatactttaagcctttaaagtgaagttgatgctagctgcaaacatttactcttgtatttatcttcactaggaaactgtggactgtaatttattttattaaatatttagaagattatttggcttgtgtgttcaggtgagaaatactgagttgtttttgtttaatttcatggtttttttttttttaatgatccctagtgggggaaggggaaaggaatagtctgataaacagatgtgcatattttaaaaacaagtgaccttttgggaatgtaggcatttagacgatgattttagtcgcactaggggtgggattcaaactactggtcaaagaccattttgtacagaaaagggaacatctccgatgggtgttaaggtaggagtttccatgcagccctttatgtctgagaaatagtctcctctgccattggggtccctgcggaatcttctacaggaattgcagctcttcacgtcatgctaggttaccagcatgggcttcccagagcacttcactctgtttctaactccactgacttttctgacttgtttcttgagggacttggaaaaggggaaggtattattcacacagatgtgtgtatgaagcctaaataacatccaactttttttccaaaaacatagtaagagtttaaccataaatagaagagtaatattcctttaaatttcttacaggcatgtaaaattttatgtgtttatagagagatgctaactgtcagcatatagtatttatattggggcaagaagggttaaatcaaatctttaatttaagtaagcatagttcctttaaagatcagtagtatttatactctgaaaagagtaccaagcttagttcagttatttattcatccattttttttctattgtttctcctctggggggaaatggtgttttgtttttgtttgagttttgtgttttagttttttggttttggttttgttttgtttttttgtcattcagattcactaaatttggggatggttttattaaagtatattaacttctttttaaccaaagctttctgaatatgaccagcctcaggtgctagcgcattaaagagcaactaaacctaattccagtgtcgatttgtgaaataataaaagctaattgaatttctctaagggtgagagagaacataatgatgaacttaaaaagaaattccttttcccagaagggattctgcatgtacctacaaacaatcatgctctaaccacagtaatagtcatgccatggtgacattgcttttacggtaaaccaagataggtaatatgatgcttcttcccaggtgtttctgaaagaaaagcagcggtggagcttaagagccaagtccactgattgacataataggatggaattgtagacagagacatgctccatgaaacaaggaaacaactgactactatttggatctaagttgggatctgatgttaaacaataaattcagtttaaaaaaaatatggagctcagaaaaggatgtgaaaaactttgcattttcctttcttcattattacaaaaacacctatgtgatgacataaaatacttgggtgatatcagaacaattatccttaatagtttttataattaaagtttcctaaacttcagtctccaatagtcttttaaggattggaaccacatcactgtcagccccgctgctacaatgcctttgtacaatttttttacataaggcaaataaggcttttgtacaaagcctgaataccttctgttccaatggtgtccaaatggttattatattgtgaaaaacctggccttggtcacaatgcaaacaaaagtacagatgaaagtgctttttggacagtttgcaaattgtgttaaagctacggattttttttaaagtgttcagcatcttaacgtgtattaaagctatggatttttttttaaagtcttcagcatcctaattcaccctttctaacttaagaaaaacatgacttaagacactgcttctaagtttggttgttctttatagtgtggatacccagttatctgtgagcgtatgggggtgggctgagggtcaggtgaggaaggagtgtgtgtgtgtgtgtgtgtgtgtgtgtgtgtgtgtgtgatttgcatgtgtatgatgtgtgtgcgtcggaccgcttctaggctactaagtgtcaatggaaaagaaaatgtattcaaaatacttaaatcaaaactagaagatggggaaaaaaagatttattctatacaaagccttgtctggaccactttagagagacttctatttttttaacccttctataaatatttgatggcacttgaaatattcctgcaataaaatgtgatttgtgtaaagaaaaaaagattttgtaatgtgaaacaaagaaagaaagtaatgtaattttctaaaaaaaaaaatacaaacaaacaaactttgtattattttcttgatggaatttgtctatctgtctttggaaaactttttatttcattgaatgtgccatagtagaaatgtgtgtttttagttttagactaaggaatagctagttgttgtgttccgacattccaaaatgcaaaacaacctagtagtatctttcatgaaaaggtttaagtagtatgtaagcttctctcattgttgcttttttgcacatgttcttcattcctctctagtgcaatatgtacatagagcacttgcgggtgtaccttgatccctcagggaaaaatacatatttgtacagttttttggggtttttttgttttttggttttttttgttttgccttttgtttttggctaaggaatgtcgatcgaatcacttgttattgttgaggggcagccagataataatcctaaagccactgtttccaacattgattgtttaaatcatatgtccttccaatgctattattttaagataataataaaaagttattttctgacagttctttgtgctgactggtgaaaaacaagggtaaataagcaccttataattgacttactgtgaatgacaatccatcttggtatcaacgatagaagccctatcattttggagttggggttaagagtcagaaacaatgtgctcagggatctcctaaaactcttaaaacagggtggccagtactactgggacaaattgtgttttttattattaataataatgataataatactatccctccaaggcacaagtgaactatatagaactgcgtgtgtgtaaactctttactctcgtctcattttgttgagtttagaacttgatgtgctcgtcagtcttgtgtttcaaaacactgaataacttccaaagcaaagttatgccagtgtgttcaaaagataaattaataatgtaccagcaaagagcatcattcaaagtatagtccttgcatattccagttaccatttctctaataattaaaatattcatgataaatatatatatagcatcatatgttaaaaactatttcaaattctacatattaaggatgaaaattttaaaatccagtaataagaggagagacctgcctatcagtacagtgatataggtaaaagatgaaatatgtttttaaaataccagcaattaactattgttttcatgggttctcctctagaagcaaaccaaaaattccttcatggaaaacaattcttacttctacatgtgtagtttatatctgatgcattacaagagctaatgtttaaagacaaaacaaaacctgcctgtatgacagcagcaactcgagccaacatttagtgttacatgttatatttttgaaataccgttttgttatcatattccacatattactttccataaagtcagagaagttcaatgtaattgttggctctgattcttccaccttgggatacacattcacaagaagatttatatattttcttactatgatagaggaacataatctgggaaaacttcccatgtctgtaagatgaaaaggatacctttaccatgttgtttttgataataaagaatatggaaaatggtagaaatctctcctctctatgtgtatttgtatatgtgtgtatacacacacacgttgacatttttacataacatgtgattgccacttcttataaagttatgatatagaaccccatgaaaacaactttatattatagatcaaataatgtgcccagaaacgcaattgcaacagtaaatcttgatctattggtaagagtctatgatacaggtcttcattctatccctaaacataatgttagtaaagaggttccatcagattgtattatagagaccttcctattgctatttatttttaagagatgagaagactgactagcaatgtctccacagtgcaattggtttcacttctgggtctgtctgtctgtttgtgtaggtgagatcagtgttgtcaggctctcagaataatttttaaaagaatccagaagcctgacttcacaccaagtagccatcctagatgggcgggggggatctccatgttcaaccaaaccctcagaacttagagcaataaatacattcagtcatttatttataaatgaatgacagaatattcaatccaaatagaaacaaccttttgtcagtgatgcaacataacatggagtcttatattgagaaagtgaatatgaatattttaaatagatgcctaggaaatctgtgtttgctgtttacatttaatgtactttgccacattagcagtaccacacttcttttactttcatccttctaagaactaatgaaagatagcttgctattagctttgacatgttgcacatgccattatgttgttctctaagaacaactaaattctctccagtgttcatgtgtgattcctttttcatcattattactttaatgtggatgaatactatttctaggaacttgattatcactgaacagattgcatatgtaaatgcagataattcttgagcaatatagtgaaaatgatttcacaaaaaaaatccatatgtactgtatacatcttcctgaatccaaaattctcctgttatccacacagtttgaaatctcatattaaacagtggtaaatttttaaacattaggacattagctggctgcttctataaatgtacctgtattgtctgcctgctccttttgtggagatgtgtttttgtattggatgtttgggccaatgggaggcttcaagctacaacatattttcccactttaaataatatttaacatatgacaaaccccagacaaggcttttaatatgtataaagaactgcagtgttaggtggtttatttgcaaactgttttcagtgttgtccatttttatggcacctttaacaatattcttgtttccaaagtacaaaaaaaataggttaaataatctagccataactgaatgtcaagcaataaaacaaatgacttttgtgcatagacttaaaaaatacaaattttagacatctgcatgtaaatgcaatctcttgtttactgctttcttcaacttgagcaatcgattccttatttactattaacttaagaacttgtaacggcctgtaaacattttctctcttactcttctttcaaatttacctgtccctgcttttgagtcataatatttaatgttgttctgcacatctctatacagttaactttttggctttcattctgtatagataagaaaatgttatattataaacagcctactcagtgcaaatatttatctgtttatcaaatccacaatatgctgtataataccggttttactatataatctattttagacatagctgtttagaactagagtgtgctatttttgtgtttttctgatgtgtggtgctagacaagttacttttgtgaacaacaaaaattatcccttttattcctagacaataccacctttgggtcttgttaatttcactgagtataactatatatttgtatatatatacatatatatatatatctacctatgcccaactggcagctgtatcagagtgctggatttgggacatgcttttctctttaaatacataatatcattatataaattattctagagtgtatttaattaggataaaattacttccttagtatggatatttgacatctatagggtgaatttgtttataaatatggctatatggaaacttattagcatttactttatgtttgctacttggctttacagcatatctcctaagctgaaaaataatttgccaggccttcaagatcctaaagaaacttgtttaatggagtaatatacttttttttcttattaaggaattgtattactggcacctaacacagttgtattcttagctcctattatagataatgggcatttacataaaatatcctagatggcttgatggcagaataaacctttcccctcctacctgagtcatgagaaggatggagacgtcctctgccataacatgggccataaagcaaattcgacatgggatgttctgtttcagtatgacctcaaccagttccatgaactgagtgaaggaccttcattttcaaagttatttaataagtagcttaattaagcctttctacccattctcccaagatctactggcattattgaaaagcaaagtttatcaaatatctaactaaggatgtagttaaccttattaaatattgattagaattgttctgtaatattactgaatttgtaagatctttagcaaagatttttgagcaatttataaatgtagagcaaatgtttctgtttactgcactttttgtaactgaaggtgataaattctcaagccatgattattggcttccatgcactgcaatatttatccacaattctagacattttccatttttgtggaagagttgctgttaccttaattataaatgcaattgtgtggttaatgagagctaatgctagtagttaaccttttaaagtggattggctacagttgagggagaaatctcttttaatataaatcacatcattccttaactgcctctcttggaaagagattgaaaccttttttttaaagcacgatttagcatcctaagcttcctgagggtagagattgtatctttttgcgtctgcacaatggctagcacatgtcagcatttgacaattgttaaatgataacaagtgtgccccaattaaaacgtttttcctgggttgttttgttaaatttacaaagtaagccaagccttacggttaacattctcctctacaaccaagtattaaagccacatttaaaaagaccacatgaaatgctgattctaattgtgtgtaggtcttgaggattaagcacacaaatttcacaaacttctgtttgagtaaacaaactcagccttctgtaaatatacatgcaagtttggaaacagtaatactgtacctataaatatatgctgtctgttttgtgtacagtatgtaaaaactccttttctgccacactaaaaatgcaagccatttatgggaatcctaaaactagtattgaactaaaactttgctaatgatctttattagaggatcgtccaacttttcacttaccttgggttttcttttcaattcactcttacactagtctgcttatttccagctgtttattttattgagtcctgaatttaaaaaaaaaatattttgattcattttgtaaatacaagctgtacaaaaaagagagatttaatgttgtcttttaaatactccaattttcattctaatatgaatgttgttatattgtacttagaaactgtacctttaatattacattacctttattaaaagtgcattgaacacatcaattttagatgtgctttatgtactgttatcctataataaaacttcagcttctaatggaa

SEQ ID NO: 6030 - DNA, 4205 bp, Homo Sapiens
  NM_134264
agatatctccggcgccgcccgccattttgactccagtgtctcgtttgcagtcggcgctttaggggaactgtcttcctccgcaggcgcgaggctgggtacagggtctattgtctgtggttgactccgtactttggtctgaggccttcgggagctttcccgaggcagttagcagaagccgcagcggccgcccccgcccgtctcctctgtccctgggcccgggagggaccaacttggcgtcacgcccctcagcggtcgccactctcttctctgttgttgggtccgcatcgtattcccggaatcagacggtgccccatagatggccagctttcccccgagggtcaacgagaaagagatcgtgagattacgtactataggtgaacttttagctcctgcagctccttttgacaagaaatgtggtcgtgaaaattggactgttgcttttgctccagatggttcatactttgcttggtcacaaggacatcgcacagtaaagcttgttccgtggtcccagtgccttcagaactttctcttgcatggcaccaagaatgttaccaattcaagcagtttaagattgccaagacaaaatagtgatggtggtcagaaaaataagcctcgtgaacatattatagactgtggagatatagtctggagtcttgcttttgggtcatcagttccagaaaaacagagtcgctgtgtaaatatagaatggcatcgcttcagatttggacaagatcagctacttcttgctacagggttgaacaatgggcgtatcaaaatatgggatgtatatacaggaaaactcctccttaacttggtagatcatactgaagtggtcagagatttaacttttgctccagatggaagcttgatcctggtgtcagcttcaagagacaaaactctcagagtatgggacctgaaagatgatggaaacatgatgaaagtattgagggggcatcagaattgggtgtacagctgtgcattctctcctgactcttctatgctgtgttcagtcggagccagtaaagcagtggtggcagcaatattggtgtgattgaggttatgctggcaccactcgcacacaggcgcacaatggtgttagctgggcagaaagagtggcatctctggctaccgggctgggggcgacctttaccataggatgaagtaaccttgcattcggctgcaaggtgtactgtacgtacacaggtgctggtcgatgtccactttctgcttttctttctttctttttttcttttttaaagtaatttcccccacagtaaaatacactgactcctgagtaaattgattttccagttttatggaattgggagtctgacaagtgaaaccaatttaatgtaaagtatttggctttcaaatggtttctctgtgctattttttggaattctttcagattccagagatatcttacgtctttgattcaatttaaaatttgtacttattttcttttagaaataatgtattgtgtctgtgcagaaaaaaaaaaaaccaaaaaggattgctttactccaagaggagagattgtcttaggataaacctccaagctcacatttaatataacagactgaagtaaacattagaatcctgtttagagctattctgcacagttaactactgatctttagaatctaaaattgtatatgaacttattcttaaataattgaaccgttttatattcaaatgacttatgatcgtggttagtttgggaaaaataagatggttaaattttgatttattgaaatgtaattgtattattttcataaaatagcattttcattttgtaatgtggtttaacatccttgttgtttgccaaagaaatttcatttggctgtgaatattctatttgcttgcagtatctgtttctcttcctaggctcaagttggtgacccaagcctattgtaaacaagtgattatctcaaagggagatgccaatggagtaacaatttgttaaccttacgttttctgtctgtatatttttttaaaaatctggtagtttctggaaaaaaaagagaagggggtttgtagtacttaaccctatttatttccgtatattttagttaattagtttttggaataaatggatttcagtatagctttgtggttaaattgcattgcctttattttatgtttaggcttatttttaaattaacatttaacagaaacatttgaaatagaatttgcatgtctgccttaattaacttaaagactgattttaatctgactatgacactgagcatattctttaaattactcataatttataatgcttaatataatcttaattaaatttagcagttttagtataagatgtgccattttgtcctctgtatgtctgaatgaagctataacatttgcctttttattgcaggttttcctttggaatatggataaatacaccatgatacggaaactagaaggacatcaccatgatgtggtagcttgtgacttttctcctgatggagcattactggctactgcatcttatgatactcgagtatatatctgggatccacataatggagacattctgatggaatttgggcacctgtttcccccacctactccaatatttgctggaggagcaaatgaccggtgggtacgatctgtatcttttagccatgatggactgcatgttgcaagccttgctgatgataaaatggtgaggttctggagaattgatgaggattatccagtgcaagttgcacctttgagcaatggtctttgctgtgccttctctactgatggcagtgttttagctgctgggacacatgacggaagtgtgtatttttgggccactccacggcaggtccctagcctgcaacatttatgtcgcatgtcaatccgaagagtgatgcccacccaagaagttcaggagctgccgattccttccaagcttttggagtttctctcgtatcgtatttagaagattctgccttccctagtagtagggactgacagaatacacttaacacaaacctcaagctttactgacttcaattatctgtttttaaagacgtagaagatttatttaatttgatatgttcttgtactgcattttgatcagttgagcttttaaaatattatttatagacaatagaagtatttctgaacatatcaaatataaatttttttaaagatctaactgtgaaaacatacatacctgtacatatttagatataagctgctatatgttgaatggacccttttgcttttctgatttttagttctgacatgtatatattgcttcagtagagccacaatatgtatctttgctgtaaagtgcaaggaaattttaaattctgggacactgagttagatggtaaatactgacttacgaaagttgaattgggtgaggcgggcaaatcacctgaggtcagcagtttgagactagcctggcaaacatgatgaaaccctgtctctactaaaaatacaaaaaaaaaaaaaattagccaggcgtggtggtgcacacctgtagtcctagctacttgggaggctgaggcaggagaattgcttgaacccaggaggtggaggttgcagtaagccaagatcacaccactgcactccaacctggacaacagagcgagactccatctcaaaaaaaaaaaaaaattgtgttgcctcatacgaaatgtatttggttttgttggagagtgtcagactgatctggaagtgaaacacagtttatgtacagggaaaaggattttattatccttaggaatgtcatccaagacgtagagcttgaatgtgacgttatttaaaaacaacaacaaagaaggcagagccaggatataactagaaaaaggatgtctttttttttttttttactccccctctaaacactgctgctgccttaattttagaaagcagcttactagtttacccttgtggtataaagtattataaattgttgtgaatttgaagaatccgtctactgtattattgctaaatattttgtttatactaagggacaattattttaagaccatggatttaaaaaaaaaaaaaaaaactctgtttctgcaggggatgatattggtgagttgccaaagaagcaatacagcatatctgcttttgccttctgttgtttatcttacctgcagatattaagaatgtatgcattatgtaaaatgctcaattatatatttttgttgagttttttaattaaagacttgttaaaaaaaaaaaaaaaa

SEQ ID NO: 6031 - DNA, 2411 bp, Homo Sapiens
  NM_134265
agatatctccggcgccgcccgccattttgactccagtgtctcgtttgcagtcggcgctttaggggaactgtcttcctccgcaggcgcgaggctgggtacagggtctattgtctgtggttgactccgtactttggtctgaggccttcgggagctttcccgaggcagttagcagaagccgcagcggccgcccccgcccgtctcctctgtccctgggcccgggagggaccaacttggcgtcacgcccctcagcggtcgccactctcttctctgttgttgggtccgcatcgtattcccggaatcagacggtgccccatagatggccagctttcccccgagggtcaacgagaaagagatcggaaaactcctccttaacttggtagatcatactgaagtggtcagagatttaacttttgctccagatggaagcttgatcctggtgtcagcttcaagagacaaaactctcagagtatgggacctgaaagatgatggaaacatgatgaaagtattgagggggcatcagaattgggtgtacagctgtgcattctctcctgactcttctatgctgtgttcagtcggagccagtaaagcagttttcctttggaatatggataaatacaccatgatacggaaactagaaggacatcaccatgatgtggtagcttgtgacttttctcctgatggagcattactggctactgcatcttatgatactcgagtatatatctgggatccacataatggagacattctgatggaatttgggcacctgtttcccccacctactccaatatttgctggaggagcaaatgaccggtgggtacgatctgtatcttttagccatgatggactgcatgttgcaagccttgctgatgataaaatggtgaggttctggagaattgatgaggattatccagtgcaagttgcacctttgagcaatggtctttgctgtgccttctctactgatggcagtgttttagctgctgggacacatgacggaagtgtgtatttttgggccactccacggcaggtccctagcctgcaacatttatgtcgcatgtcaatccgaagagtgatgcccacccaagaagttcaggagctgccgattccttccaagcttttggagtttctctcgtatcgtatttagaagattctgccttccctagtagtagggactgacagaatacacttaacacaaacctcaagctttactgacttcaattatctgtttttaaagacgtagaagatttatttaatttgatatgttcttgtactgcattttgatcagttgagcttttaaaatattatttatagacaatagaagtatttctgaacatatcaaatataaatttttttaaagatctaactgtgaaaacatacatacctgtacatatttagatataagctgctatatgttgaatggacccttttgcttttctgatttttagttctgacatgtatatattgcttcagtagagccacaatatgtatctttgctgtaaagtgcaaggaaattttaaattctgggacactgagttagatggtaaatactgacttacgaaagttgaattgggtgaggcgggcaaatcacctgaggtcagcagtttgagactagcctggcaaacatgatgaaaccctgtctctactaaaaatacaaaaaaaaaaaaaattagccaggcgtggtggtgcacacctgtagtcctagctacttgggaggctgaggcaggagaattgcttgaacccaggaggtggaggttgcagtaagccaagatcacaccactgcactccaacctggacaacagagcgagactccatctcaaaaaaaaaaaaaaattgtgttgcctcatacgaaatgtatttggttttgttggagagtgtcagactgatctggaagtgaaacacagtttatgtacagggaaaaggattttattatccttaggaatgtcatccaagacgtagagcttgaatgtgacgttatttaaaaacaacaacaaagaaggcagagccaggatataactagaaaaaggatgtctttttttttttttttactccccctctaaacactgctgctgccttaattttagaaagcagcttactagtttacccttgtggtataaagtattataaattgttgtgaatttgaagaatccgtctactgtattattgctaaatattttgtttatactaagggacaattattttaagaccatggatttaaaaaaaaaaaaaaaaactctgtttctgcaggggatgatattggtgagttgccaaagaagcaatacagcatatctgcttttgccttctgttgtttatcttacctgcagatattaagaatgtatgcattatgtaaaatgctcaattatatatttttgttgagttttttaattaaagacttgttaaaaaaaaaaaaaaaa

SEQ ID NO: 6032 - DNA, 1888 bp, Homo Sapiens
  NM_134323
gcctctccagctgcgacacagatggcgcgcgggctcttgggttctgtagttttctcgcgatccaaaaggctccgtgcccaagtgagtccttaccgcctccctacccagcggcttcccctccgctagtacgcatgtccacagcttcacggaccgggagagagggggcgcggaaggaaggaggcgggacggtattacaaacaaaaaaatacggccttctcgagaagcgacggcggagggcccgctcctcccagaaggcggtgcagcctgcccgggcgagccacgcacgcagagggttgtggggcggatagctcccctccagatggaggctcacgaagtagggtgggcgggggactccatatcccagcgtgccccgcggcgggccctaccggccgcgactccgggcttggccccggccctagctcgtcggctgtgtattggggcgcgtggaggctgcagtcacggtggcgcccgcggggacggaggagggaatgagtgaagaggagcaaggctccggcactaccacgggctgcgggctgcctagtatagagcaaatgctggccgccaacccaggcaagaccccgatcagccttctgcaggagtatgggaccagaatagggaagacgcctgtgtacgaccttctcaaagccgagggccaagcccaccagcctaatttcaccttccgggtcaccgttggcgacaccagctgcactggtcagggccccagcaagaaggcagccaagcacaaggcagctgaggtggccctcaaacacctcaaaggggggagcatgctggagccggccctggaggacagcagttctttttctcccctagactcttcactgcctgaggacattccggtttttactgctgcagcagctgctaccccagttccatctgtagtcctaaccaggagcccccccatggaactgcagccccctgtctcccctcagcagtctgagtgcaaccccgttggtgctctgcaggagctggtggtgcagaaaggctggcggttgccggagtacacagtgacccaggagtctgggccagcccaccgcaaagaattcaccatgacctgtcgagtggagcgtttcattgagattgggagtggcacttccaaaaaattggcaaagcggaatgcggcggccaaaatgctgcttcgagtgcacacggtgcctctggatgcccgggatggcaatgaggtggagcctgatgatgaccacttctccattggtgtgggctcccgcctggatggtcttcgaaaccggggcccaggttgcacctgggattctctacgaaattcagtaggagagaagatcctgtccctccgcagttgctccctgggctccctgggtgccctgggccctgcctgctgccgtgtcctcagtgagctctctgaggagcaggcctttcacgtcagctacctggatattgaggagctgagcctgagtggactctgccagtgcctggtggaactgtccacccagccggccactgtgtgtcatggctctgcaaccaccagggaggcagcccgtggtgaggctgcccgccgtgccctgcagtacctcaagatcatggcaggcagcaagtgaagccccagctggactcatggatgtgcaccctttgctccctgctctttctgcctctgggctcatgtatctgcgcagctctggtaccctctgtgggtgccatctctacctctgacacagactgcctgccttgaagctgagaaggcacagggcaaggagccaaggaccacagagcctcagccagcccaggatccgtcctcattttattggtgatgatgaatgggaatgaaatcagggggctgtctactagagcctggaataaatatgctgctttgtggatttttaaaaaaaaaaaaaaaaaa

SEQ ID NO: 6033 - DNA, 1488 bp, Homo Sapiens
  NM_134324
cccggcgtgcaccggggcagtggctgctgcctccagctctaaatagtttggggttggcccggttcccagactgcactggaacactgggctttatgcccccacattcagtgcatttgtatagagcaaatgctggccgccaacccaggcaagaccccgatcagccttctgcaggagtatgggaccagaatagggaagacgcctgtgtacgaccttctcaaagccgagggccaagcccaccagcctaatttcaccttccgggtcaccgttggcgacaccagctgcactggtcagggccccagcaagaaggcagccaagcacaaggcagctgaggtggccctcaaacacctcaaaggggggagcatgctggagccggccctggaggacagcagttctttttctcccctagactcttcactgcctgaggacattccggtttttactgctgcagcagctgctaccccagttccatctgtagtcctaaccaggagcccccccatggaactgcagccccctgtctcccctcagcagtctgagtgcaaccccgttggtgctctgcaggagctggtggtgcagaaaggctggcggttgccggagtacacagtgacccaggagtctgggccagcccaccgcaaagaattcaccatgacctgtcgagtggagcgtttcattgagattgggagtggcacttccaaaaaattggcaaagcggaatgcggcggccaaaatgctgcttcgagtgcacacggtgcctctggatgcccgggatggcaatgaggtggagcctgatgatgaccacttctccattggtgtgggctcccgcctggatggtcttcgaaaccggggcccaggttgcacctgggattctctacgaaattcagtaggagagaagatcctgtccctccgcagttgctccctgggctccctgggtgccctgggccctgcctgctgccgtgtcctcagtgagctctctgaggagcaggcctttcacgtcagctacctggatattgaggagctgagcctgagtggactctgccagtgcctggtggaactgtccacccagccggccactgtgtgtcatggctctgcaaccaccagggaggcagcccgtggtgaggctgcccgccgtgccctgcagtacctcaagatcatggcaggcagcaagtgaagccccagctggactcatggatgtgcaccctttgctccctgctctttctgcctctgggctcatgtatctgcgcagctctggtaccctctgtgggtgccatctctacctctgacacagactgcctgccttgaagctgagaaggcacagggcaaggagccaaggaccacagagcctcagccagcccaggatccgtcctcattttattggtgatgatgaatgggaatgaaatcagggggctgtctactagagcctggaataaatatgctgctttgtggatttttaaaaaaaaaaaaaaaaaaaaaaaaaaaaaaaaaaaaaaaaaaa

SEQ ID NO: 6034 - DNA, 1920 bp, Homo Sapiens
  NM_134421
agcttctgccaagggtgggggcccacgcggaggcgatccgctcgttcctcccagggccatggggcgacgaggagagccctggcctccccgcgacccgcaccgcgacctgggccagacgcgccaccttccccggtcgcggtttgcttctctttaaaatgaggacagctcctcccttgggggctgtggtgacaggtgaaatgagaacgcactgaagacagctcttggtccaaagccccgcacacagggcatggtctagtggcccagtcaggacgcggaaacactccctggaggttctgacccactccctctcagcctccgcctggtctctgggttggctgttccagctccaaagagaaggaggaaccttttccttctgcagcccctccccaccagctccattccttagctggggtcagacctggggtcctcactgcagctggcctctggcagcgttctcaggctagccctccctgctgaaaagagaaccgtgtgggactcacaggtgtagtcgccgccgccagccgccatgggcaaacagaacagcaagctgcggcccgaggtgctgcaggacctgcgggagaacacggagttcaccgaccacgagctgcaggagtggtacaagggcttcctcaaggactgccccaccggccacctgaccgtggacgagttcaagaagatctacgccaacttcttcccctacggcgacgcttccaagttcgccgagcacgtcttccgcaccttcgacaccaacggcgacggcaccatcgacttccgggagttcatcattgcgctgagcgtgacctcgcggggcaagctggagcagaagctcaagtgggccttcagcatgtacgacctggacggcaacggctacatcagccgcagcgagatgctggagatcgtgcaggccatctacaagatggtgtcgtctgtgatgaagatgccggaggatgagtccaccccggagaagcgcacagacaagatcttcaggcagatggacaccaacaatgacggcaaactgtccttggaagaattcatcagaggtgccaagagcgacccctccatcgtccgcctgctgcagtgcgaccccagcagtgccagtcagttctgagcgagcggcccctggacagttgcagagaaacacaggcttgtcgtgccgtttaagctttgcttgcaagagtggatgccccgcaatcgttcctgctctcccgggccccgggcctggggcatgcgttgcacctgcccggcccggtggctgcgcctccctcctccacctgaccaacgcgacattcctcccctcacgcctggcccggtcccttccagggcaactcccagggatgtggtgacatgcagggttcaagtgttcttggttccaggcacctcccggctcacggggagctcagaggtccatgccgaggagaccaggcaggacctcccgaggctgcgccccggccggcccatgcgttttgtgatcccaagtgactctgtgggaagggtggggacgaggcgtcgggagggtatacagggagcccctcccgtgcatggctgcccccccgttcattttctccaccacagccgcttgcacgtatagatactgtggtcccctttcttttaatatataaattatgtatggtgaagtggagtgtattgtgtaggtcccgtatttaatgcctctgactgcctttgaagcgcagccctctgtggcccgcagccccctgagcctggctgttgtgtggtatttatgctctctttgtctgcctgtttctaaggaaatgcatgtgtgccctgagccgtgatgatcctcccatccgtgttgtgagcacaggcatttgtgtctggtctgtcctccctgttgattggtctggcatttccggtattaaaatgataaaataaatggcattttctgaaaaaaaaaaaaaaaaa

SEQ ID NO: 6035 - DNA, 2605 bp, Homo Sapiens
  NM_134426
gagcgcagctggcctcacccggtcccggcgccgccttccggagcgtagcggcctctagctcgagcagcaggagcagcccgcaccggacaacttgcgagccatggggctggcggatgcgtcgggaccgagggacacacaggcactgctgtctgcaacacaagcaatggacctgcggaggcgagactaccacatggaacggccgctgctgaaccaggagcatttggaggagctggggcgctggggctcagcacctaggacccaccagtggcggacctggttgcagtgctcccgtgctcgggcctatgcccttctgctccaacacctcccggttttggtctggttaccccggtatcctgtgcgtgactggctcctgggtgacctgttatccggcctgagtgtggccatcatgcagcttccgcagggcttggcctacgccctcctggctggattgccccccgtgtttggcctctatagctccttctaccctgtcttcatctacttcctgtttggcacttcccggcacatctccgtggggacctttgctgtcatgtctgtgatggtgggcagtgtgacagaatccctggccccgcaggccttgaacgactccatgatcaatgagacagccagagatgctgcccgggtacaggtggcctccacactcagtgtcctggttggcctcttccaggtggggctgggcctgatccacttcggcttcgtggtcacctacctgtcagaacctcttgtccgaggctataccacagctgcagctgtgcaggtcttcgtctcacagctcaagtatgtgtttggcctccatctgagcagccactctgggccactgtccctcatctatacagtgctggaggtctgctggaagctgccccagagcaaggttggcaccgtggtcactgcagctgtggctggggtggtgctcgtggtggtgaagctgttgaatgacaagctgcagcagcagctgcccatgccgatacccggggagctgctcacgctcatcggggccacaggcatctcctatggcatgggtctaaagcacagatttgaggtagatgtcgtgggcaacatccctgcagggctggtgcccccagtggcccccaacacccagctgttctcaaagctcgtgggcagcgccttcaccatcgctgtggttgggtttgccattgccatctcactggggaagatcttcgccctgaggcacggctaccgggtggacagcaaccaggagctggtggccctgggcctcagtaaccttatcggaggcatcttccagtgcttccccgtgagttgctctatgtctcggagcctggtacaggagagcaccgggggcaactcgcaggttgctggagccatctcttcccttttcatcctcctcatcattgtcaaacttggggaactcttccatgacctgcccaaggcggtcctggcagccatcatcattgtgaacctgaagggcatgctgaggcagctcagcgacatgcgctccctctggaaggccaatcgggcggatctgcttatctggctggtgaccttcacggccaccatcttgctgaacctggaccttggcttggtggttgcggtcatcttctccctgctgctcgtggtggtccggacacagatgccccactactctgtcctggggcaggtgccagacacggatatttacagagatgtggcagagtactcagaggccaaggaagtccggggggtgaaggtcttccgctcctcggccaccgtgtactttgccaatgctgagttctacagtgatgcgctgaagcagaggtgtggtgtggatgtcgacttcctcatctcccagaagaagaaactgctcaagaagcaggagcagctgaagctgaagcaactgcagaaagaggagaagcttcggaaacaggcagggccccttttgtctgcatgtctggctccccagcaggtgagctcaggagataagatggaagatgcaacagccaatggtcaagaagactccaaggccccagatgggtccacactgaaggccctgggcctgcctcagccagacttccacagcctcatcctggacctgggtgccctctcctttgtggacactgtgtgcctcaagagcctgaagaatattttccatgacttccgggagattgaggtggaggtgtacatggcggcctgccacagccctgtggtcagccagcttgaggctgggcacttcttcgatgcatccatcaccaagaagcatctctttgcctctgtccatgatgctgtcacctttgccctccaacacccgaggcctgtccccgacagccctgtttcggtcaccagactctgaacatgctacatcctgcccaagactgcacctctggaggtgcagggcacccttgagaagcccctcacccctaggccgcctccaggtgctacccaggagtcccctccatgtacacacacacaactcagggaaggaggtcctgggactccaagttcagcgctccaggtctgggacagggcctgcatgcagtcaggctggcagtggcgcggtacagggagggaactggtgcatattttagcctcaggaataaagatttgtctgctcaaaaaaaaaaaaaaaaaaaaa

SEQ ID NO: 6036 - DNA, 3018 bp, Homo Sapiens
  NM_134428
cgtgcgagtgtctccctctccctctcgctctctctctctctccctctctctctctcttttgtgagttatagcaaccgttgccttgtgaatcaagcgccatagtcaccgtagtcctggcgactgttacccatcaacaacaactactcctctcctcctcctcctcctcttcctcctcctcctccccaccaccaccatctccatcacccaccaacaacaccacaataatccacagccaaggccacttggtcattctggcattttatggtagagaatacgttgagtttggctctggaaggaatatgagagaccatcatgcagacatcagagactgggtcggacacaggctcgacagtgaccttacaaacatctgtggctagtcaagcagcagtgcctacgcaggtggtacagcaagtaccagtacaacaacaggtacagcaggtacagactgtgcagcaggtacaacatgtctatcccgctcaggtgcagtatgtggaaggaagcgatactgtctataccaatggagcaatccgaacaacaacgtatccttacacagagacacagatgtacagccaaaatactggagggaattactttgatactcaagggagttccgcccaggtgactaccgtggtctcatcccacagtatggtgggcactggtgggattcagatgggcgtcacaggaggacaactcatcagcagctctggaggaacctatctgatcggcaactcaatggagaattctggtcactcagtgacacacacaactcgggcctccccagcgacaattgaaatggcgattgagacgctgcaaaagtctgacggtctgtccactcacagaagctctcttctcaacagccatctccagtggctgttggacaattatgagacagcagaaggagtgagccttcccagaagcactctgtacaaccactaccttcgacactgtcaggaacacaaactggacccagtcaatgctgcctcttttggaaaattaataagatcaatttttatggggctacgaaccaggagattgggcactagaggaaactccaaataccactactatgggattcgtgtcaagccagattcccctcttaatcgtctgcaagaagacatgcagtatatggctatgagacaacaacccatgcaacagaaacaaaggtacaagcctatgcagaaagtggatggggttgcagatggtttcacaggaagtggtcaacagacaggcacatctgttgagcaaactgtaattgcccaaagccaacatcatcaacagtttttagatgcatctcgagcacttccagagtttggagaagttgaaatctcttctctgccagatggtactacctttgaggatatcaagtcactgcagagtctttatagagagcactgtgaggcaatattggacgttgttgtgaatcttcaatttagcctgatagaaaaattgtggcaaacattctggcgctattctccctctactccaactgatggcactaccattaccgaatcgagcaatctgagtgaaatagaaagtcgacttccgaaagcaaagctgataactctgtgcaaacatgagtctatcctgaaatggatgtgtaactgtgaccatgggatgtaccaggctttggtggagattctcatccccgacgtccttagacctattcctagtgccttgacccaagccattcgaaattttgcaaaaagccttgaaggttggctttccaatgccatgaacaatattccacagagaatgatacaaaccaaggttgccgctgtaagtgcctttgcccagactctgcgaagatacacgtcgcttaatcacctggcccaggcagctcgtgcagtgcttcagaacacttcccaaatcaaccagatgcttagtgacctcaaccgtgtcgactttgccaatgtccaggagcaggcttcctgggtgtgccagtgtgatgacaacatggttcagagactagaaacagacttcaagatgactcttcagcagcagagcaccctggagcagtgggctgcgtggcttgacaatgtgatgatgcaagcactgaaaccctatgaaggaagacccagttttcctaaagccgccaggcagtttctgctaaaatggtctttctacagctcaatggttattcgggacttaaccttacgcagtgctgctagctttggctccttccacctgatccgtctactctacgacgaatatatgttttacttagtagaacatcgtgttgctcaggcaacaggagagactcctatagcagtcatgggcgagtttggtgatttaaatgccgtgtctcctggaaatctggataaagatgaaggcagtgaagtagaaagtgaaatggatgaagaactggatgactcttcagagcctcaagccaaaagagagaaaacagagctgagccaggcatttccagtgggctgcatgcagcctgttctcgagactggcgtgcaaccaagcctcctgaatccaattcacagcgagcacattgtcacaagtactcagactatcagacagtgcagcgctacaggaaatacctacactgcagtctaaagaatattaaagcgtatttttccagcttacattaaccctgttgatattgggcttaagttgaaaatttaataagcctgaaggtcgactgttgtcaaattctatctgtgctgaacattaactttttggagttgtgaaatggaatgggtgtatgtattttgccagatctttttttttaacgtaaacaaattatttgcttcttaataatgaattttttcccttagtttcaggtgtcaagaaggatttttacaacacttaatgtcaatgttttgttttcttataattaaaaagtaatttacattttttgtagcttaaaatattttattgttgattgttagtcttggtgtatgatttcatgtgtaagttttttaattagatgcacttctgtgaaatatcaaaaaaaaaaaaaaaaaaaaaaaaaaaaaaaaaaaaaaaaaaaaaaaaaaaaaaaaaaaaaaa

SEQ ID NO: 6037 - DNA, 4039 bp, Homo Sapiens
  NM_134433
gcgagcgtgggcgggccgttaggaaggtggggcgcggagcctggtaaccgttgccggtaacaacgccccgccccgtcgggcgggcgggctgcgcgaggctggctggcggcgggagccggaggaggagcggccgccgccgccaccgccgccgccatagagactgtagccgtggagactgttacttaccaacggggaccaacacgcagcagccgctgccgccgccgcgggagccgctgcccgaactcccggcccgaactccagacctgagcatgcagaattccgagggtggagcggattcgccagcgtccgtggctctgcgtccctcggcggcagccccgcctgtgccagcctccccgcagagggtgttggtccaggcagccagctccaatcccaaaggggcccagatgcagccgatctccctccccagagttcagcaggtaccccagcaggtgcagccggtgcagcacgtgtatcctgcccaggtgcagtacgtggaagggggagacgccgtctacaccaatggagccatacgaacagcctacacctacaaccccgagcctcagatgtacgcccccagcagcacggcttcttacttcgaggccccaggcggtgcccaggtgaccgtggcagcctcgtccccgccagcggtcccctcccacagcatggtgggcatcaccatggatgtcggggggagccccatcgtctccagcgcgggagcctatctcatccacggggggatggacagcaccagacactccctggcccacacctcccgctcatcgcccgccacgctccagtggctgttggataattatgaaacagcggaaggtgtgagtctccccagaagttctctttacaaccactaccttcggcactgccaggagcacaagctagacccagtgaacgccgcctccttcgggaaactgatccgttctgtgtttatggggctgagaacgcggcggctgggcaccaggggcaactcgaagtaccattactatgggattcgtctgaagccggactcaccactgaaccggctgcaggaggacacgcagtacatggccatgcggcagcagcccatgcaccagaagcccaggtaccggccagcccagaagacggacagcctcggggacagcggctcccacagcggcctgcacagcactccggaacagaccatggccgtgcagagccagcaccaccagcagtacatagatgtctcccacgtcttccccgagttcccagcgcccgacctgggcagcttcctgctgcaggacggcgtcacactgcacgacgtcaaggccctgcagctggtgtacagacggcactgcgaggcaactgtagatgtggtgatgaacctccagttccactacatcgagaagctgtggctctccttctggaactctaaggcctcctccagcgacggccccacctctcttcctgccagtgacgaagaccccgagggcgccgtcctgcccaaggacaagcttatctccctgtgtcagtgcgaccccatcctcaggtggatgaggagctgcgaccacatcctctaccaggcgctggtggagattctcatccccgacgtgctgaggccggtccccagtaccttgacacaggccatccgtaactttgccaagagcttggaaggctggttgacaaatgccatgagtgacttcccacaacaggtcatccagaccaaggtgggcgtcgtcagtgccttcgcccagacgctgcggcgctacacgtccctcaaccacctggcgcaggcggcccgggcggtgctgcagaacacgtcccagatcaaccagatgctcagcgacctcaaccgcgtggactttgccaacgtgcaggagcaggcctcgtgggtgtgccagtgcgaggagagtgtggtgcagcggctggagcaggatttcaagctgaccctgcagcagcagagctccctggaccagtgggccagctggctggacagtgtggtcacccaggtcctgaagcagcatgccggcagccccagcttccccaaggccgcccggcagttcttgctgaaatggtccttttacagctccatggtgatccgggacctgaccctgcgcagcgctgccagcttcggctccttccacctcatccgcctgctctacgacgagtacatgttctacctggtggagcaccgcgtcgcggaggccaccggagagacgccgatcgctgtgatgggagagttcaacgatctcgcctctctgtcgctgacgctgctcgacaaagatgacatgggcgatgagcagcgtggcagcgaggcgggcccagacgcccgcagcctgggtgagcccctggtaaagcgggagcgcagtgaccccaaccactccctgcagggcatctagcagccccggccggcgcctcctcgaggttccaaaagatgccgcctggtcactctgggaacctggatttcaccggctccaccaaattagtgcctcttagatgatgtgatgtttactttgactcaagcgggggctcccggggtcagtgttcaagaaggaaagcagttgttgaagctacagaagcccaggccagggctcccactggctgtagctgtgctctgggtccccaggtccctgcgcagccaccagggccccaccagaccatgggttccttattctggacaaaccctcctctgctggaaccctggactttggccccagtccctttaagagctgaaagggctgtgctgagagcactggcctctgcactcaactggaaccaattttcaccatgattttaaaaattaaaaaaacctggcagagcccgactagaaagggacggcctctcccctcctacctgccaccgctggggaggcacagagctcgccagcgtccctggagtcccctcaggaatggaaagtggagtgcccttgtctggtagcaccatgtgggagggacccagctgggcgcagcgccctgtggccttttagatccagacctccctgccggatgccccgaggcgggaggccggctgtgctgcaggaacccatctccagatgccaaaggacttgaggggcagctgacaatcgctgtgtcccggcagatccgcagctcgaaaaagaacaagccacagaaacgggctcgctcgtgccaggacacagcagtgtctttcaaaaaatcaaaaccagaagttttatcagcagcaggaaggatgtgggactctgtccaagttcaccgtcaccatcaagccactggctgtggaaggagtttgtccaacagggtcagtgtcacagccacaacttcagaaagcagccatcccgcgtgtcgtccaaacagcagtgcctgcgtcccgctccacggagtcttccagaacacctccctctgaactaatcccggagcaccccacccccagcgagtcccacctggacctcttcaaagtcaaaactcttctctcgggacaaacaaatattcgggactttcgaagccctgaacttgagacaccaagtttgtctccatggaaacacgtagccgctgcagttggacagctgcgtgctggagttctgtccccaaaccaactgcagagaagaaagacgagcctcggcccaggacgcgatttctaacgaaatgcaatagttttctctttttggaaaaatgtttataccaatagttttgtgcgctaattgttattagaacgtttcttatgaatgtgtacattgcagtatattcagtcccaaatgttttgttctcattcacacagaaggtactaatgtcagctcacgtggcctttaaaaacctacttccccgcccgcaggagctcagagcatcgctgggcctgcgccagagtgaggggtgcaggaagacaaagacgcgtgctcactttagaaacgaaaagctgggaataatcacactgtttgtctggtcgtatagcccaaaccttagttgaaatcagacagaaagaatgtctttaaaatatacatctcctctccttggagacactgaagctcacagttaacggattgtaatgcccggcttttcctcactcctggtaaccaatacaagctggtttctgccttaaa

SEQ ID NO: 6038 - DNA, 1369 bp, Homo Sapiens
  NM_134440
ccggacgccgcacggctcctgttccggtgtcagagggcccgccctccccgctcctcagtctttgcggacaagaaaggggctgtgtgagacgcagggaaggaggcacacccgggggtggcgcagtgaggagggggcgcgacggccaggaggctggtggagcgacacccaggcaggagagggggaagaactctctccctttctgaacccccttttccttgagagacgagttgggggagtcctccacgcattacccactcgggccgcaaaaactcccttctttagccctctgcccccgcccttgcttataagcctttgagaccgcagaagggaccttgttgtggaacgggacggccaagaggaagccagatcgctgagggtccggtctccagtttgcctcctgctatatccattggaagagaaaagtttgtgacttgggcccccaagttttgagagaactgggctttcggcgcggggggacagaggaggctcgtggggagctttccccatggagcttacccagcctgcagaagacctcatccagacccagcagacccctgcctcagaacttggggaccctgaagaccccggagaggaggctgcagatggctcagacactgtggtcctcagtctctttccctgcacccctgagcctgtgaatcctgaaccggatgccagtgtttcctctccacagggcagctccctgaagcactccaccactctcaccaaccggcagcgagggaacgaggtgtcagctctgccggccaccctagactgtgacaacctcgtcaacaagccagacgagcgcggcttcacccccctcatctgggcctccgcctttggagagattgagaccgttcgcttcctgctggagtggggtgccgacccccacatcctggcaaaagagcgagagagcgccctgtcgctggccagcacaggcggctacacagacattgtggggctgctgctggagcgtgacgtggacatcaacatctatgattggaatggagggacgccactgctgtacgctgtgcgcgggaaccacgtgaaatgcgttgaggccttgctggcccgaggcgctgacctcaccaccgaagccgactctggctacaccccgatggaccttgccgtggccctgggataccggaaagtgcaacaggtgatcgagaaccacatcctcaagctcttccagagcaacctggtgcccgctgaccctgagtgaaggccgcctgccggggactcagacactcagggaacaaaatggtcagccagagctggggaaacccagaactgacttcaaaggcagcttctggacaggtggtgggaggggacccttcccaagaggaaccaataaaccttctgtgcagaatga

SEQ ID NO: 6039 - DNA, 2260 bp, Homo Sapiens
  NM_134447
acacgccgcgctgaggcccgcgggcccgtcatggaggcgcccaccgtggagacgccccccgacccctcgcccccttcggccccggcccctgccctggttccgttgcgcgccccggatgtggcgcggctgcgcgaggagcaggaaaaggaagaaggtagataatgactataatgcccttcgagaaagactcagcaccttgcctgataaattgtcttataatataatggtaccatttggcccttttgccttcatgccaggaaaacttgtccatactaatgaagtcactgttttactgggggacaactggtttgcaaagtgctcagcaaagcaggctgtaggtttagttgagcaccggaaagaacatgtaagaaaaacaatagatgacttaaaaaaagtgatgaaaaattttgaatccagagttgaattcacagaagatttgcagaaaatgagcgatgctgcaggtgatattgttgacatacgagaagaaattaaatgtgacttcgaatttaaagcaaaacaccgaattgctcataaaccgcattccaaaccaaaaacttcagatatttttgaagcagatattgcaaatgatgtgaaatccaaggatttgctagctgataaagaactgtgggctcgacttgaagaactagagagacaggaagaattgctgggtgaacttgatagtaagcctgatactgtgattgcaaatggagaagatacgacatcttctgaagaggaaaaggaagatcgtaacacaaatgtgaatgcgatgcatcaagtaacagactctcatactccttgtcataaggatgttgcaagttcagaaccattcagtggtcaagtgaatagtcagttgaactgttcagtgaatggttccagttcttaccacagtgatgatgatgatgatgatgatgatgacgacgacgacgacaacattgacgacgatgatggtgataacgaccatgaggctttaggggttggagataattctataccaacaatatatttttcacatactgttgagcctaagagggtccgaataaatactggaaagaataccactttaaaattcagtgaaaagaaagaagaagccaaacgtaaacgaaagaacagcactggcagtggccactctgcccaggagctgccgaccatcaggacgcctgcagacatttacagagcctttgttgatgttgtgaatggagaatatgtccctcgcaaatccatcctgaagtctcgaagtagagagaatagtgtgtgtagcgacactagtgaaagcagtgctgctgaatttgatgataggcggggagttttgaggagtatcagctgcgaagaagccacttgcagtgacaccagtgagagcattttggaagaggaaccacaagaaaatcaaaagaaacttttgcccttatcagtaacacctgaggctttttctggaactgttatagaaaaagaatttgtatcaccttccttaacaccacccccagccattgctcatcccgcactacccactattccagaacgaaaggaagttctgttggaagcatctgaagaaactggaaagagggtttcaaagtttaaagctgccagattgcaacagaaagactaggccctgtctaggaaatgggaatttacatcctaaaacctagttgttcatttgtttagagtatctatagcaaaataggttacatgtagtttgaaataaggtatcctgagttactttggcaacaagttcttttacccttacccgtggtatttgaaaaaaatcaaggtaactgtctgaatactttaatatcagcttgttttgtgaattctctgaatactgtcaacactcttatctaagtttgcctttatgatgcagtggcagcattttgaattacttttcaaagaatactgttcatatgcattgtttttgtgtttcaaactaaatacaggcagttttgtgccagctgtgatattgtgcataccatatggaccattttaaagaaaattttaaaatttcaaatagattcaacaattacattacttgctttcacattttaaaggcactttaaaaaaatctacttctcttgtaggttttgcggctagttggctattcaagaaacctcgcccctctgaatgtcatactgtaatctttaaggaagaaagctacatgaattaattgtactctatgggaaaatttctttggaaagatattttgtaaaacttttttttccaagtaaaaactttatgaaacttggtctcaaaaaaaaaaaaaaaaaaaaaa

SEQ ID NO: 6040 - DNA, 1649 bp, Homo Sapiens
  NM_138285
acgcaaccccataaggtagcacgccgttacccgtggggagcgtttccgccatttttgaaaattaattgggaaggtactggttttaagtgtagttgccgacgcaatggcagcctttgcagtggaacctcaggggcccgcgttaggatctgaaccaatgatgctgggttcacccacatctccaaagccaggagttaatgcccagttcttacctggatttttaatgggggatttgccagctccggtgactccacaacctcgatcaattagtggcccttcagtaggagtaatggaaatgagatcacctttacttgcaggtgggtcaccaccacaaccagttgtaccagctcataaagataaaagtggcgctccaccagttagaagtatatatgatgacatttctagcccaggacttggatcaacacctttaacttcaagaagacagccaaacatttcagtaatgcagagtcctcttgttggagttacatctactcctggaacagggcaaagtatgtttagtccagcaagtatcggtcagccacgaaagacgacattatctcctgcccagttggatcctttttatactcaaggagattctttgacttcagaagatcacctcgatgactcttgggtgactgtatttgggtttcctcaagcatctgcttcctacatattactacaatttgcacagtatgggaatatcttaaaacatgtgatgtctaatacaggaaattggatgcatattcgttatcaatctaaactgcaggctcggaaagccttaagcaaagatgggaggatttttggagaatccatcatgattggtgtaaaaccatgtattgacaaaagtgttatggaaagcagtgacagatgtgctttatcatctccatctttagcctttacaccaccaatcaaaactctaggtacaccaacacaacctggaagtactcctaggatttctaccatgagacctcttgctacagcatacaaagcctctactagtgattatcaggttatttctgacagacaaacgccaaaaaaagatgaaagtcttgtatccaaagcaatggagtacatgtttggctggtagtagaacaccaagaaggaggttgctacactaaaacagagttagcagagtgctgctggttccttcggttagttatataactgttcctgcagtattggatagctatctcatacttcttttagaaagaagcctttttcattaaggatacaacctatttgtagctcgcactttaaaagatgcttgagatacattttaaagaaaactaaaaatccctgtaaataggattttgtgctttctgtaacagtgcatgcttcagcacagaaaactcagcattgattattgtaaattaaataactgaaattgtggtgagacgtcatagtcttcatgagaacgtgggggtgaatttcatgaaggggaactatagttatttctaccgacacaaatattataattagcaatttgaattatggtcttttaatttagatagtatttaatattttaattatccttgtttgtatatgtcctgtcacagagtgtcctcttggtgtattctaaaacgagcattcttttaaaaaacctaaagtttcttgataataaacattgtcaatgataaaaaaaaaaaaaaaaa

SEQ ID NO: 6041 - DNA, 3227 bp, Homo Sapiens
  NM_138300
ggttccggttgctgccgccgctggcgggcggcgagtctggagagagcgcgcagtttgcgcggcggctcggcgcttccctgtcgtcgcactttgtggttgctgcagctcgggggcctgggctgcccctgacaccccttctgggcgatggtgcagcccaagggcgcctccatcccccgccgctgccgctaacccgggtcccccactccatggccgcctcggcgccgcccccaccggacaagctggagggaggtggcggccccgcaccgccccctgcgccgcccagcaccgggaggaagcagggcaaggccggtctgcaaatgaagagtccagaaaagaagcgaaggaagtcaaatactcagggccctgcatactcacatctgacggagtttgcaccacccccaactcccatggtggatcacctggttgcatccaacccttttgaagatgacttcggagcccccaaagtgggggttgcagcccctccattccttggcagtcctgtgcccttcggaggcttccgtgtgcaggggggcatggcgggccaggtacccccaggctacagcactggaggtggagggggcccccagccactccgtcgacagccaccccccttccctcccaatcctatgggccctgctttcaacatgcccccccagggtcctggctacccacccccaggcaacatgaactttcccagccaacccttcaaccagcctctgggtcaaaactttagtcctcccagtgggcagatgatgccgggcccagtggggggatttggtcccatgatctcacccaccatgggacagcctcccagagcagagctgggcccaccttctctgtcccaacgatttgctcagccaggggctccttttggcccttctcctctccagagacctggtcaggggctccccagcctgccgcctaacacaagtccctttcctggtccggaccctggctttcctggccctggtggtgaggatggggggaagcccttgaatccacctgcttctactgcttttccccaggagccccactcaggctccccggctgctgctgttaatgggaaccagcccagtttccccccgaacagcagtgggcggggtgggggcactccagatgccaacagcttggcaccccctggcaaggcaggtgggggctccgggccccagcctcccccaggcttggtgtacccatgtggtgcctgtcggagtgaggtgaacgatgaccaggatgccattctgtgtgaggcctcctgccagaaatggttccaccgtgagtgcacaggcatgactgagagcgcctatgggctgctgaccactgaagcttctgccgtctgggcctgcgatctctgcctcaagaccaaggagatccagtctgtctacatccgtgagggcatggggcagctggtggctgctaacgatgggtgacgctggtgaagtggcccagggaagtgcacatgtctctccctgctcttccagggtgatttttttgatgtttggctcttggtccttgtttccactggctttccatccccatggggcagaaacagtggctcctgggagcagaaaaggaattgaggtgggcaggcagaagagcctggattgctcactgttttgggaaacttacatgttgagatctacagagatccaggaaaccaaagccctgctgagcagagccattttgtggctatttctggaggcccaggagtgtggctgcaagagaaaaggggctggaggaagatccggagggcaggggtgttccctctgctgatgatggatgcccctaacacctgtgcctaacacccctactgaaccccacagctccagccttagtttttggagtcaagtgttaaaggtttctggccagaggaattggggtcttgccatccctgcaatagcccttttatgggctctgggagacagctttagggaataaatggggattttcccctttttctacccactcctttgcttcctccaagacttacccaactccttccccctcagagaaccaaatagcctgaggaagcaggagagttcctggttatggcagtttcttggtgatttggggcttcaagacagtaggtgagagatgctgtcaggacgtatcttcttcataccaaagtcactggtcctttctcagcctctctcgtgcttttctcctaatgaccatatttttgccaaaaattgggatatgttatctgacagaccagaatatttgaagtttgggctgtcctgaaagtctggactttggtggtaccctcctcccccagcccatctgttgcacattatactccgtgtgttcttcaactttcggcgcccttattcccctgccttcctggcttgattgaaggaaagcttgaaaaggcgcagagccctatacctcatttcctccatgataaaaggatccaagtgaggccctgtcacagcctgtgggtaggggatgcggcgggatcctcattgccatggtactcaaaggtagaagagcctggagtttgttgcttctctttgctattctttcatatcctcttgggcctggtgattaattagcaattctcattcctctcagccaaaggcctgcactgggctttatttgtctttttttattttttaagcactgcctgccagagatgggcctggggcctgatgaggaccttagcgctgctcgttctccttttctgttcatgcacacattcctccatggggtggggaaggcaggcatggggtgtggccctcggagaagttaggagtcccccagctcaagatacagtggcaaagacctagtggtcccctacccccacttctctcagttcctggcatgaggagagaagaccctgctctggtggagctgacaacctttgaggctgggaggagagcagcctctgggcatcgttcccagtgtccctcacactaaaacggcgtagatggcaaccccccacccccaccccgctgctcaactcttgtgtttgttgttctgtttgccccatttatctgttgctgtttttgtgttgtcttcccctgctccgcattttgtaaaatggcccctgggggagtgtttttgctggatctgctccctctcgctctctcactccactactttttggaacaaagtgatggcagaatgcggtggtggtgggggtcttttgtactgttggattaataaaatgattttaaaatcccaaaaaaaaaaaaaaaaaaaaaaaaaaaaaaaaaaaaaaaaaaaaaaaa

SEQ ID NO: 6042 - DNA, 3372 bp, Homo Sapiens
  NM_138320
tcgcgggccgaggacgcctctggggcggcaccgcgtcccgagagccccagaagtcggcggggaagtttccccggtggggggcgtttcgggcctcccggacggctctcggccccggagcccggtcgcaggagcgcgggcccgggggcgggaacgcgccgcggccgcctcctcctccccggctcccgcccgcggcggtgttggcggcggcggtggcggcggcggcggcgcttccccggcgcggagcggctttaaaaggcggcactccaccccccggcgcactcgcagctcgggcgccgcgcgagcctgtcgccgctatgcctccgcgcgcgccgcctgcgcccgggccccggccgccgccccgggccgccgccgccaccgacaccgccgcgggcgcggggggcgcggggggcgcggggggcgccggcgggcccgggttccggccgctcgcgccgcgtccctggcgctggctgctgctgctggcgctgcctgccgcctgctccgcgcccccgccgcgccccgtctacaccaaccactgggcggtgcaagtgctgggcggcccggccgaggcggaccgcgtggcggcggcgcacgggtacctcaacttgggccagattggaaacctggaagattactaccatttttatcacagcaaaacctttaaaagatcaaccttgagtagcagaggccctcacaccttcctcagaatggacccccaggtgaaatggctccagcaacaggaagtgaaacgaagggtgaagagacaggtgcgaagtgacccgcaggccctttacttcaacgaccccatttggtccaacatgtggtacctgcattgtggcgacaagaacagtcgctgccggtcggaaatgaatgtccaggcagcgtggaagaggggctacacaggaaaaaacgtggtggtcaccatccttgatgatggcatagagagaaatcaccctgacctggccccaaattatgattcctacgccagctacgacgtgaacggcaatgattatgacccatctccacgatatgatgccagcaatgaaaataaacacggcactcgttgtgcgggagaagttgctgcttcagcaaacaattcctactgcatcgtgggcatagcgtacaatgccaaaataggaggcatccgcatgctggacggcgatgtcacagatgtggtcgaggcaaagtcgctgggcatcagacccaactacatcgacatttacagtgccagctgggggccggacgacgacggcaagacggtggacgggcccggccgactggctaagcaggctttcgagtatggcattaaaaagggccggcagggcctgggctccattttcgtctgggcatctgggaatggcgggagagagggggactactgctcgtgcgatggctacaccaacagcatctacaccatctccgtcagcagcgccaccgagaatggctacaagccctggtacctggaagagtgtgcctccaccctggccaccacctacagcagtggggccttttatgagcgaaaaatcgtcaccacggatctgcgtcagcgctgtaccgatggccacactgggacctcagtctctgcccccatggtggcgggcatcatcgccttggctctagaagcaaacagccagttaacctggagggacgtccagcacctgctagtgaagacatcccggccggcccacctgaaagcgagcgactggaaagtgaacggcgcgggtcataaagttagccatttctatggatttggtttggtggacgcagaagctctcgttgtggaggcaaagaagtggacagcagtgccatcgcagcacatgtgtgtggccgcctcggacaagagacccaggagcatccccttagtgcaggtgctgcggactacggccctgaccagcgcctgcgcggagcactcggaccagcgggtggtctacttggagcacgtggtggttcgcacctccatctcacacccacgccgaggagacctccagatctacctggtttctccctcgggaaccaagtctcaacttctggcaaagaggttgctggatctttccaatgaagggtttacaaactgggaattcatgactgtccactgctggggagaaaaggctgaagggcagtggaccttggaaatccaagatctgccatcccaggtccgcaacccggagaagcaagggaagttgaaagaatggagcctcatactgtatggcacagcagagcacccgtaccacaccttcagtgcccatcagtcccgctcgcggatgctggagctctcagccccagagctggagccacccaaggctgccctgtcaccctcccaggtggaagttcctgaagatgaggaagattacacagctcaatccaccccaggctctgctaatattttacagaccagtgtgtgccatccggagtgtggtgacaaaggctgtgatggccccaatgcagaccagtgcttgaactgcgtccacttcagcctggggagtgtcaagaccagcaggaagtgcgtgagtgtgtgccccttgggctactttggggacacagcagcaagacgctgtcgccggtgccacaaggggtgtgagacctgctccagcagagctgcgacgcagtgcctgtcttgccgccgcgggttctatcaccaccaggagatgaacacctgtgtgaccctctgtcctgcaggattttatgctgatgaaagtcagaaaaattgccttaaatgccacccaagctgtaaaaagtgcgtggatgaacctgagaaatgtactgtctgtaaagaaggattcagccttgcacggggcagctgcattcctgactgtgagccaggcacctactttgactcagagctgatcagatgtggggaatgccatcacacctgcggaacctgcgtggggccaggcagagaagagtgcattcactgtgcgaaaaacttccacttccacgactggaagtgtgtgccagcctgtggtgagggcttctacccagaagagatgccgggcttgccccacaaagtgtgtcgaaggtacggtcctcctggcggggaacggcaggcagctgtgtccagcaaaggagtgcctggagggcagagtctggcagcatcttccccaggggccggggagggcatgttgcatcaccccactgtggacaggagcccatttacagagctgctgaggggccttcgtccctttgttcactggatgcatatttgttgggtccctgctgtgggcagacaccgtgcagcagcgggataagatgggaagcagaatagcaaggtgctcacaccccattggtggactacgcgggacgtccctgcccatgtcgcgctcagcatgcatcctttgcactgtcgataatcagagaaaccatgttttgggttaaaaa

SEQ ID NO: 6043 - DNA, 3208 bp, Homo Sapiens
  NM_138323
tcgcgggccgaggacgcctctggggcggcaccgcgtcccgagagccccagaagtcggcggggaagtttccccggtggggggcgtttcgggcctcccggacggctctcggccccggagcccggtcgcaggagcgcgggcccgggggcgggaacgcgccgcggccgcctcctcctccccggctcccgcccgcggcggtgttggcggcggcggtggcggcggcggcggcgcttccccggcgcggagcggctttaaaaggcggcactccaccccccggcgcactcgcagctcgggcgccgcgcgagcctgtcgccgctatgcctccgcgcgcgccgcctgcgcccgggccccggccgccgccccgggccgccgccgccaccgacaccgccgcgggcgcggggggcgcggggggcgcggggggcgccggcgggcccgggttccggccgctcgcgccgcgtccctggcgctggctgctgctgctggcgctgcctgccgcctgctccgcgcccccgccgcgccccgtctacaccaaccactgggcggtgcaagtgctgggcggcccggccgaggcggaccgcgtggcggcggcgcacgggtacctcaacttgggccagattggaaacctggaagattactaccatttttatcacagcaaaacctttaaaagatcaaccttgagtagcagaggccctcacaccttcctcagaatggacccccaggtgaaatggctccagcaacaggaagtgaaacgaagggtgaagagacaggtgcgaagtgacccgcaggccctttacttcaacgaccccatttggtccaacatgtggtacctgcattgtggcgacaagaacagtcgctgccggtcggaaatgaatgtccaggcagcgtggaagaggggctacacaggaaaaaacgtggtggtcaccatccttgatgatggcatagagagaaatcaccctgacctggccccaaattatgattcctacgccagctacgacgtgaacggcaatgattatgacccatctccacgatatgatgccagcaatgaaaataaacacggcactcgttgtgcgggagaagttgctgcttcagcaaacaattcctactgcatcgtgggcatagcgtacaatgccaaaataggaggcatccgcatgctggacggcgatgtcacagatgtggtcgaggcaaagtcgctgggcatcagacccaactacatcgacatttacagtgccagctgggggccggacgacgacggcaagacggtggacgggcccggccgactggctaagcaggctttcgagtatggcattaaaaagggccggcagggcctgggctccattttcgtctgggcatctgggaatggcgggagagagggggactactgctcgtgcgatggctacaccaacagcatctacaccatctccgtcagcagcgccaccgagaatggctacaagccctggtacctggaagagtgtgcctccaccctggccaccacctacagcagtggggccttttatgagcgaaaaatcgtcaccacggatctgcgtcagcgctgtaccgatggccacactgggacctcagtctctgcccccatggtggcgggcatcatcgccttggctctagaagcaaacagccagttaacctggagggacgtccagcacctgctagtgaagacatcccggccggcccacctgaaagcgagcgactggaaagtgaacggcgcgggtcataaagttagccatttctatggatttggtttggtggacgcagaagctctcgttgtggaggcaaagaagtggacagcagtgccatcgcagcacatgtgtgtggccgcctcggacaagagacccaggagcatccccttagtgcaggtgctgcggactacggccctgaccagcgcctgcgcggagcactcggaccagcgggtggtctacttggagcacgtggtggttcgcacctccatctcacacccacgccgaggagacctccagatctacctggtttctccctcgggaaccaagtctcaacttctggcaaagaggttgctggatctttccaatgaagggtttacaaactgggaattcatgactgtccactgctggggagaaaaggctgaagggcagtggaccttggaaatccaagatctgccatcccaggtccgcaacccggagaagcaagggaacctggactaaaacacgtgttccggtggcagattgaacaagagctttggtaatctctgtgaaatactgcagagggacagatgaccaaagccaccacatttagaactttggctgcctttggaagtccagagctggatctctcagctcccgcccccagaggctcagcactttggacatggctcacaaacagttgttgattgactgcatgaatgcgtgtgcgtgcaagcatgaaccttgtttaaatcaagagcttacataattttaaccagttctgtcttcagctgtacatactcagtaaaatgtttaatgaaggggaagagattagtctcttctgtgtgaccatgttttccctttattcatcctaaaaagttccatgaattcttgatttcctttcagtggccctttcaacaatgtcttttttcccaagagcataactgttctcattttattgctagccatcttgatctgtgttttattgacatctcttttgagctaatcttcatttctaagataagagttgagattttgcaatctgtgttcgatggctcaatctatcctgtgcttgatgctagaaaggaagacagatttaaagcacatgccttctgtgccggctttcaagtttgtcactaaactctcatttctggaaagtgcaattatagagtatcactcccacttccttggaaacagagctgaagaacttggcacactctccaaacagtcaccatacacactgttgtcaaaaagttccatttttaaccccatttgcattaatattgcagtcaatctctttacctccttttctctttcacggggccgtgacagtgacgcctttccccaaaactctcctcgtttgagaaaaaaagaagtatgtatccccacttatctcggggagaaatgcaaccaactgctgctgtgcacatttatgaatcacagtattgtttagtcggttctgtatctccagtagaaagcataacaaaaagatgacctttgtctcacctcatagctaatttttgcaaataaaatactaaacattg

SEQ ID NO: 6044 - DNA, 2358 bp, Homo Sapiens
  NM_138325
tcgcgggccgaggacgcctctggggcggcaccgcgtcccgagagccccagaagtcggcggggaagtttccccggtggggggcgtttcgggcctcccggacggctctcggccccggagcccggtcgcaggagcgcgggcccgggggcgggaacgcgccgcggccgcctcctcctccccggctcccgcccgcggcggtgttggcggcggcggtggcggcggcggcggcgcttccccggcgcggagcggctttaaaaggcggcactccaccccccggcgcactcgcagctcgggcgccgcgcgagcctgtcgccgctatgcctccgcgcgcgccgcctgcgcccgggccccggccgccgccccgggccgccgccgccaccgacaccgccgcgggcgcggggggcgcggggggcgcggggggcgccggcgggcccgggttccggccgctcgcgccgcgtccctggcgctggctgctgctgctggcgctgcctgccgcctgctccgcgcccccgccgcgccccgtctacaccaaccactgggcggtgcaagtgctgggcggcccggccgaggcggaccgcgtggcggcggcgcacgggtacctcaacttgggccagattggaaacctggaagattactaccatttttatcacagcaaaacctttaaaagatcaaccttgagtagcagaggccctcacaccttcctcagaatggacccccaggtgaaatggctccagcaacaggaagtgaaacgaagggtgaagagacaggtgcgaagtgacccgcaggccctttacttcaacgaccccatttggtccaacatgtggtacctgcattgtggcgacaagaacagtcgctgccggtcggaaatgaatgtccaggcagcgtggaagaggggctacacaggaaaaaacgtggtggtcaccatccttgatgatggcatagagagaaatcaccctgacctggccccaaattatgattcctacgccagctacgacgtgaacggcaatgattatgacccatctccacgatatgatgccagcaatgaaaataaacacggcactcgttgtgcgggagaagttgctgcttcagcaaacaattcctactgcatcgtgggcatagcgtacaatgccaaaataggaggcatccgcatgctggacggcgatgtcacagatgtggtcgaggcaaagtcgctgggcatcagacccaactacatcgacatttacagtgccagctgggggccggacgacgacggcaagacggtggacgggcccggccgactggctaagcaggctttcgagtatggcattaaaaagggccggcagggcctgggctccattttcgtctgggcatctgggaatggcgggagagagggggactactgctcgtgcgatggctacaccaacagcatctacaccatctccgtcagcagcgccaccgagaatggctacaagccctggtacctggaagagtgtgcctccaccctggccaccacctacagcagtggggccttttatgagcgaaaaatcgtcaccacggatctgcgtcagcgctgtaccgatggccacactgggacctcagtctctgcccccatggtggcgggcatcatcgccttggctctagaagcaaacagccagttaacctggagggacgtccagcacctgctagtgaagacatcccggccggcccacctgaaagcgagcgactggaaagtgaacggcgcgggtcataaagttagccatttctatggatttggtttggtggacgcagaagctctcgttgtggaggcaaagaagtggacagcagtgccatcgcagcacatgtgtgtggccgcctcggacaagagacccaggagcatccccttagtgcaggtgctgcggactacggccctgaccagcgcctgcgcggagcactcggaccagcgggtggtctacttggagcacgtggtggttcgcacctccatctcacacccacgccgaggagacctccagatctacctggtttctccctcgggaaccaagtctcaacttctggcaaagaggttgctggatctttccaatgaagggtttacaaactgggaattcatgactgtccactgctggggagaaaaggctgaagggcagtggaccttggaaatccaagatctgccatcccaggtccgcaacccggagaagcaaggtgatcttgagactcctgttgcaaatcaactgaccacagaagagaggttcgtttccacactctcgattctgttccattggtctgtatatctatcttggagtcagtaccatattgttttgatcactgtagctttgtagtaagttttgaaataagaaagtgcgagtcctccaaaaaaaaaaaaaaaaa

SEQ ID NO: 6045 - DNA, 1278 bp, Homo Sapiens
  NM_138326
acagttttcacaaaggtctcttgatatcaaaacttctttccttgcatgcttctctgatcctgtggagatgaaaattgacatccatagtcatattctaccaaaagaatggccagatctaaaaaagaggtttggctacggaggctgggtgcagctccaacaccacagcaagggagaagcaaagttgttgaaagatgggaaagtcttcagagtggtgcgagagaattgctgggatccagaagttcgtattagagaaatggaccaaaaaggagtaacagtgcaagccctttccacagttcctgtcatgtttagctactgggccaaacctgaggacactttaaacctgtgccagcttttaaacaacgaccttgccagcaccgttgtgagctaccccaggaggttcgtgggtctggggacgttgcccatgcaggcccctgagctggcggtcaaggagatggagcgctgtgtgaaagagctgggctttcccggggtccaaattggcacccacgtcaacgagtgggacctgaacgcgcaggagctctttcctgtctatgcggcagccgaaaggctgaagtgttccctgttcgtgcatccctgggacatgcagatggatggacgaatggccaaatactggctcccttggcttgtaggaatgccagcagagaccaccatagccatttgctccatgatcatgggtggagtatttgagaagtttcccaaactgaaagtgtgtttcgcacatggtggtggtgccttccccttcacagtgggaagaatctcccatggattcagcatgcgcccagatctgtgtgcccaggacaaccccatgaacccgaagaaataccttggttccttttacacagatgctttggttcatgatcctctgtccctcaagctgttaacagatgtcataggaaaggataaagtcattttgggaaccgattacccctttccactaggtgagctggaacctgggaaactaatagagtccatggaagaatttgatgaagaaacaaagaataaactcaaagccggcaatgccctggcatttttgggtcttgagagaaaacaatttgaatgactgaatttactacaaaggcaaactttcaaaaggatatctcatttttgtttctaaatatgtatcaacaggtatcaacaaaatcctattttgaactattttactcagaaatgaatgtcccaaatatcctaaattattcataataaaaatgatttgtaagtgttttcattctgaaaaaaaaaaaaaaaaaaaaaaaaaaaaaa

SEQ ID NO: 6046 - DNA, 1939 bp, Homo Sapiens
  NM_138335
cgcctttatctgcatccgggtccgtgggattcgcgctccactggtcagctggggtcgctctcgggtggttgggtgttgcttgttcccgctgttccagcgtcgaagaaccattgggtctgccggtttgaacttgttctggaagctgtgcgtcaccgtaatgaggcttgtaattcttgataactatgacttggctagtgaatgggcagccaaatacatctgtaatcgcatcattcagttcaaacctggacaggacagatattttacactgggtttaccaacagggagtacacctttaggatgctataaaaaactaatagaatatcataagaatggacacctttcttttaaatatgtgaagacctttaatatggatgaatatgtaggacttccaagaaatcatcctgaaagctaccattcttatatgtggaataatttttttaagcatatcgatatagatcctaataatgcacatatccttgacgggaatgctgcagatttacaagcagaatgtgatgcttttgaaaacaaaataaaagaagctggaggaatagatctttttgttggaggaattggtccagatggtcatatcgctttcaatgagcctggatccagtttagtgtcaaggacaagattaaagactctagcaatggataccatcttggcaaatgccaaatattttgatggagatttatcaaaagtgccaactatggctctaactgttggtgtggggacagtgatggatgctagagaagtaatgatccttataacaggggcacacaaggcatttgccctgtacaaagcaatagaagaaggagtcaatcacatgtggactgtttccgctttccagcagcatccccggactatttttgtatgcgatgaagatgctactttagaattaagagttaaaactgtgaaatactttaaaggtctaatgcatgtgcacaataaacttgtggatccactattcagtatgaaagatggaaactgaaggagactggagcaaaattcagcttgaatgaacagagcactttttactaagtagtagatgaattttcagctatgcaatatgacaaaacatggggaattttgaagattgtcattttttcattcgagtctctatgttaaacattccatattttgaatatttatatcttgtacttgggtttaagagaagtagctggctctcaagattgactggctatttattataaagtactgaagtcacatagccacctataaaacagcatagaaatgtctgcctgtttaaaaagtcattttaaaggtagagtgtccacatcaggcaccatttgtgatatgactccagtggcatatatttcattttttaatgacaagacactccaaacctttcagataacaaactatcattgcagaccttcacttttggaatgcaatctttatattttctgtgcatcacacacatgcttttctgcacgtggttgccttagtcatcttcctacagcaccatctagacatcaaaaattgtgctatatatcattggtaaaggaaatttgaagagatgacagtgcctaaaagtacagtttacatccttttggaaagtatgtgtaagtgcatgttttttgtgcaccttcttctatagcacttttttacaaatatcttatttttatttaacgacttgggttcatgtccctaatataagtatcttgacaattatgagctttatacctagcaagccacttcaggaaattcttttggagaatattttctgattattgttaaacttaatatacaattagctttattccttataaaatgtctaaaagaataatacgaagtatatataaaaggaattactgtaaactacattgccatagcaatttacataaaagtatattgttttctatctttaactcaaataaagcgtgtaataaataagttaaaaaaaaaaaaaaaaaaaaaa

SEQ ID NO: 6047 - DNA, 1543 bp, Homo Sapiens
  NM_138341
ggaaaatgggctcctgcgcgcgcgcactcgccgagtcttccggcgggtccgcccagttccgttcctgctccgcttgaggagaagcgccaagtgcgcatggggacgctatagcaattcgtttgctgtccttcctctccttcgaagatgacaaggcctaccatcgtttcttcctgcctttgggccgtcaggcagttggttgggacccgctccaaccctcggttcttcctgcaatacagtggatacaatttgtcatggctactctgagataagaccacttttttatctgagcttctgtgacctgctcctgggactttgctggctcacggagacacttctctatggagcttcagtagcaaataaggacatcatctgctataacctacaagcagttggacagatattctacatttcctcatttctctacaccgtcaattacatctggtatttgtacacagagctgaggatgaaacacacccagagtggacagagcacatctccactggtgatagattatacttgtcgagtttgtcaaatggcctttgttttctcaagcctgatacctctgctattgatgacacctgtattctgtctgggaaatactagtgaatgtttccaaaacttcagtcagagccacaagtgtatcttgatgcactcaccaccatcagccatggctgaacttccaccttctgccaacacatctgtctgtagcacactttatttttatggtatcgccattttcctgggcagctttgtactcagcctccttaccattatggtcttacttatccgagcccagacattgtataagaagtttgtgaagtcaactggctttctggggagtgaacagtgggcagtgattcacattgtggaccaacgggtgcgcttctacccagtggccttcttttgctgctggggcccagctgtcattctaatgatcataaagctgactaagccacaggacaccaagcttcacatggccctttatgttctccaggctctaacggcaacatctcagggtctactcaactgtggagtatatggctggacgcagcacaaattccaccaactaaagcaggaggctcggcgtgatgcagatacccagacaccattattatgctcacagaagagattctatagcaggggcttaaattcactggaatccaccctgacttttcctgccagtacttctaccattttttgaaactacaatactggaacatccaggaactggagttattctacgctaatggattggaaagaatgttgggaaaggacatcttaaatcttttctaactatgccctaaactgcagaactcaaaggaaatatagtgccattgttagtagtcattctagatgaattgggagtatctctccagttattcccagattcactagtgatccttaaagtctctattcagggagaggaagacactttccatctcagagatagactcgtgttaccttgatggatattggatttgtctaagtctcttctagaaaaaataaattctagattattatttatatgtgtcatttcaaaaaa

SEQ ID NO: 6048 - DNA, 2362 bp, Homo Sapiens
  NM_138346
agcgggtttttgacggctggaggccaccgagaagaaggaggaagcaggggtggcggctgctgcggcggttgcggcgggggccggggtgggcgccgcggtccgggccgggcagtgaggcgcgggcggccgggccggtgggctgggcggcgggcccggcggccgccctcgcacccttgcccgcgcctggcggcccgatgtggctgcagcagcggctcaaggggctgccgggactgctgtcgagcagctgggcccgccgcctcctctgcctgcttggcctcctgctgctgcttctgtggtttggggggtccggcgcgcggcgggcggcgggcggcctgcacctgctgccctggtcccgcggtgagccgggcgccgccgagccgtctgcctgcctggaggcggccacccgcgcctggcgcggcctgcgggagcgcggtgaggtggtaccgctgggtcctggagtgccggccctggtggccaacggcttcctggcactggacgtggctgccaatcggctgtgggtgactcccggggagcgggagcccgccgtggcgccggactttgtgcccttcgtgcagctgcgcccgctgagcgcgctggctgaagctggagaggcggtgctgctgctgcgggaggggcttctgcgccgcgtgcgttgcctgcagctggggtccccaggtcctggccccgtggccgccggccccgggcccgcctccgtctctggccttgccgcggggtccggccgcgactgcgtgctgctgcaagaggactttctggcgcacaggggccgaccccacgtctacctgcagcgcatccagctcaacaaccccacggagcgcgtggccgcgctgcagactgtggggcccactgccggcccagcccccaaggccttcaccagtaccctggagaaggtcggagaccatcagttcctcctctactcaggccggtccccgcctacgcccactgggttggtgcacctggtggtggtggccgccaagaagctggtgaaccgcctccaagtggctcccaagacgcagctggatgagacggtgctgtgggtggtgcacgtctctggccccattaacccccaggtgctcaaaagcaaagcagccaaggagctcaaggcgctgcaggacttggcacggaaggaaatgctggagctcttggacatgccagcggcggagctgcttcaagaccaccagctcctctgggctcagctcttcagcccaggagtggaaatgaagaagatcactgacacccacacgccgtctggcctcaccgtgaacctgacgctctattacatgctctcctgctcgccagccccactgctcagcccctccctgagccacagggagcgagaccagatggagtcgacgctcaactatgaagatcactgcttcagcgggcacgccaccatgcacgccgagaacctgtggccggggcggctgtcctccgtccagcagatcctgcagctctctgacctgtggaggctgaccctccagaagcgtggctgcaaggggctggtgaaggtgggtgccccaggcatcctgcaggggatggtgctcagctttggggggctgcagttcacagagaaccacctccagttccaggccgaccccgacgtgctgcacaacagctatgcattgcatggcatccgctacaagaacgaccatatcaacctggccgtgctggcggatgccgagggcaagccctacctacacgtgtccgtggagtcccgtggccagcctgtcaagatctatgcctgcaaggcaggctgcctggacgagccagtggagctgacctcggcgcccacgggccacaccttctcggtcatggtgacacagcccatcacgccactgctctacatctccaccgacctcacacacctgcaggacctgcggcacacgctgcacctcaaggccatcctggcccatgatgagcacatggcccagcaggaccccgggctgcccttcctcttctggttcagcgtggcctccctaatcaccctcttccacctcttcctcttcaagctcatctacaacgagtactgtgggcctggagccaagcccctcttcaggagtaaggaagatcccagtgtctgagtgaactaacagtcctgctttcagccaccatttgcacaagacacccagcactgaaagtcccgctgccaggagcaagggatcctttggaagcacccgccctttgtgccttgttgggggaaaccggtgacgcagaagtgagtgtggatacaccagagtttgcattggaaggaatgagtgtcacgtggggagggaaggggccagtggaccttttgtaagctttccactcaataaaatgaacctgtatggcaaaaaaaaaaaaaaaa

SEQ ID NO: 6049 - DNA, 3711 bp, Homo Sapiens
  NM_138347
gtcctcctcgtggcggtcattttggcctctgtcctgtttgtccagcccgccagtttctgcagtggaggtcgcgactgagggacgggacagagaagtcgcgaaagtgggccagaggttctgcgacaccacctcgggtgagctgcgccaggcccgggatagggactgttgtgttcgaatgcccgccccggtcggccgccgctccccgcctagtccacggagctcaatggcggcagtcgcgctgagggactcggctcagggtatgacctttgaggatgtggccatttatttctcccaagaagagtgggagctccttgatgagtctcagaggttcctgtactgcgatgtgatgctggagaactttgcacatgtaacatccctgggttattgccatggaatggagaatgaggcgatagcttctgagcagagtgtatctatacaggtcaggacttctaagggcaatacacccacccagaaaactcacctcagtgagattaagatgtgtgtcccagtcttgaaagacattttgcctgcggctgagcaccaaaccacatcccctgtgcaaaagtcatacttgggtagcacaagcatgagaggcttctgcttcagtgctgaccttcaccagcatcaaaagcattacaatgaagaagagccctggaaaaggaaggtggatgaggctacatttgtgaccggctgcagattccatgtgttgaattatttcacctgtggggaggccttcccagcccccacggacctactccaacacgaagccactcccagtggtgaggagccacacagtagcagcagcaagcatatacaggcatttttcaatgcaaaaagttattacaagtggggtgaatacagaaaagcttcaagccacaaacacacacttgttcagcatcagagtgtctgttctgaaggagggctttatgagtgtagcaaatgtgagaaagccttcacttgcaagaacacacttgttcagcaccagcaaattcacactggacaaaagatgtttgagtgtagtgaatgtgaggaatcctttagcaaaaagtgccacctaatcttacacaagataattcacactggagaaaggccttatgaatgcagtgatcgtgagaaagcctttatccataaatctgaattcattcaccaccagagacgtcacactggaggagtgcgtcatgagtgtggtgaatgtaggaaaacctttagctacaaatctaacctcattgaacaccagagagttcacactggagaaaggccttatgaatgtggcgagtgcgggaaatcctttagacaaagctctagcctttttcgacaccagagagttcactctggagaaaggccttatcagtgctgtgagtgtgggaaatcctttagacaaatcttcaatctcattcgacatagaagagttcacactggagaaatgccttatcagtgcagtgattgtgggaaatcttttagctgcaaatcggaactcattcaacaccagagaattcacagtggagaaagaccttatgaatgcagagaatgtgggaaatcctttagacaattctctaacctcattcgacaccgcagcattcacactggtgataggccttatgagtgcagtgaatgtgagaaatcctttagccgcaaatttatcctgattcaacaccaaagagttcacactggagaaagaccttatgaatgcagtgaatgtggaaaatcctttacccgcaaatctgacctcattcaacaccggagaattcatactggcacaagaccttatgagtgcagtgaatgtggcaaatcttttagacagcgctctggcctcattcagcaccggagacttcatactggagaaaggccttatgaatgtagtgaatgtggaaagtcttttagccaaagtgctagcctcattcaacaccagagagttcacactggagaaaggccttatgaatgtagtgaatgtgggaaatcctttagccagagctctagcctcattcaacaccagagaggtcacactggagaaagaccttatgagtgcagtcaatgtgggaaaccctttacccacaaatcagaccttattcagcaccaaagagttcacactggagaaaggccttatgaatgcagtgaatgtgggaaatcctttagccgcaaatctaacctcattcgacatcggagagttcacactgaagaaaggccttaaatgtgaagggaatgtgctatttctttattcagtataatagcactggaggagactgtggtagccatcttcgtaaatttaaactttgagcacccacagtggggtattcttcataagtttcaggtatgtgggaagctctgaggaggttcattgtaatttctaatctgccgaggcctatagcctgatttatgtcactgccaatttctgaggctgaagccatttcacatttcacccctaccacctggcaggtgcacaccatgtgcatgagtcacttccccacagtgctcagagaagcaaacctctgtactctcccatttgcttggggaaattattaatagcccaagcatgtagggtcttcatgtcttttctctgactttagagtatacacctgacccagttgtggtccagagaatctgagttgtgctgtcagctttctaaggattacttttttaaggaacattgtcggtctcacatgatgcttgtaatgaatttttccacattctgattcaccagcctggaaactgcttggtgcacattgctttaatttataatgtttttataaaggttttaaaaaaatttacgcacctttaatcttgggtgttctattcattgcatagaatgacttgtaagcagaatagtgatgtcagcatgaaggggtgaatagattttgtggagatctcaaactttctgtactcagaagggacaatgtgatggcagaagacagctctttgttctgtattgctctaattggcctgctgcccaaggcctcaaagtaaagactgccaggctttgtgttcctgtattgtggcctggtgccatttttgtcaggtcagaggtcaccatgaaaaggaggcagttgtgacaatccccagtgcttctgtgaacgtgaattttgttcagttgtccacaggagatccacataattcctagcactggtgaggggaatctgttgcccaggtcctgcaaaggagccaggtgccatggcatataagtcagtgtagactggtgccatttgttgtcagactataggtgtggaggtgaaattacaggttcaacagtaattgggacagaaactccaggtaaatggggagtggagaagactgcagtaaattagatggaatgactcttctaaaagttcatctacaaattttccagtgaatatggttgtgtaggatcagtgcatacagaaattctcaggatcttctgtttactatcgctgagatcattatcagaaaatagtctggccgggcatggtgtaatcctaacactttgggaggccaaggcgggcggattgcctgagctcaggagttcaagaccagcctgggcaacatggtgaaatcccatgtctactaaaatacaaaaaattagccaggcgtggcagcatgcgcctatagtcccagccacttgggaggctgaggcaggagaatcgcttgaacccagaaggcggaagttgcagtgagctgagattgcaccactgcactccagcccaggcaacagagtgagactccgtctccaaaaaaaaaaaa

SEQ ID NO: 6050 - DNA, 1478 bp, Homo Sapiens
  NM_138349
agcggctgggcggcgggccgggcccggggccgcttggaatggcgcctcctccgccttcgccccaactgcttctcctggcagccctcgcgaggctcctgggtcccagcgaggtgatggctggaccggcggaggaggcgggagcccattgtcccgagagcctgtggcctctgcctccgcaggtgtcaccaagagtgacctacacacgagtgagcccagggcaggctgaggatgtcaccttcctctaccacccctgtgcccatccctggctgaagctccagcttgccctcctggcctatgcttgtatggctaacccttccctcacccctgacttcagcctcacgcaggatcggcccctggtgctgactgcatgggggctggcgctggagatggcctgggtagagccagcctgggctgcccactggctgatgaggaggcggaggaggaagcagaggaagaagaaggcatggatctactgtgaaagcctttcagggcctgctccctccgagccaactcccggtagagggaggctgtgccgaagagggtgtgtgcaggccctggctctggcctttgctctgcggagctggcggccccctggcacagaggtgacatctcaagggcccaggcagccctcttctagtggtgccaagaggcggaggctgcgggctgcccttggtccccagcccactcgctcagccctgaggtttccctctgcttccccagggagcttgaaggccaagcagtccatggcgggaatccctggtagggagagtaatgccccatctgtgcccactgtctccctgctgccgggggcgcctggaggcaatgccagctccaggacagaggctcaggtgcccaacgggcaaggcagcccagggggctgtgtctgttcaagtcaggcttccccggcccctcgcgcagcagcgcctccacgggcagcccggggccccaccccacgcactgaagaggccgcctgggctgccatggccctgaccttcctgctggtgctgctcaccctggccacgctctgcacacggctgcacagaaacttccgacgcggggagagcatctactgggggcccacagcggacagccaggacacagtggctgctgtgctgaagcggaggctgctgcagccctcgcgccgggtcaagcgctcgcgccggagacccctcctcccgcccacgccggacagcggcccggaaggcgagagctcggagtgacggcctgggacctgccactgtggcgtgcggctcctccccgcgccgcgaggccgcgacctctgccacgtggaccgcgcgcggggcgctccctggtggcgatggcgcggcactggccgagcactgcgggggctttcctccttgttggttgctgagtgggcggccaaggggagaaaaggagccgcttctgcctcccttgccaaaactccgtttctaattaaattatttttagtagaaaaaaaaaaaaaaaaaaaaaaaaaa

SEQ ID NO: 6051 - DNA, 2274 bp, Homo Sapiens
  NM_138353
gtgaaaatggcgcccagctcgaaatcggagcggaacagcggggctgggagcggcggcggcggccccgggggagccggagggaagcgggcagcagggcggcggcgggagcacgtcctcaagcagctggagcgggtcaagatcagcggacagctctcccctcgcctcttccggaagctgcctccccgggtgtgcgtgtccctcaagaacattgtggatgaggacttcctctatgcaggacatatcttcctgggcttttccaaatgcggccgctacgtcctctcctacaccagcagcagtggggatgacgacttctccttctacatctaccatctgtactggtgggagttcaacgttcacagcaagctcaagctggtccggcaggttcggctattccaggacgaggagatctacagcgacctgtacctgaccgtatgcgagtggcccagcgacgcctccaaggtcatcgtcttcggcttcaacacccgctcggccaacgggatgctcatgaacatgatgatgatgagtgacgagaaccaccgtgacatctacgtcagcaccgtggccgtgccaccgccaggccgctgtgctgcttgccaggatgccagccgagcccacccaggagacccgaatgcacagtgcctacggcatggcttcatgctgcacaccaagtaccaggtggtctaccccttccccaccttccagcccgccttccagctcaagaaggaccaggtggtgctgctcaacaccagctactccctggtggcctgcgccgtctccgtccactcggcaggtgacaggagtttctgccaaatcctgtatgaccacagcacctgccccctggcgcctgccagcccccctgagccccagagcccagagctgccccctgccctccccagcttctgccctgaggcggccccagcccgttcttctgggtctcctgagccctcgcccgccattgccaaagccaaggagtttgtggctgacatcttccgccgggccaaagaggccaagggcggggtccctgaggaagcccggcctgccctgtgcccaggaccctctggcagccgctgccgtgcgcactctgagcccctagccctgtgtggagagacggcaccccgggacagcccccctgcctcggaggcacctgcctccgagcctggctatgtcaactacaccaagctgtactatgtgctggagtccggagaggggacggagccggaggatgagttggaggacgacaagatctccctgcccttcgtggtgactgatcttcgtggccgcaacctgcggcccatgcgggagcggactgctgtccagggccagtacctgacagtggagcagctcacactagacttcgaatatgttatcaatgaggtcatccgccacgacgctacctggggccatcagttctgttctttcagcgactatgacatcgtcattctggaggtctgcccagaaaccaaccaggtcctcatcaacattggcctgctgctcctggccttcccgtcccccactgaggagggccagctccgaccaaagacctatcacaccagcctcaaggtggcatgggacctcaacacagggatcttcgagacagtcagtgtaggcgacctgactgaggtcaaagggcagaccagcggcagtgtctggagctcctaccgcaagagctgcgtggacatggtcatgaagtggctggtgccggagagcagcggccgctacgtcaacaggatgaccaatgaggcgctgcacaaagggtgctccctgaaggttctggcggacagcgagcgatatacgtggatcgtgctgtgagggccaggccgccccggacactgactccaactacctccgtggcctgggaccggcccccttcctggggtggcctcttcctggccggctggcccaccgactgatgaccggcactagtgttagcctgcggaacggggctgggcagggcagcctctgttggcctgagggtctggacgctttttatttatgcctatttaagttgggaaggggcagagagagggcgccccctgccccaccagcctgagtgccccgccttcaccccgagctgggcatgggcctggcccctcgtgcatttgcccttttctcggctacagctgtggacgttgccctcggggaggtcgaatggaccccattccccctgccctgcccgcccccagcctccccacccaggccggcaacctggccatccccattccgttcttcttcatgtaataaatgttttaatttctgaaaaaaaaaaaaaaaaaa

SEQ ID NO: 6052 - DNA, 2978 bp, Homo Sapiens
  NM_138357
ggcggcgtttccagttgagagatggcggccgccgcaggtagatcgctcctgctgctcctctcctctcggggcggcggcggcgggggcgccggcggctgcggggcgctgactgccggctgcttccctgggctgggcgtcagccgccaccggcagcagcagcaccaccggacggtacaccagaggatcgcttcctggcagaatttgggagctgtttattgcagcactgttgtgccctctgatgatgttacagtggtttatcaaaatgggttacctgtgatatctgtgaggctaccatcccggcgtgaacgctgtcagttcacactcaagcctatctctgactctgttggtgtatttttacgacaactgcaagaagaggatcggggaattgacagagttgctatctattcaccagatggtgttcgcgttgctgcttcaacaggaatagacctcctcctccttgatgactttaagctggtcattaatgacttaacataccacgtacgaccaccaaaaagagacctcttaagtcatgaaaatgcagcaacgctgaatgatgtaaagacattggtccagcaactatacaccacactgtgcattgagcagcaccagttaaacaaggaaagggagcttattgaaagactagaggatctcaaagagcagctggctcccctggaaaaggtacgaattgagattagcagaaaagctgagaagaggaccactttggtgctatggggtggccttgcctacatggccacacagtttggcattttggcccggcttacctggtgggaatattcctgggacatcatggagccagtaacatacttcatcacttatggaagtgccatggcaatgtatgcatattttgtaatgacacgccaggaatatgtttatccagaagccagagacagacaatacttactatttttccataaaggagccaaaaagtcacgttttgacctagagaaatacaatcaactcaaggatgcaattgctcaggcagaaatggaccttaagagactgagagacccattacaagtacatctgcctctccgacaaattggtgaaaaagattgatctgcaaaaagcctctgaatcctggcagaaggaacacctgtttgcctttttaattaaagcattgcaggtggaagctgggagccatgtggggggtagagcgtttttacctttaattataaaacaaaaacagaaaggatctgagggaagaagggaatgttaaaacctgaggatcaggcattgtggaatataagctcaaagggcttagtgaatattgtcttaaccaagtatctcagtttctggatgaaaatgatgcagttatatagttgagagattcataaagagaaaacaatgctgggggtgttcgtttcttgcatcttctttgcagagtcagcaaaagagtaacacaccagcaccccactcgactctatttgtttttaatttaactgtccctatttttgacataggagtaaataaatatactagaaaagcaaattctcatgatatgctaaaatatcattagcatttattttaaattggacccagtctctgcagagttaccaggaatctttccttccagcatccctttactgtccacctacctgtacctcttggttacactcattttttccatttgataattggaaccaacttataactgtttaataattgacactttagattatctcttaataccttcttaaatgtctatatatcccagtgctctggatcagtgtctaaaaatcactggcaacactgcatgaggttgttggttttgttttgttttattaattagtctttcacaggaggaataattgccctcctttatatacttatctattgataatcccctctccctccagaacacaaatcagagggaaagggggtgttcagctgtactaccaaatcaggaagatgtaaggtttacaaattggctaagaatcatggctctgtagccatttcaaccagaataattttattgctaatctgctttgtgtgacagcattccaggccagccagatgggactgccttgtctggaggctttgttcatctcgaaggacacacacttccacactgtttgtgagccctcccacctccacaacttcagttgtaaatcaagtgtgtggatctcaaagggtgcaatttatctttatataggaatacatttctagggcttccttcaagcccactctcttcaccctattttttcttatcttaaattgagagaaagagaattaatcttatactttgtcaaaacattttctaccatatttccagatgacatctgcgcttgaagagtcaaaggaatctgtgtctaatatcctgtttttaactgctgtaggggcaggatggaaaggatgatgggggctgccacaccactgattggccttttctttcacgtgattcatccttcctcattgtggcaaggagtttctttctctttttcttcctcctttgggatcattgtgtatgaaaagaaaaactttaaatgacaaacccagactccaggtgccttgcaaaggttgaaggccagccaggattgctgctgctgctgctactcctgccaacacccctttcattggcatgacggaatgaaaggatgcatgtctccacttcctgaccctccgcccacttccttctccctccaccacccccagtcgtcagctccttccctcatttatttttgttaagttgtgtgaattatttttaacccatttatcctgtttgtgcatagggtttttaagaagaaacagcacagtgcaacgagcaaatctttttggggtgtgtgggaagcaagggagggaggacatggagaaaagttctttaaacaaatagcaaactattgaacatgtgtaaaatcctgtatcatttatgaaatatgtataaaaagcaatgtaccttctggaacaataaatacttattcaatttttgaaaaaaaaaaaaaaaaaaaaaaaaaaaaaaa

SEQ ID NO: 6053 - DNA, 1414 bp, Homo Sapiens
  NM_138358
gaagagactcccgggctcttaacgtcgggtatcaggagtttcttcccggagcaaggacccccaagacggaagaggatggccgcggcggctctgaggagattttggtcccggcgccgcgcagaggcgggcgacgcggtagtggcgaagccgggagtgtgggcgcggctggggtcctgggcccgcgcgctgctccgggactacgccgaggcctgcagggacgcttcggcggaggctagggcccggccggggcgcgccgctgtgtatgtgggtctgctgggcggcgcggcggcctgcttcacgctggcgcccagcgagggtgccttcgaggaggcgctgctggaggcgtcggggaccctcctgctgctggcgccggccacccgcaaccgcgagtccgaagccttcgtgcagaggctgctctggctgcggggccgtggccgcctgcgctacgtcaacctggggctctgctcgctggtgtacgaggcgcccttcgacgcccaggccagcctctaccaggcgcgttgccgctacctgcagccccgctggaccgacttccccggccgggtcctggacgtgggcttcgtgggtcgctggtgggtgctgggggcctggatgcgcgactgcgacatcaacgacgacgaattcctgcacctgccggcgcatttgcgggtggtcgggccccagcagctgcattccgagaccaacgagcggctcttcgatgagaagtacaagcctgtcgtgctcaccgacgatcaggtggaccaggcgctgtgggaggagcaggtcttgcagaaggagaagaaggacaggctcgccctgagccaggcccactcgctggtgcaggcggaggccccgagatgaaaccctgaggcccccgagtcctggcaaactgcttgcctggggtggtgcagttctgagtgtgcctcacctgcagaacagctgagacagatgatgtgcaaagtgttttctcactggatttgcacaagtttggggagcctttctgccccccgtctttgttctttattagctgaagctaattcagagccacctgggtccgggagttggggacagcagaacgacttgacacatgttcatcactggcagagctggtcatgagccttttatataagcctttttcatcgggcctcagaggccctccttaaggaggtaccacattggtcagctgacttgcaaactcttctaaggccacttagattttctttttcaagtttgggttgtggcctggcatggtgatgtctgtaatcccagcagtttgcaaactgaggcaagagaatcgcttgaggccaggagtttgaggccagctagagtgacatagcaagactccgatgctacaaaaaagaataataatagtaattaactaaataaaatttgagctgaaaaaaaaaaaaaaaaaaaa

SEQ ID NO: 6054 - DNA, 2705 bp, Homo Sapiens
  NM_138363
caggacaccgtcgccttcccggccgcgtcggagtccggcggcgacctgcctctgaaacatggcaggctcggatgctgagtgggtaaccattgccaataaccttctttttaagtgtcatatacatctgagaatacatgaacttcaagactgtgatgctaatgtttttattgctctttatcagtctattttgggagaaaaggtaccagacctcatagttattcctaggagtcaagaagatgatgcacacaatgtacaagcagtaattgattcactggccttggactacttgcaggtcagcttgtctcacataacaggagaaaatatagtgaaaggagataaagaatctattaagaatctcctggaaatatttgatggtttgttggagtatcttacagaacgcatcagtgaaacatctcatgagaaaagtgaaactgaacagtattttaaagaatctgatcgaggagaacgtttggaagagccagaaagtactaaagaatctaaatcatcatggaaaagagtttcttttgggaggtgctccttgtcttctgagatgttgggcccctcttgggatggagatgaagcagaatccactggtgaaatcattagacttggagacacagcacacaccttttctctaagaagtaatggtgctcaatgtcctaatgaaatgctgtctaaaaaagccttagcctcaccaagttctaaatcacatgaagatatgttgtaccctcctagtgttttgtccaagagtaggacatcctttgttgaagacacggaaaccctttctgtgagtgggattccaaatgctaggaagctaggggagcctatccgagcagctattcctttacatccaccctaccacccttcagagcctcgagcaccctgccccataggaaaagaatacttgcattcaagtcactgctccccagccgtaaattctactggagagcatacggaattttctggggatctagatgatggacttttcttaatttccaagttgcctaaaggcagcaaatgggaagtatatccagctcaggtccaagggcctaggacaaggaagcctcccaaaggaaaaagaaatgaaaacagagctacagcctcatcctgcaattcacctttcccccagaggccaagaaagagattaacagaacaagaattacatgatgtatcagaaaaactctctcagcggctttctgaactagattggatgttaaaaagtgctctgggtgatcggattaaagaaaagactgaccataaagaagaaaatactggaaatgaggaggtagaggatggaactgaggagacactgtctcagcacagtgatggcatcgtggagtatgggccaaagaagtcaaggccaggactttccatgcgtagaaagccaccctacagatcccattcgctctctccatctccagttaacaaacacaaacagttccacttggagagaaaaaggcagcgcaagccaagagaaacagatgtccgccaattccaagcacaggcgtttactgaagcatttgaaagggaactaagaagacataaagttcaagagaatattggacctctaagaatacatgagaaggaggaggaaacagaaaaaatatacagaggagaagctgttcgtaaaggaactccagaatgtagtcagccctggaagatttactctagaaaaaccacaacgcagagtctaagaggtggcctcccaaagccaaataaagcagttccaatgaaagtaagtgaacacagtctcctgccccttatgctggagcagtttccgtttctttatgtttctggcccaacactaagcaaaatgtggaaacagcaaattgcacaggttgaacagcttaagaaagaagcatgtagagaaaatcgatcaaagaagaaactccaagatgaaatagaagaagccctaagaaggcatgacctccttactacccttgtcaagaaagaatatgaacataacaagagactgcaagacttcaaggactgcattcgtaggcaaaggttgacccaatcaaagataaaagaaaatcgacagcaaatcgttcgtgctcgaaaatattatgatgattatagagttcagttgtgtgcaaaaatgatgagaatgaggacccgggaagaaatgatatttaagaaactgtttgaagaaggtttaaacattcaaaagcaaagattacgagacctaagaaactatgccaaagaaaagcgagatgaacaaaggagacgccaccaggatgaactggactccatggagaactactataaggaccagttttcattgctggcagaagccatatcacaggaacatcaagaacttaaagccagagagaaatctcaggcccagacattacataaggtgaagagggagctgagatctaagatggagaaggaaattcagcagctgcaggacatgataacacagaatgatgatgatgttttcttccgggaactggaagctgagcgcttcagatctcggcttcagctggcttcctttcagtacagtaaaagtccctccctatgaggccagacttgataatagtaggtgaaggttctggaggcctttaccaggacagagctagaatcgagccagtaaacagtctaagccagaaaaataattttcaaatgctttacctgtattttcattccagtactttttatgattttttaaataaaaattgttttctaaaaaaaaaaaaaaaaaa

SEQ ID NO: 6055 - DNA, 2842 bp, Homo Sapiens
  NM_138364
ggcgagttcacccgcggcggagggtaactttgctgtgctgttttttgagcagttgtctggtccctggaagtgtagcatcgagagagttttctaattacgtttacaaaatatcttccctttggccatacaagtggtgactgccatgtcgaactcgcggcccaggtcccgccgagacgccgggggtggcgctggggcagccggccgggacgagctggtgtcgcggtccttgcagagcgcagagcactgtctgggcgtccaggacttcggcactgcctatgcccactacctcctcgtgctcagcctggcgccggagctgaaacacgacgtgaaggaaacttttcagtacacacttttcagatgggctgaagagcttgatgctctcagtcggatacaagacttacttggttgctatgagcaggccttggaactgtttcctgatgatgaagtgatttgcaatagtatgggggagcatctcttcagaatgggctttagggatgaagcagctgggtattttcataaagcagtgaagctaaaccctgatttcagtgatgcaaaggagaatttttatcgtgttgcaaactggttggtggaacgctggcactttatcatgcttaatgacaccaagaggaatacaatttataatgcagcaatccaaaaggcagtttgtttggggtccaaaagtgttttggacattggagcaggaactggaatactaagcatgtttgctaaaaaagctggagcacattccgtgtatgcctgtgagttatccaagaccatgtatgaacttgcctgtgatgtcgtggcagcaaacaagatggaagcagggatcaaactcttacatacgaagtcacttgacatagagattccaaaacatattcccgaaagagtgtccctagttgtaacagaaactgtcgatgcaggtttatttggagaaggaattgtggagagtttgattcatgcatgggagcatttacttttacagccaaagaccaaaggtgaaagtgctaattgtgaaaagtatgggaaagttataccagcaagtgctgttatatttgggatggcagtagaatgtgcagagataagaagacatcatagagtgggtattaaggacattgctggtatccatttgccaacaaatgtgaaatttcagagtccggcttattcttctgtagatactgaagaaacaattgaaccttatacaactgaaaagatgagtcgagttcctggaggatatttggctttgacagagtgctttgaaattatgacagtagatttcaacaaccttcaggaattaaaaagtcttgcaactaaaaagcctgataagattggtattcctgttattaaagaaggcatactagatgctattatggtttggtttgtgctccagcttgatgatgaacatagtttatccacaagtcctagtgaggaaacatgttgggaacaggctgtctaccccgtacaggaccttgcagactactggataaagcctggagaccatgtgatgatggaagtatcttgtcaagactgttacttaagaatccagagtattagtgtcttgggtttggaatgtgaaatggatgttgcaaaaagttttacccagaataaagacttgttatcgttaggaaatgaggctgaactttgtagtgccctcgctaaccttcagaccagtaaaccagatgctgtagagcagacatgtatattggaatctacagaaattgctttgcttaacaacatcccatatcatgaaggctttaaaatggcaatgagcaaagttttgtcttcactgactccagagaaactgtatcagaccatggatactcactgtcagaatgagatgagctctggaactggacagagtaatactgtacagaacatccttgaacctttctacgtgttagatgtgtccgaaggcttctctgttctgcctgttattgctggcacacttgggcaggttaaaccatacagttctgtggagaaagaccagcatcgtattgctctggacctcatatctgaagccaatcactttcctaaagaaacacttgagttttggctgagacatgtggaggatgaatctgctatgttacaaaggccaaaatcagacaagttatggagcataattatattggatgtcattgagccatctgggctcattcagcaggaaataatggaaaaagctgcaatatccaggtgtttactacaatctggaggcaagatctttcctcagtatgtgctgatgtttgggttgcttgtggaatcacagacactcctagaggagaatgctgttcaaggaacagaacgtactcttggattaaatatagcaccttttattaaccagtttcaggtacctatacgtgtatttttggacctatcctcattgccctgtatacctttaagcaagccagtggaactcttaagactagatttaatgactccgtatttgaacacctctaacagagaagtaaaggtatacgtttgtaaatctggaagactgactgctattccattttggtatcatatgtaccttgatgaagagattaggttggatacttcaagtgaagcctcccactggaaacaagctgcagttgttttagataatcccatccaggttgaaatgggagaggaacttgtactcagcattcagcatcacaaaagcaatgtcagcatcacagtaaagcaatgaagagcagttttccaatgaaaactgtgtaaatagagcatcaacaagtacaaaattcttgtcttaattagtgggggtatataaaaattccttgtaatggtcaaatattttttaaaattgacattaataaagcatattttaaaagattctaaaaaaaaaaaaaaa

SEQ ID NO: 6056 - DNA, 4450 bp, Homo Sapiens
  NM_138368
cccatccaggtttccctgctggccctgagcatggagtaccctgcgcagctgtggcccgacgcctctgcggccgaagtggccgccacctccctgttggacaccttggtcctcctacccccgcggccctcagctctccgtcggccactgctgctggcggccaccactgccctggcggcgggcggcgcgctgggccccacctcgggcgcctcctgccggctcctgcccctactgctcggcctggccgcgggtagcgatctggggcgaggctttgtccccgcctcggaacagcgccccttgcaggccacggcctgcgagtgcctgcgagagctagagagctgcaagcccgggctgctggggggctccctggggttgctgcggggcctgctggggcaggaaggccctgtccagccactcagcctgttgctggccctcgctttgcgcaacaccttggtgctccagtcccgggttggggctggcctggggggactgctcacggataaggtctccccaactgggggtggtccctgggattggacactagtggaggagggcgatggacgccttcagccccaggcacccagctggccggcagctgaggagggagagggggagcgtagccttacagcacgagagcacagccctgaggaggcgcgggagctgcgggctgcggtgatccagcttctggacacctcctatctgctcactcctgtggcccaggcccagctcctgtggctgctgggctgggccctgcggggtctgcagggacagccaccggcactcttcaagccgcagctggtacggctgctaggcacagcacagctgacactgttgcacgccatgcttgcgctcaaggcggcctttggtgaggccttgttcacagcccaggatgaagcgttgctgctccgccggctcaccttggctgcccagcaccctgctctgcctccgcccacccatctcttttaccttcactgcgtcctgagcttccctgagaactggccgctgggccctgaaggtgaggaggctgccccactgctgctagggccccagctatgccgtggtctcctgcccagtctcctgcatgacccaatggccctcctggcccgcctgcatttactgtgcctgctctgtgccgaggaggaagaagaggagaaaggccagcttccaagcccacggcactacctggaagagctgctggctggcttgcggcagcgggcagccctggatgggggcccccgggccttggccactctctgcttccaggcctcgtatctggtggcctgctgcctggctgggcaacctacggtgctgacccccttgatccacggactggcccagctgtaccaagcccggcccatgctggctccccactttgtggacctcttggatcaggtggactctgagctgagggagcccctgaaggtggtgttgcggcaggtggtggtgtccaggccgggcagggatgaagctctttgctggcacctgcaaatgctggcaaaggtggcagatggagatgcccagagtgctaccctcaactttctacaggccgcggctgcccactgcacgaactgggacctacagcagggcctgctgcgggtctgccgggcgctgctgcgggcaggggtgaggggcggcctggtcgacttgctgcaggtgctggccaggcagctggaggaccctgatgggcgtgaccacgcccgcctctactacatcctgctggcacacctggcagcacccaagttgggggtggccctgggcccctcgcttgccgcacctgcactggcctcttcactggtggccgagaaccagggctttgtggcagcactgatggtgcaggaggcaccggccctggtacggctgagcctggggtcccatcgggtcaagggcccactcccagtgttgaagctccagccggaggcgctggagcccatctactctctggagctgcgcttccgtgtggaaggacagctgtatgcacccctggaggctgtccatgtgccctgcctgtgtcctggccgccctgcccgccctctgctcctgcctctgcagccccgatgcccggcccccgcacggctggatgtccatgccctttacaccacatccactggtctcacgtgccatgcccacttgccacccctgttcgtgaactttgccgacctctttctgcctttcccgcagcctccagagggggccgggctgggcttctttgaggagctctgggattcctgcctgccagagggtgctgagagtcgtgtgtggtgtccacttgggccacagggcctggagggcttggtgtcccgccacctggagccttttgtggtggtggcccagcctcctaccagctactgtgtagcaatccacctgcccccggactcaaagctgctgctgcggctggaggcggccctggcagatggagtgcctgtggccctgcggaccgatgactgggccgtgctgcccctggcgggggactacctccgtgggctggcggctgctgtctgagccccgggagaccaggtgggggcaggactgtggcccttgtgggggccaaggcacactcctgtagctctgtcgccaaaaccctgcattccgcagtgccctcgctggcttgttttcttttgggccccggttgggagcaggctcctgggggtgagggtctgtctgagtctgtttttgctgctctagcaagatccctgagacggggtaagttataataaacagaaatgtattggctcagagctctggaggctgggaagtccatagtggagggcccagagcccagtgaggacccttctgcatcttcccatgacagaggacagagtgacaggagtgaggggagagagcgaacccactcccaagataacggcctgagtccacgcaggagggcagagccctcgtggcctgaccacctcttagggtctaatcttatactgttacagtggcaatcgcatttcaacgtgagcgtgggaggggacaaacattcaaaccatagcagggtcataggccccaagaaggcttccagacagaacccggcactgtagagctacagagttccttctcacccagacacactagtgctctccagaatctctgcccaggaggcaggggaaaaatctcctttctgcttcccagagagggtctggccttgcccaaggccactcagtgatttaggaagaaggctgaagctagagtgtggacctgacctgttggacagtacttttctttctttttttttcggggaggggttaaagacaggatctcactctggcgctctggagtgcagtggtgtgattagggatcattgcagactctgcctctcaggctcaggtgatcctcccatctcagcctgcctccgagtagctgggactacaggtgtgagtcaccactgtattttttgcagacaggatctccctgtttcctaggctggtctcgaactcctgggcttaaatgactcttctgcctcagcctcaccaaagtgttgggattactggtgtgagcccccacacctggccgagccagcgcttctcaactcccaaggtttgcaagctccctgccccagggagctcacgccaggcaggccagtgggcctaagccagaaacagaaagacagcagtggccaggtggagagcttcccaagctgtgccgattagagccagctctaggaagggcctgctaataaggtctagggtctgagaccaagttttttctaatctcagcccctaagaaacctaatttgtgcttaggaatcttcccaggtaagaagaactagttcctctagttgttgtttttttttcccaaacatgcaaacactgaggattgagctgtgtggggtcagctgtgctgccaggcacatgtacgttgcctcatttcatccttgcaacagctctgcagggccccgcagatgaggaaatccgtaggcaggagcggttgagtgattttcctaaggtcacccagctgtttggtaatagtgttttgtcatctggtagcaggtttccattaccatgccatcagagcagacctcagccagggccacagaggtcccaaccgtctctgccctcttctgctgcccctgcctcatgggctcccagccacaggttccccatgggccagctttacgcctcctgatccttccgattggggcagactaggagaggaaagacgggcctgggctgggtgcggtggctcatgcctgtaatcccagcactttgagaggctgcggcgggtggatcacctgaggccaggtgtttgagatcagcctggccagcatggcgaaaccctgtgtctaataaaaatacaaaaattagccgggcgtggtggcgggcgcctgtaatcccagctacttgggaggctgaggcaggagaattacttgaacctgggaggcagaagttgcagtgagccgagatcacgccactgcactccagcctgggcgacagagcaaggctctgtctcaaaaaaa

SEQ ID NO: 6057 - DNA, 1934 bp, Homo Sapiens
  NM_138369
aatcgagcaggccgtttctgccgcgtccaccacaacctctgctgtatcagagggggccttcgccgccgccgcccccaccaccgcccctgccgccatcgccacctccgccgctgccgccttggggccctcctccttcaccgcccccttcaccacctctacacgttctaggccttctgtcctggagaagaagctatagtcgttctcccttgtgggcccggggcgcagccatggcggacggcggcggcggcgggggaactggcgcggtgggcggcggcggaactagccaggcctctgccggggcagcgactggcgctactggggccagcgggggcggtggccccatcaacccggcctcgctgcctcccggcgacccgcagctcatcgctctcatcgtggagcagctcaagagccggggcctttttgacagcttccgccgggactgcctggccgacgtggacaccaagccagcttaccaaaacctgaggcagaaagtggataattttgtgtcaacacatctggacaagcaggaatggaatcctacgatgaacaaaaaccagttgcgaaatggtctgaggcagagtgtggttcagtcagggatgttggaagctggagtagacaggattatttctcaggtggtggatccaaaacttaaccacatcttcaggccacaaatagaacgagcaattcatgagttcctggcggcccagaaaaaagcagctgtgccagcaccccctccagagcccgaaggccaggaccctccagctccatctcaggacacttcctaagaatacgccagacaccttttgaaagctaatttttggtgaagaaatggattcggttacataagagtgcaacttcagactgaagataggccaaggtcgtcactgatctcaagatttcaaccttgaccatgggcagtgaccagattgaaaggggagcaagttcggcagtgggagagttgaccgtgtcaccccctgcattgtgctgccatttggccagcctgtccaagggcatgacaccaagtagacactacagagagagaaacactacagcaacccagggttgtcctgaaacagacttttatacttgaacatggagactgcacatggactttagggtttgtgctgtgggataaacggaagctacagtgagaacatagccagtcccaaagacaatttcaaagaaaaatgacagtaaagattagctgggagtagtctttgacagtgcttatttgatactgtctctcagagtttgcaaaccagattgtacaagtcattagcgtcagatagctttaaagttgtgaccttcttgtacatgaatcttctagccagtttcctttcctttgtaacgaaacatgaaatcctagaatgtatgagaagttcagacattaggcataaggaaactcgtttgcaggctctctgtccagggctgcttcctgtcctggaggggccagtgagtcttaggtatgtttattttattctcacatttgtgtttttttagaaaagtgaatggtcaataaatggcttatctttcataataaaattatttgatacttttactccgaagcttcagctgaagcttaaacctcaggtctgtgaagggcaacctttgtcttctgcctctgtgcaccacacatgatctactggcagtgaagattggtacatataacttggaactatgaaactagtaggtgtagctagtagtgggctgtttctctcctccctgagccattactgacactggtctttagttgaggtagtccgtggtatgtgtcagtgtttgtcatccttgtgtgtgcagaagtagcacctggggatttaagggaaaatgcatatttctgattaagaagttctggggtgggacctaagagtgagtgtttctgacaagctgccaggtgatgctgatgctgccaggcctctgaacatactctgtat

SEQ ID NO: 6058 - DNA, 2091 bp, Homo Sapiens
  NM_138371
attgtttaatcaaaggaagagtcaaaataagctacacccagattactgagaaaggtgaaatgaaaacaagctcaaaaccaaattccaggaagatgctgtctttgtattgacttaccatttcatgttttcacacatgtcaaagtcttgaagcttcggtcattagtcttccgcttcctaaagcaagaaactaaatgctgacttgtgtcgtttgccccagatgccaccggaaatgtcatcttctccccagacgctggcttgcaagcacagcagcacccagaggctaacctatttcccctatagcccaagctctgagatctcccgtctggtcacaatgatctacaggagaggaagaaagctatctagggacgagatctagaatcaactgagagagatgcttaaaaatcaccagttactttaatgaccatccgcagagccatcctgtgcaaaggaaggagctaggctgtgcgccctgggcgtcatgatccttctgcgggcctccgaagtgcggcagctgcttcacaataagttcgtggtcatcctgggggactctgtgcatagggcagtatacaaggacctggtgcttctgctgcagaaggaccgcctgctcactcccgggcagcttagagcaaggggggagctgaacttcgaacaagatgagctggtggacggaggccagcggggccacatgcacaacggccttaactaccgtgaggtccgcgagttccgctccgaccaccatctggtacgtttttacttcctcacccgcgtgtactccgattacctccagaccatcttgaaagagctgcagtcgggcgagcacgcccccgacctggtcatcatgaattcctgcctctgggacatctccaggtatggtccgaactcctggagaagctacctggagaacctggagaacctgttccagtgcctgggccaggtgctgcccgagtcttgcctcctggtgtggaacacggccatgcctgtgggcgaggaagtcaccgggggttttcttccgcccaagctccggcggcagaaggccaccttcctgaaaaacgaagtggtcaaagccaacttccacagcgccaccgaggcacgtaaacataacttcgatgtactggacttgcatttccacttccgccacgcgagggagaacctgcactgggacggggtgcactggaatggacgtgtgcaccgctgcctctcccagctgctgctggcccacgtggccgacgcctggggtgtggagctgccccaccgccaccccgtgggcgagtggatcaagaagaaaaaacctggcccgagagtcgaagggccgccccaggccaacagaaatcacccggccttacctctgtccccacccttaccttcccccacataccgccccctgcttgggttcccaccccagcgcttgccgctgctcccgctcctgtccccacagcctcctcctcccattctccatcaccagggaatgccccggttcccacagggtcccccagatgcctgtttttcctcagaccatactttccagtcggatcaattctattgccattcagatgtcccctcatcagcccatgcaggtttcttcgtcgaagacaattttatggttggtcctcagctgcctatgcccttcttccccacaccccgttatcagcggcctgccccagtggtacataggggttttggcaggtatcgtccccgtggcccctatacgccctggggacagcggcctcgaccttcaaagagaagggccccagccaatcctgagccaaggcctcaatagacggacctaggccttatttcctctttatgaacatggattggacagatctgacacttcctttccattgcttggcctgaacagactgaccttgttaacttaagcctggagtccatgcctcgtcttccttttgttcattgctgttaccaagaaagccaaggaagagcagcctgactcattcttcttggctgcagcctcttccccacttcctgggagtgacccagcgttattcctgcctcctcactcctattctctttgcctttgtgtaaaaataaaatggaaataaacaagttgcacagaaaaaaaaaaaaaaaaaa

SEQ ID NO: 6059 - DNA, 1881 bp, Homo Sapiens
  NM_138376
ggtgagagagggcgtgcgtctctgtggttataaagttgggggtggagtggccgggagatgatggctgatgaagaggaagaagtcaagccgatcttgcagaaattgcaggaactcgtggatcagctctactcatttcgagactgctatttcgagacacatagtgttgaggatgctgggaggaagcaacaggatgtgcagaaggagatggagaaaaccctacagcagatggaagaagtagtgggttctgtccagggcaaggcacaagttctaatgctaactgggaaagcactaaatgtgactcctgactatagccctaaggctgaggagcttctgtcaaaggctgtgaagctggagcccgagctggtggaagcctggaaccagctgggtgaggtgtactggaaaaaaggggatgttgcagctgcccacacctgcttctcaggagccctcacccattgcaggaacaaagtctccttgcaaaacctgtcaatggtgcttcgtcagctgcggactgacactgaagatgaacattctcaccatgtcatggacagtgtccgacaggctaagttggctgttcagatggatgtccatgatggccgctcctggtatattcttgggaattcatatctttccctttacttctctactggccagaaccctaagatctcccagcaagccctcagtgcctatgcccaagcagagaaagttgacagaaaagcttctagcaatcctgaccttcatctgaacagggcgacgttgcataaatatgaagagagttatggggaggccctggagggcttctctcgggctgcagccctggaccctgcctggccagagccccggcaacgagagcaacaacttctggaattcctggatagattaaccagcctccttgagagtaagggaaaggtgaagaccaaaaagctgcagagcatgctgggaagcttgcgcccagcccatctaggcccttgcagtgatgggcactatcagtcagcctctgggcagaaagtgaccctggagctcaagccactgagtacgcttcagcctggggtgaacagcggtgccgtcatcctgggaaaggtggtatttagcctcaccacagaggagaaagtcccctttacatttggcctggtagattcagatggaccttgctatgcagtgatggtgtacaatatagtgcagagctggggagtgctcattggagactctgtagccattcctgagcccaacctgcggcttcaccgaattcagcacaaaggaaaggactattccttttccagtgttcgagtggagacgcccctcctgctagtggtgaatgggaagcctcagggatccagcagccaggctgttgccacagtggcatcgcgaccacagtgtgaatgacctttgacttgcatgctcaacagggagtggaggagaggagacaaggctctggacagccggtccagccacatccagtgattcagcagggatgggaggaatgttttaaatgaagactttctctttccctgcctgtattacacttcgtatctcttctctctcctctgtcctcatcatgttccagctctctacagggccacatactcttctggcatatctctcctgtctcttccactgctctctatgttttaagcaaagagcatggaattggtagaagtcttgggatcttgccatgggacagagtccccaaggttcctgttgttgcctccttcctaagcctcatatgtatatatcagttcagtatttattgctaaaggagggggcttaattttgtaatggcttttatttttagcaatttttatttttatttttgaactttaggtccttcctcttctttggggctggaacagaattaaatttgtttggaaaaaaaaaaaaaaaaaa

SEQ ID NO: 6060 - DNA, 3992 bp, Homo Sapiens
  NM_138381
caatagaatgtggggctcgcccgcgctgctacgtcacgtctgggaccgcggagtattccaggcgcctgcaactaaacgtggccgggtctgcaagctaggtgccagcggggaaagtttccctgcttcttatcgtctgctttaacgccttaaatagcccgctgaaggctgcagcaggtgctaggtagcagcctcccggccctcgggaaaggcggggtggggaggcgagagcagcttagcctcctcgacctcccttcctggtgacggacgaacagttcccgtagaatttcgcttcaccgagtgaccttgagcccagggcgacggtcagcttgttaattcctggctgcaggaactttgtgagaattttaatgcatggaaaagctgtccatgttccaactgctgtacatccaaaagtctcagtgtaatagcaggaccaaaatattctgtcaatcagctgaccatatacttaatgactcctaaaatctcgtggacttctaagaaagcgccatggcctgtgctgctgttatgattcctgggttgttgcggtgctctgttggagccatccgtattgaggctgcgtcactgagattgacactcagcactttgcgccaccttactctaaccagcataatgaaatccaaaaggaaaactgatcacatggagagaactgcaagtgtccttcgacgggagattgtgtcagcagctaaggtgtgtggagctgccagtgagtcaccgtcagtgaagagcctccgcttgcttgttgctgatcaagacttttcctttaaagctggccagtgggttgatttctttattccaggagtctctgtggttggtgggttttcaatatgctccagtcccagactgctagaacaagagagagtgatagaattggcagtgaaatatacgaaccaccctcctgccctctgggttcacaatacgtgtacacttgactgtgaagtggctgtgagagtgggtggagagttcttctttgaccctcagcctgcggatgcctctagaaacctcgtgttgattgcaggaggagtcggaattaaccctctgctttccatcctgcggcacgcagcagatctcctcagagagcaggcaaacaaaagaaatggatatgagataggaacaataaaactattctacagtgcaaaaaataccagcgaactcctgtttaagaaaaatatccttgatttagtaaatgaatttcctgagaagattgcatgcagtttgcatgttacaaaacagactacacaaatcaatgcggaactcaagccatacatcacggaaggaagaataacggagaaggagataagagatcatatttcaaaagagactttgttctatatttgtggcccacctccaatgacagactttttctccaagcaactggaaaacaaccatgtacccaaagaacacatttgctttgagaagtggtggtaggaggcagacaaaggcagaaaaaataaagaggtgagatctactcaggagagctcctgtcctttgtggcatgattaattttttttatctctacttgagttgtcttattttttaaggctataaacttagtgaccagctggataataaaagccagctggcagacttaaatgataaactttttgcaaagacctcagtgatcaaactattttttactatactgattttctgttattaacaacgatttaattgtctcatgatgtaccatgattggtcagtatagatttttcttttgtctttaggcaaaaaaaagatatatacttatgtctaatcataggaaaatgtgatttttgagtataaaatgtgggctagctttaaattatttgacagccatctatatatcttatgtttaatgaaagtataatttaaatacaatcttaataattttactttgaaaattctttttatttaatgcctttgtttactgtaccatggcctacagtcttatttggtccatcaaagttaagtttggacatggaaaattgttaggaaaactgctttagggagttaaatatccagcatatttgctttcttgttaatgaatatcctaagtgtgtatcctgactaattgttagtttcttctcaaatgaaaccctttctgtgtcttggctgtctgccttaacgctgtaggaggcagcttcttgcttgggacaaaggcattggtgatgtgttccatgttgaatctgccttcagtgcctgggctggcttgctatggaaatgtgcttagcattgattagggggtagagagctgtttctaaatcctgcttttctactttttatttcactcatttgccagaattgttcttggcaccagcagctccttaacatatagttgttgaatgactgaaagaaagcaactaatgttttaactccttgctaagtctgagattgggaggcagtcccctagagtggatagaaagaatggtggagcctcatcccaaagctgctctgatgaaactgctagaaagcagattgtagttctttgtttagatttttaaaaatccaaaagaagtcctgactgaggccaggccattccttttatgacaagtagtcctgggcccaaggttgcctgcatagagatcacaggagggtgaagggagcctgggaagaaggacagataagtgctggagacctaggagctccagttgagattctgttctggagcggatgagagaagacaggttaccctttcttatctttgttgttgcaggcctcccagggacttgtgggcttgaacagatatgattcatgggacctgaaggtgactctagcttctgcccagttttgagttttgtcaagttttaagcagagatcatttgtcaactattttgatcccagatttgaatttggggaggaagggaggagctactgacctgatgggaatatcataatccattcaaggaaatggtcattagtacctcagaggtgaagggaatatgtgaagctctggatcactacaaggagccctgacttaccagttggccccaaagtgcccaggctgagggcataggagcatgatgagatgcaaggatgtgggattatcaaggggcacgtctactaactggtgaaggcagtctgcgggggaggacacctaaaggtatgcggaaagtacctaacccagacctctctgcattaggagtggaggtgcaaagtgagcatctccagtgcagcatgggatgggaagatagggaggtgtcgcccactgtctcggtttagccagcaccacggctggctgtgtgcctgctactgtcagagagcaagggtcatctgtcctgcccagctatgcctgccaccctgttgctgactcagtattggcagaattgctgagatgggccaggtcatcacctttgcctggagtgttcatcctttcagtgccattattctggtgctaagtgctgaagaacattttcaggtctagccgagaatgtcctcttgctcttgcctgccaggcctgtccagatctttttggtacttaaattgagctaactccagccagagtggcttggaattcatagtgcggtggctcagagtataggctcgaaagcccttgagccagattgcctgggttcagatctcacctatactacttactaggtagatgaccttgagcaagtcacttaactgctctatgcctcatttaaaattacatacaactacatgtaaaagggagatgatactgctgcctacctacctacatgatagggctgttacggggattgaaggtgatcatacatgtaaagtgcttggcagagcactgcatgagtgtgttgtcgttattaatttgctattccttgtcctattcagaaaggatttcaagaggctggatgccttagatgtggtctaacttgaaaccttcatgtgggtgtgcgtctgtcttgtttattgctgtgccaggcacaaaataggtatttcataaatatttgttaatatgctcagagttgataagctggattaaagtgacttcttaaggaaaaaaaaaaaaaaaaaaaaaaaaa

SEQ ID NO: 6061 - DNA, 1614 bp, Homo Sapiens
  NM_138384
ggaagcccgcagtgccggaggcccgcagcgccggaacctcagaggcgggtcgcagcggcgcagaggaggtcagctgcgggagcgtttccggggacggtgccgccatgagattgaccccgcgcgcgctgtgcagcgccgcccaggccgcctggcgggagaacttccccctgtgcggtcgcgacgtggcgcgctggttcccgggccacatggccaaggggctgaagaagatgcagagcagcctgaagctggtggactgtatcatcgaggtccacgatgcccggatcccactttcaggccgcaaccctctgtttcaggaaacccttgggcttaagcctcacttgctggtcctcaacaagatggacttggcggatcttacagagcagcagaaaattatgcaacacttagaaggagaaggcctaaaaaatgtcatttttaccaactgtgtaaaggatgaaaatgtcaagcagatcatcccgatggtcactgaactgattgggagaagccaccgctaccaccgaaaagagaacctggagtactgtatcatggtcattggggtccccaacgtgggcaagtcctccctcatcaactccctccggaggcagcacctcaggaaagggaaagccaccagggtgggtggcgagcctgggatcaccagagctgtgatgtccaaaattcaggtctctgagcggcccctgatgttcctgttggacactcctggcgtgctggctcctcggattgaaagtgtggagacaggcctgaagctggccctgtgtggaacggtgctggaccacctggtcggggaggagaccatggctgactacctgctgtacaccctcaacaaacaccagcgctttgggtacgtgcagcactacggcctgggcagtgcctgtgacaacgtagagcgcgtgctgaagagtgtggctgtgaagctggggaagacgcagaaggtgaaggtgctcacgggcacgggtaacgtgaacattattcagcctaactatcctgcggcagcccgtgacttcctgcagactttccgccgtgggctgctgggttccgtgatgctggacctcgacgtcctgcggggccaccccccggctgagactttgccctgaacttgtccgggtagggagggccggaggcatgtggcctcccagacctcctgacctgggtggttgaggctcaagacagctcacccggtccagaagctccatgctggtcactagggtgctgtgctctctggcgccccacagcctggccagctccagggaccccagttgcagggcccaagcaggtgggagtggacaccaggcttcccagtggacgtccctgagcagctccgcatgcttggttctcccggagcttcctgctcaggcctcttgagaaatggatgctgtctcagaaggagttaaagctataacctgtaacctttaaaatctccagttaaagggcctgtttcttactggcctgtgaggtgcaccgtagtgccttgggcctgtgtgttaaagctgctctcaccagtgaaacctaagaaatgagcaggttggcagctagggtttgtgttggaggctttcggtccagtgtcttgcagtcctacaacaagtgagaggcttgctgcca

SEQ ID NO: 6062 - DNA, 1654 bp, Homo Sapiens
  NM_138387
tgcccagtagggaggaaaaccggaggagagcgcaggaggaaacagtaccggctggaggccggtcttgcaggagcgggggactgctgggggcggggcttggtggtgaccgctggcggggcggggcctggggctcagaggggtgggctttggagatcagagggtcgacgctgcttcgttgcctggactctggtttccgccctggagcaagccggggcctggtcggcagctgggccgccatggagtccacgctgggcgcgggcatcgtgatagccgaggcgctacagaaccagctagcctggctggagaacgtgtggctctggatcacctttctgggcgatcccaagatcctctttctgttctacttccccgcggcctactacgcctcccgccgtgtgggcatcgcggtgctctggatcagcctcatcaccgagtggctcaacctcatcttcaagtggtttctttttggagacaggcccttttggtgggtccatgagtctggttactacagccaggctccagcccaggttcaccagttcccctcttcttgtgagactggtccaggcagcccttctggacactgcatgatcacaggagcagccctctggcccataatgacggccctgtcttcgcaggtggccactcgggcccgcagccgctgggtaagggtgatgcctagcctggcttattgcaccttccttttggcggttggcttgtcgcgaatcttcatcttagcacatttccctcaccaggtgctggctggcctaataactggcgctgtcctgggctggctgatgactccccgagtgcctatggagcgggagctaagcttctatgggttgactgcactggccctcatgctaggcaccagcctcatctattggaccctctttacactgggcctggatctttcttggtccatcagcctagccttcaagtggtgtgagcggcctgagtggatacacgtggatagccggccctttgcctccctgagccgtgactcaggggctgccctgggcctgggcattgccttgcactctccctgctatgcccaggtgcgtcgggcacagctgggaaatggccagaagatagcctgccttgtgctggccatggggctgctgggccccctggactggctgggccacccccctcagatcagcctcttctacattttcaatttcctcaagtacaccctctggccatgcctagtcctggccctcgtgccctgggcagtgcacatgttcagtgcccaggaagcaccgcccatccactcttcctgacttcttgtgtgcctccctttcctttccctcccacaaagccaacactctgtgaccaccacactccaggaggcagccccatccccttccagcccctaagtaggccctcccctccctaaatctgcttccgcaccacctggtcttagccccaaagatgggccttctctctcccagataagttggtcctccctctgcctttcctctcaagcccccaaagagcaaaggcaacagcaagaccagcgggttcttgcaacactgtgaggggcagccagggcggccccaataaagcccttgaatactttgaaaaaaaaaaaaaaaaaaaaaaaaaaaaaaaaaaaaaaaaaaaaaaaaaaaaaaaaaaaaaaaaaaaaaaaaaaaaa

SEQ ID NO: 6063 - DNA, 3387 bp, Homo Sapiens
  NM_138390
ggcccggccccgccccgcccgccggccgcggcaaagccgcatcctcccggagcagaaccgctccccgccggctgtccgcaacctccgccagcgtcggtccctgggcaggtgtggaatgcatccttgggacatctttgcatagccccatctaggaagaagttctgtgatgtgtgaactgtgagtttactcaaacaagtccaactctttataagacataggtagacgtcaggtctggaatggaagagccaacagcagtagaaggccaggtccagcttccaagcccccaccagggctctctcaggaaggctgtggctgctgccctggcgctggatggggaatccacaatggggcacaggaaaaagaagaggaaagagtcacgcccagaatccatcatcatctaccgctcagacaatgagaaaacagatgaggagcccggagaatcagaaggtggagatcagcctaaagaggaggagggagatgatttcctagactatcctgtggatgatgatatgtggaacctgcctctggacagccgctacgtcaccttaactgggaccatcacacgagggaagaaaaagggtcagatggtggacatccatgtcacattgacagagaaagagctgcaggaactgaccaaacctaaagagtcatcaagggaaacgacgcctgaaggaagaatggcctgccagatgggagctgaccgtgggccccatgtggtcctctggacgctgatctgcctgcctgtggttttcatcctttcttttgttgtctctttctactacggcactatcacctggtacaacatcttcctcgtgtataatgaggaaaggaccttctggcacaagatctcgtattgcccttgcctcgttctcttctatccagtgctcatcatggccatggcttcttccctcggcctctacgctgctgtggtccagctctcgtggtcctgggaagcatggtggcaagctgcccgggacatggagaaaggcttctgtggctggctctgcagcaagctgggtctggaggactgttctccctacagcattgtggagttgcttgaatccgacaatatctcaagcactctctccaacaaggaccccatccaagaagtagaaacctccacggtctaaactcccaacaacttactccctcctctggccccagtagcctatatatcatcttaaaattccagcagattatttctttaaattaccccctactctccgcagttcttctgggaaatcagagtccatactgatcagttttaccatcttgagggttccaggagggcatggagcagacaagcaattgtgccaaagcagttcacccaatggacaaactctttttgattccctgccctaaaatcaccatttatttaggacaatggaactctgctgtgtgtcgttttgggagcctggaagtgttactggtgcctggaactgaggggagtatgtgactaaatgtgtcagggagaataaagaacctcggggtaaccaaatccaccaagataatagacagggatggagtgagacatttaggaagctggactaccacagtgtagcagaaggtaaagatttgtgtgtatcatttagatttagatttagctgcatagaattaaaaccctaaaatatcagtggcttaaacaagatagaagtgtatttctttcttgtgcagaagaagtctggaggcagaccatcctgggaccctgtgaagtaatccaggtcccaggcttcttctatttctctaccattagtaggatgtgacccttctcacccttatccccaacatcccagtgctgattacatcttcagccatcacatccatgtttctgataaaatagaggaaagggcagagaagcacacacccttcctgttcaaggagacttcccagaagtcccactcgattcttcttatatctcattggcaagacctcagtcacatgatgtcatgagcaaaagaggctggaaatgtagttgtttggctgggtagctatattctcagctaaatactgggttcacgctaattggcaagaaaaaggaagaatggttatttgggttttgttttgttttgttttgtttcgctttagagacggagtctcactctgttgccgaggctggagtgcagtggcactatctcggctcactgcaaccttcgcctcctgggttcaagcaattcttgtgccttggcctccccagtagctgggattacaggtgcgtgccaccatacccggctaatttttgtattttttttttagtagagatggggtttcaccatgtgcccaggctggtcttgaactcctgacctcaggtgatccgcctgcctcggcctcccaaaatgctgggattgtaggcaagaatggttatcttggtaggcaagtcagaatctttgcctcacaatgatcatttaaatacattcagaacccccaaactgctaatatggttttatttatttatttattcattcatttgtttattcatttatttatttaggcctgaatcttacacagagaatttatatatagatattagctacatatactttgaatatgctatacatcgatattagcacctcacgtactttgcaattaagcttctgtaatgtcatgtgatttgtttttggaaaggaatagtggacaggagagtacaatttataatagtagcataactctttgtcctggtggtggaggtgggacgaggtggtgatatttaacctagattaaagaccaggaagggaggaattgcatctgccaaagtttcctccaacagcgatcagtagccctaagtacaaagaagccagatttagccttctgttgtttggcaaaacctcactcagagctttactccctcagacctttctgagtttaaccacagacatgatctttgctgtgctgagaaacttgtgtctacctggcctgtagggagtgtaaactagattaatacagattaacagactctgaacttaaaaaaaaaaatcactcctaagggtgtccttctaatttcaaaatatcaactcctaagaggtcagcagaatttggagatttgggtccttataagaatagctggtgctcttttcttgttcatgtctcaaaacaaagctgttgagagaactgctgcgatgaatcaaaccagaggagtttgtcatgctccccacagagagcccaggacatttgcctgatgtatggtgctgagctccaccttcagaggaactctctcttttttttttttttaaataactattattagcttgacaagaaaaaaaaagtgcccaacagttttagtgttaatcttggtgctctatggtgcattagcagagatatgaacaattaaatgaagacaaagaaaataaaaataaagtctgattaacttttgctcaaaaaaaaaaaaaaaaa

SEQ ID NO: 6064 - DNA, 2220 bp, Homo Sapiens
  NM_138391
ggccgcggagccgggcggagctggcttgcggctcccggggccggctctccggccggagacatggcccgggggcccggcccgctaggcaggcctcgccccgatacggtcgccatgcccaagagaggaaagcgactcaagttccgggcccacgacgcctgctccggccgagtgaccgtggcggattacgccaactcggatccggcggtcgtgaggtctggacgagtcaagaaagccgtagccaacgctgttcagcaggaagtaaaatctctttgtggcttggaagcctctcaggttcctgcagaggaagctctttctggggctggtgagccctgtgacatcatcgacagcagtgatgagatggatgcccaggaggaaagcatccatgagagaactgtctccagaaaaaagaaaagcaagagacacaaagaagaactggacggggctggaggagaagagtatcccatggatatttggctattgctggcctcctatatccgtcctgaggacattgtgaatttttccctgatttgtaagaatgcctggactgtcacttgcactgctgccttttggaccaggttgtaccgaaggcactacacgctggatgcttccctgcctttgcgtctgcgaccagagtcaatggagaagctgcgctgtctccgggcttgtgtgatccgatctctgtaccatatgtatgagccatttgctgctcgaatctccaagaatccagccattccagaaagcacccccagcacattaaagaattccaaatgcttacttttctggtgcagaaagattgttgggaacagacaggaaccaatgtgggaattcaacttcaagttcaaaaaacagtcccctaggttaaagagcaagtgtacaggaggattgcagcctcccgttcagtacgaagatgttcataccaatccagaccaggactgctgcctactgcaggtcaccaccctcaatttcatctttattccgattgtcatgggaatgatatttactctgtttactatcaatgtgagcacggacatgcggcatcatcgagtgagactggtgttccaagattcccctgtccatggtggtcggaaactgcgcagtgaacagggtgtgcaagtcatcctggacccagtgcacagcgttcggctctttgactggtggcatcctcagtacccattctccctgagagcgtagttactgcttcccatcccttgggggcagcctcgagtgtagtccattagtaatcagattccagtttggacagggtggctggattgtatatctcgttagtaatgtacatgctcttcaggttctagggctcctgttaggggagggagaaatgttgaatcaagagggaaaacaactactatgatttataaacatattttaatgtaaaaatttgcatttaaaaggagtggccctgttttctgtgttaaaaccccatttggtgctattgagtttgttctttattcttttatcccagtgaaaattgttgatcttgctgtagggaaaaattaaactctttgaatctccaaacaaggaagtttcagcattcccttatggatcagaggaaccttagaggcctgaaattgttgcttccagtttagctgcccctcaaattcaagtgaatattttcccttctccctttacccttctccagaaataaagcaggtgacagggttttcagaatcttaccatattgacttgtgtatcttttttaaaaaataatttgtgatatttattgcatacattttcttttggcagttttggattttaggtatttttttgcatgaggctgataatggtgatgatgactttatacccttggtactatactaggaactttacatagtatctctacttctcacagtcttgcaaagtaggtgatattattcccattttatagttgagaaaacggaattagtgactgtacctataacaccagtaaatgcagagccaagattctgacccaggtctttttgttgtaccataagtttaaaagatgagtctcatttttcttgtggtagatggtggtaaaaaggagtaggcagagtgtacatagataaaaaaaagtaaaagggtaagtaaaaaattgattgtggtatatgttattctaatcagccaaaaaagtttagaagattgatgaaatgatcttttaaatatgtatttctgaataaaatgtaaaaccaagaaagttatttcaggaaggatagtgaccctttc

SEQ ID NO: 6065 - DNA, 2379 bp, Homo Sapiens
  NM_138392
gggtgcacacccggaagtgggtgcgggccagccggctcgcccgggggccatggcagcagcggctactgcagccgagggggtccccagtcgggggcctcccggggaagtcattcatctgaatgtgggaggcaagagattcagtacctctcgccagactctcacctggatcccagactccttcttctccagtcttctgagcggacgcatctcgacgctgaaagatgagaccggagcaatcttcatcgacagggaccctacagtcttcgcccccatcctcaacttcctgcgcaccaaagagttggatcccaggggtgtccacggttccagcctcctccatgaagcccagttctatgggctcactcctctggttcgtcgcctgcagcttcgagaggagttggatcgatcttcttgtggaaacgtcctcttcaatggttacctgccgccaccagtgttcccagtgaagcggcggaaccggcacagcctagtggggcctcagcagctaggaggacggccagcccctgtccgacggagcaacacgatgccccccaaccttggcaatgcagggctgctgggccgaatgctggatgagaaaacccctccctcaccctcaggacaacctgaggagccggggatggtgcgcctggtgtgtggacaccataattggatcgctgtggcctatacccagtttctagtctgctacaggttgaaggaagcctctggctggcagctggtgttttccagcccccgcctggactggcccatcgaacgactggcgctcacagcccgggtgcatggtggggctttgggtgaacatgacaagatggtggcagcagccaccggcagcgagatcctgctatgggctctgcaggcggaaggcggtggctccgagataggggtctttcatctgggggtgcctgtggaggccttgttcttcgtcgggaaccagctcattgctacaagccacacagggcgcatcggggtgtggaatgccgtcaccaagcactggcaggtccaggaggtgcagcccatcaccagttatgacgcggcaggctccttcctcctcctgggctgcaacaacggctccatttactacgtggatgtgcagaagttccccttgcgcatgaaagacaacgacctccttgtcagcgagctctatcgggacccagcggaggatggggtcaccgccctcagtgtctacctcacccccaagaccagtgacagtgggaactggatcgagatcgcctatggcaccagctcagggggcgtgcgggtcatcgtgcagcacccggagactgtgggctcggggcctcagctcttccagaccttcactgtgcaccgcagccctgtcaccaagatcatgctgtcggagaagcacctcatctcagtctgtgccgacaacaaccacgtgcggacatggtctgtgactcgcttccgcggcatgatttccacccagcccggctccaccccactcgcttcctttaagatcctggctctggagtcggcagatgggcatggcggctgcagtgctggcaatgacattggcccctacggtgagcgggacgaccagcaagtgttcatccagaaggtggtgcccagtgccagccagctcttcgtgcgtctctcatctactgggcagcgggtgtgctccgtgcgctccgtggacggctcacccacgacagccttcacagtgctggagtgcgagggctcccggcggctcggctctcggccccggcgctacctgctcactggccaggccaacggcagcttggccatgtgggacctaaccaccgccatggacggcctcggccaggcccctgcaggtggcctgacggagcaagagctgatggaacagctggaacactgtgagctggccccgccggctccttcagctccctcatggggctgtctccccagcccctcaccccgcatctccctcaccagcctccactcagcctccagcaacacctccttgtctggccaccgtgggagcccaagccccccgcaggctgaggcccggcgccgtggtgggggcagctttgtggaacgctgccaggaactggtgcggagtgggccagacctccgacggccacccacaccagccccgtggccctccagcggtctcggcactcccctcacacctcccaagatgaagctcaatgaaacttccttttgaacaacgcagctgccatgatgccttgggatgccctggtcctgggggactcaggtgcctccctgattcctgtgggaaccccgggttcagggccagggcctccttggaataaatggttattgttactaggtccccaccttccctcttttctggaagccaaagtcaccctccccaataaagtcctcactgccaacaaaaaaaaaaaaaaa

SEQ ID NO: 6066 - DNA, 1393 bp, Homo Sapiens
  NM_138393
ggagcatcgcggctcaggctgcgggaaagcggtgcgcgtgcagcggggtgggtgccctggtccgcgggcgagctcgagcagccaaccccgggcgcgtcggggccatggacggcctgaggcagcgcgtggagcacttcctggagcaaaggaacctggtcaccgaagtgctgggggcgctggaggccaagaccggggtggagaagcggtatctggctgcaggagccgtcactctgctaagcctgtatctgctgttcggctacggagcgtctctgctgtgcaatctcatcggatttgtgtaccccgcatatgcctcaatcaaagctatcgagagcccaagcaaggacgacgacactgtgtggctcacctactgggtggtgtacgccctgtttgggctggccgagttcttcagcgatctactcctgtcctggttccctttctactacgtgggcaagtgcgccttcctgttgttctgcatggctcccaggccctggaacggggctctcatgctgtatcagcgcgtcgtgcgtccgctgttcctaaggcaccacggggccgtagacagaatcatgaacgacctcagcgggcgagccctggacgcggcggccggaataaccaggaacgtcaagccaagccagaccccgcagccgaaggacaagtgaagcagccccctgagcctcacaaggacctcctggctggtgaggagggggccgcgccaggctcccaggcctccacagagtcttcagcgcatcccccaacagcagcccctgccagtccctcgggtccaggcaaggccctgggggtctccttaaatgccacctcgggcaagtcccagtcccagtcctcggccacccccagctctggatcccagggccagctgccctctggctctggctgtggctcccgcctgtccggcagggcccagggccagcgtcgggcacagggcagctcccactggtctcggcaacacacccagccgcctggtacttcctccagcccctcccagtcagccctcccgtcctcggggcccctgcagccacccaacgtcacctccagcccggtctcacccatggtccagtctcccagcagcagcaacatccccacgcagccccccagcaagtcctctggcaagccggaggacgcagcccccaagaccagcggacagcgccagaaggaatcgtcgaaacagcctgccagcagcgcctcagtgcccgagctggtcccctgccattccgggacctctctggagtacacttcggagtccaccaccgagatcacctgcagctggccacaccacaggcccccgtgcctgcagcactactggtgcctgaaacacctggcctgctaggaggctccaataaagctaacccggaccaaaaaaaaaaaaaaaaaaaaa

SEQ ID NO: 6067 - DNA, 3053 bp, Homo Sapiens
  NM_138394
ggattcgatcctgcgcgacggccgcgaaggcgggggcggaggctcggcctgcgcggctgggagcggcttaggggaggagggaagaccggaagccacggttgcgtccccatccttagattcgctcctccgggcagggagcggagacggaggaggaggagggagaggctgaatgttggctcggtaattgagaggagcggccgctccagagcttcctcccggggcgcccccctcagtccgtccgcgcttctcagccgccagtctcctggccgcgcagtccccgcggacggccgggccgcggagaccctcgcagaagaggcgctgccggcggcgaggactggccggcggcatccgaggcgcgcgccccaccgccacccccacccgcctgccagccggtccctccggccgccgccatgtcctcctcctcttcctcccccagggagacgtacgaggaggaccgggagtacgagagccaggccaagcgtctcaagaccgaggagggggagatcgactactcggccgaggaaggcgagaaccgccgggaagcgacgccccggggcgggggcgatggcggcggcggcggccggagcttctctcagccggaggcaggtggaagtcatcataaagtttctgtttcacccgtcgtccatgttcgaggactctgtgaatctgtggtggaagcagacctcgtggaagcgctggaaaaatttgggacaatatgctatgtgatgatgatgccatttaaacgacaggctctagtggaatttgaaaacatagatagtgccaaagaatgtgtgacatttgctgcagatgaacccgtgtacattgctggtcaacaggcttttttcaactattctacaagcaaaaggatcactcggccaggaaatactgatgatccatcaggaggcaacaaagttcttctgctctcaattcagaatccgctttatccaattacagtggatgttttatatactgtatgcaaccctgttggcaaagtgcaacgtattgttatattcaagagaaatgggatacaagcaatggttgagtttgaatcagtcctttgtgcccagaaagctaaagcagcactcaatggagctgatatatatgctggatgttgcacactaaaaattgaatatgcacggccaactcgtctaaatgttattaggaatgacaatgacagttgggactacactaaaccatatttgggaagacgagatagaggaaagggtcgccagagacaagccattttgggagaacacccttcttcgtttagacatgatggctatggatcccatggtccattattgcctttaccaagtcgttacagaatgggctctcgagatacacctgaacttgttgcttatccattaccacaggcttcttcctcttacatgcatggaggaaatccctctggttcagttgtaatggttagtggattacatcaactaaaaatgaattgttcaagagtcttcaacctgttctgcttatatggaaatattgagaaggtaaaatttatgaagaccattcctggtacagcactggtagaaatgggtgatgagtatgctgtagaaagagctgtcacacaccttaataatgtcaaattatttgggaaaagacttaatgtttgcgtgtctaaacaacattcagttgttccaagtcaaatatttgagctggaggatggtaccagcagctacaaagattttgcaatgagcaaaaataatcgctttacaagtgctggccaagcatctaagaatataatccagccaccctcctgtgttttgcattattataatgttccattgtgtgtcacagaagagaccttcacaaagttgtgtaatgaccatgaagttcttacattcatcaaatataaagtgtttgatgcaaaaccttcagccaaaacactttctgggctattagaatgggagtgcaaaactgatgcagtagaagcccttacggcactgaatcactatcagataagagtgccgaatggttccaatccctatacattgaagctttgcttttctacatcatcccatttataagaagagaagagcatgttagaatttatgttcacctttattacaatttcaaagctacacttcattaaaaaaaaatctaaaatggttgatctcatgttgccttgcttactttaagatcctgttctgtaataaacatattttgccttgagtaaatttgttgtaagcttaaatattgaattgttttcattttaagatagaatatcataatgtagactatctacagcttcattgtagattatacagatatatgatttctaaccttattactggaatttttcttccacagtaaaaatatatttgcattcttaatgctaattatctgcaagtattttttcattgtgtaagagattaatgcaggtgaaagtattgcattttaatatagaattcctattatatgtttagatgtttaagtatgttgcagttactcatattaaacataacttgtatatttattattttaatgaagtttgagaataacgttacatatgttgaattttaagtactacagatttaactgattttatatttctgaaaggctaacagacatggatacacgtgtacagtatgcattcaaacttatttaaattggtgtatttttttttaagtcactgtccatttgtattgacatgcctctgtttctagtccagtttggagattttataaagttataacaatgagttaatgtgttcattttcatttgttgcatgtgacttaaatacagctagtatttggcattgagattttaatagaggttataattaacagttcctcttatagataataatctgggatccatgggtgggcttcagagaatctgtgtaccccctaaaattgtatgtagaattttggatatttacatttttattttttaactcttggatccatcagtaatatgtatttttctatatggtacaagatttaaggatctaattttatttttattccaaacagatagctatttgtctcaataccatttattaaacattctttctcccactgaaaaaaaaaaaaaaaaaa

SEQ ID NO: 6068 - DNA, 3102 bp, Homo Sapiens
  NM_138395
attggctttccggccggaagctgcggcgcgacccggctgcgcatgcgcctctcacacgtgctgtcagaacgccgcctcctccgcttgcggccggtctgcaccatgctgcgaacgtccgtcctccgcctgctaggacgcacgggggctagtaggctgtctctcctggaggacttcggcccacgctactacagttcgggctccctcagtgccggcgatgatgcttgtgatgtgcgcgcctacttcactacacccattttctacgtgaacgcggcgccgcacatcgggcacctgtactcggcactactggcggacgccctatgccgccaccgtcgcctccgaggtcccagcacggccgccacgcgattctccactggtaccgacgagcacgggctgaagattcagcaggcagcagctaccgcgggcctggccccgaccgagctgtgcgaccgagtctctgagcagttccagcagcttttccaggaggccggtatctcctgcacagatttcatccgcaccacggaggcccggcaccgggtggctgtgcagcacttctggggggtgcttaagtcccgcggtctgctctacaagggcgtctatgaaggttggtattgcgcttccgacgagtgcttcctgcctgaggccaaggtcacccagcagccgggcccatcgggggattcgtttcctgtatctctcgagagcgggcatccagtctcctggaccaaggaagaaaactacattttcaggctttcccagttccggaagccactccagcggtggctgcggggcaaccctcaggcgatcacccccgaaccatttcatcacgtagttcttcagtggctggacgaggagctgcccgacctgtccgtgtctcgcagaagtagccacttgcactggggcattccggtgcccggggatgattcgcagaccatctatgtatggctggatgccctggtcaactacctcactgtaattggctacccaaatgctgagttcaaatcttggtggccggccacctctcatatcataggtaaggacattctcaaattccatgccatctattggcctgccttcctgttaggggccggcatgagcccgccacagcgcatctgtgtccattcccactggacagtctgtggccaaaagatgtccaagagcttgggcaacgtggtggatcctaggacttgccttaaccgctataccgtggatggcttccgctactttctccttcggcagggcgtccccaactgggactgtgactactatgatgaaaaggtggttaagttgctgaactccgagctggcagatgccttgggaggtctcttgaaccgatgcactgccaaaagaataaatccttctgagacctacccagccttctgcactacctgcttccctagtgagccagggttggtggggccgtcagttcgtgctcaggcagaggattatgctctggtgagcgcagtggccactttgccaaagcaggtagcagaccactatgataactttcggatatataaggctctggaggccgtgtccagctgtgtccggcaaactaatggttttgtccaaaggcatgcaccatggaagctgaactgggagagcccagtggatgctccctggctgggtactgtgcttcatgtggccttggaatgtttgcgagtctttgggactttgctgcagcctgtcaccccaagcctagctgacaagctgctgtctaggctgggggtctctgcctcagagaggagtcttggagagctctatttcttgcctcgattctatggacatccatgcccttttgaagggaggaggctgggacctgaaactgggcttttgtttccaagactagaccagtccaggacttggctggtgaaagcccaccggacctagaaactcagttcttaccggcttgtggtaaaaaagcaaatgtgttatctttttattttttattttcaggaaagttatactagtattttcttaagtgtggaatcaaatgagcacataagctgtgtccctgtgaaaagaggtttgtagcctttcaggtgcctgctcctattcatttctctgtgaccattgatcactgtcctttgtgcattgtgtgtctaagatgtcttcaggggaaagatgggtaagagacagtgttgctaatgctgttccttctttgtgcctccttccaaaccacagttatttgcccaaactacctctcgtggctggtttttcattggcctggcctctgcttctcaggctaattagtgactcctttctttgagggtcagggttggaggccccttactggtggttttacagggggatcctactttgttacacatgttgggtttcctgataaaaagagagtattttattaaacccttgaaccagtgtcctagaccagatgatttttgcccatgtgtatccccatttaaattcctacaactaagtctccctgctttgttaatagtccaacagttgggttgtgtaacatcacacttcaaccggtagatggctctaatctcacacatttacttactaaagattgaggattcggaatatttagaataaattagttttctgctttctaattttgcagatctttacatttttattgcttttcttaaaataagggatagctttgcaaccactattgttttaatggaaagcaaaaaacccccccaaacttatcagaatcctcgttctttttcagactactgaaaaatgacatttactctgttaaatgtttaataagtgaataagtaaatgtatcaagttgtttatataataaattataaaactcttgaggcacttggtatgttaaaaattttaaactttagtaacattaggttacaggtatgatttaaaaatttgtaaatagttcaaaagggcaatgttttctttatatttcttatagtcttaattttgttatccatgtgcataatttacctcatgatttcttttggtcaatcaggatctttaatacaatatagaaattgtgtaatagttattataaatgttaatacacaactttcaggtaattttaactgattatttcttttgctcttttaacttaagttattaaagtttaaaagttcgtaagtaaaaaaaaaaaaaaaa

SEQ ID NO: 6069 - DNA, 1216 bp, Homo Sapiens
  NM_138401
ccgcgaccccgccttcggcgctcggctcgcaggatggatcccgtacccgggacagactcggcgccgctggctggcctggcctggtcgtcggcctctgcacccccgccgcgggggttcagcgcgatctcctgcaccgtcgagggggcacccgccagctttggcaagagcttcgcgcagaaatctggctacttcctgtgccttagttctctgggcagcctagagaacccgcaggagaacgtggtggccgatatccagatcgtggtggacaagagccccctgccgctgggcttctcccccgtctgcgaccccatggattccaaggcctctgtgtccaagaagaaacgcatgtgtgtgaagctgttgcccctgggagccacggacacggctgtgtttgatgtccggctgagtgggaagaccaagacagtgcctggataccttcgaataggggacatgggcggctttgccatctggtgcaagaaggccaaggccccgaggccagtgcccaagccccgaggtctcagccgggacatgcagggcctctctctggatgcagccagccagccaagtaagggcggcctcctggagcggacagcgtcaaggctgggctctcgggcatccactctgcggaggaatgactccatctacgaggcctccagcctctatggcatctcagccatggatggggttcccttcacactccacccacgatttgagggcaagagctgcagccccctggccttctctgcttttggggacctgaccatcaagtctctggcggacattgaggaggagtataactacggcttcgtggtggagaagaccgcggctgcccgcctgccccccagcgtctcatagtccctcacccttccgcggaaagagcccccttactccacctccccgccagcctggggccaccccccctcactgcatcctggggccacccccactcactgcatcctgggaaccttcgccctgcaaggcgtttgctatcttcagccactgggcggagctgcagccctggaggagggggcgggtcgaggctgcgtggtgatggggtctccgcccccacgccctgccgggcagggctggagctggacagaagccagtgcctttaagtcatttgtgtcaaaaccctctggggtccggaggctgtgcgggtgtcctcctggcaataaacactacccggttctcgcaaaaaaaaaaaaaaaaaaaaaaa

SEQ ID NO: 6070 - DNA, 2668 bp, Homo Sapiens
  NM_138402
gggtcagggcagccacactgcacgcaggctgggccgactggggagctcataggccaggctctgacacccaggcagggcctagggtgggacgatggcaggtgggggcagcgacctgagcaccagggggctgaacggaggtgtttcacaagtagcaaatgagatgaaccatcttcctgcacacagccaaagtctgcaaaggctgttcacggaagaccaggatgtagatgagggacttgtctatgacactgtattcaagcacttcaaaagacataagctggagatatcaaatgcaataaaaaagacatttccattccttgagggcctccgcgatcgggaactcatcacaaataaaatgtttgaagattctgaagattcttgtagaaacctggtccctgtacaaagagtggtgtacaatgttctcagtgaactggagaagacatttaacctgtcagttttggaagcactgttcagcgaggtcaacatgcaggaataccccgatttaattcacatttataaaagcttcaaaaatgcaatccaagacaaattgtctttccaagaaagtgatcgaaaagaaagggaagagaggcctgacatcaaactaagtcttaaacaaggagaagtgccagaaagcccggaagcaaggaaggaaagtgaccaagcatgtggcaaaatggatactgtggatattgcaaacaactctactttgggaaaacccaagaggaaaagaagaaaaaagaaggggcatggctggagcagaatgggaacgagaacgcagaaaaacaaccaacaaaatgataacagcaaagccgatggccagctggtctcgagtgaaaagaaggcgaacatgaatctgaaagacctttccaagattagggggagaaagagaggcaaacctggaacccactttactcagagtgacagagctccacagaaaagagtccgatcaagagcttcaagaaagcacaaagatgaaactgtggattttcaggctcctttacttccagtgacctgtggtggggtgaagggaattttacataaggagaaattggaacaaggaaccttggcaaagtgtatacagactgaggatggaaaatggttcacccccatggaatttgaaatcaaaggaggctacgcaagatcaaagaactggaggctgagtgtgcgctgtggcgggtggcccctacgacggctgatggaggaaggatctctacctaatcctccaagaatatattacaggaacaaaaagagaatactgaagtctcaaaacaatagctcagttgacccttgtatgagaaacttggatgagtgtgaggtgtgccgggacggaggggagctgttctgttgcgacacttgttcaagagtcttccatgaggactgccacatcccacctgtggaaagtgagaagaccccgtggaattgcatcttctgcaggatgaaggagtctccgggaagccaacagtgttgtcaggaatctgaggtcctggagaggcagatgtgtcctgaggaacagttgaaatgtgagttcctcctcttgaaagtctattgctgttctgagagctccttttttgccaagattccatactattattatattagagaggcgtgtcaaggcctgaaggagcccatgtggttggataaaatcaagaaaaggctgaatgagcacggttacccccaagtggaggggtttgtacaagacatgcgcctcatcttccagaaccacagggcctcttacaagtataaggattttggccaaatgggacttagactggaggctgaatttgagaaggatttcaaggaagtgtttgctattcaggaaacaaatgggaacagttgactggtttagtggatgctgaaggccttcaggaaatatgctactggttgccactgacttcaaactgagagcacttgggaaatagcacatgcagggagaggcttttctctgagcctccctcatctgcccaaaaacaaatcctcaaaagaaatttgatcatcatgaatcccatccccaagaatctcatcaaccagggaagaggaactgagatcacagggaaggagattggaggtgataccagcacagacagactctcacctcttctcctgaggtctgctccagacaacatttattactcacaagacctttttcctccgttttttttttgagatggagtctcacacagtcacccgggattggaatgcaatggcgcgatctcagctcactgcaacctctgcctcccggattcaagtgattctcctgtctcagcctcccaagtagctgggattacagtgcctgccaccatgcccagctaattttttgcatttttagtagagacggggtttcactatgttggccaggctggtctcgaactcctgacctcatgagccgcccgccttggcctcccaaagtgctgggacgtgacaggagtgagccaccacacctggccactcgcaagaccttttatctgaaaaccagccaagctttattcacgacacacttcttcccttcactctcccacttctgtggtcaactccctgcagaactcccaaactgccgttcttttcgatagctcacgatggtgtatgagtgtcaatcatctgacccttcttggagtctcatatttcgtggaactcctgtgcaaacatatattattaaattttttttcctcctgtc

SEQ ID NO: 6071 - DNA, 2023 bp, Homo Sapiens
  NM_138412
aggtgtgagacagtcacgttgatggtgacagcagcagtgaccgtagcagcctagaggtggccgaatgcttactctaatgggctggcccatccctgagtgtctagagttcccagcccgcttaaggaaggaaggaaaacacaggcagctctaagtgtacgacgagggaggtctcatcggcggtgaggaagcccaggcgggtccccttcccagctgaaaggggttcggaatttcactctgtcgccaggctggaatgcagtagggcaatctcggctcactgcaacctccacctcccgagttcaagtgatgctcctgcttcggcctcctgagtagctgggactacagggactatgtcaccggtggggcttgccccagcaaggccaccatccctgggaagacggtcatcgtgacgggtgccaacacaggcatcgggaagcagaccgccttggaactggccaggagaggaggcaacatcatcctggcctgccgagacatggagaagtgtgaggcggcagcaaaggacatccgcggggagaccctcaatcaccatgtcaacgcccggcacctggacttggcttccctcaagtctatccgagagtttgcagcaaagatcattgaagaggaggagcgagtggacattctaatcaacaacgcgggtgtgatgcggtgcccccactggaccaccgaggacggcttcgagatgcagtttggcgttaaccacctgggtcactttctcttgacaaacttgctgctggacaagctgaaagcctcagccccttcgcggatcatcaacctctcgtccctggcccatgttgctgggcacatagactttgacgacttgaactggcagacgaggaagtataacaccaaagccgcctactgccagagcaagctcgccatcgtcctcttcaccaaggagctgagccggcggctgcaaggctctggtgtgactgtcaacgccctgcaccccggcgtggccaggacagagctgggcagacacacgggcatccatggctccaccttctccagcaccacactcgggcccatcttctggctgctggtcaagagccccgagctggccgcccagcccagcacatacctggccgtggcggaggaactggcggatgtttccggaaagtacttcgatggactcaaacagaaggccccggcccccgaggctgaggatgaggaggtggcccggaggctttgggctgaaagtgcccgcctggtgggcttagaggctccctctgtgagggagcagcccctccccagataacctctggagcagatttgaaagccaggatggcgcctccagaccgaggacagctgtccgccatgcccgcagcttcctggcactacctgagccgggagacccaggactggcggccgccatgcccgcagtaggttctagggggcggtgctggccgcagtggactggcctgcaggtgagcactgccctgggctctggctggttccgtctgctctgctgccagcaggggagaggggccatctgatgcttcccctgggaatctaaactgggaatggccgaggaggaaggggctccgtgcacttgcaggccacgtcaggagagccagcggtgcctgtcggggagggttccaaggtgctccgtgaagagcatgggcaagttgtctgacacttggtggattcttgggtccctgtgggaccttgtgcatgcatggtcctctctgagccttggtttcttcagcagtgagatgctcagaataactgctgtctcccatgatggtgtggtacagcgagctgttgtctggctatggcatggctgtgccgggggtgtttgctgagggcttcctgtgccagagcccagccagagagcaggtgcaggtgtcatcctgagttcaggctctgcacggcatggagtgggaaccccaccagctgctgctacaggacctgggattgcctgggactcccaccttcctatcaattctcatggtagtccaaactgcagactctcaaacttgctcatttaaaagaaaaaaaaaagaag

SEQ ID NO: 6072 - DNA, 1712 bp, Homo Sapiens
  NM_138417
ttggcgcagcgcggttgccaatggtcgctccctgagaggatgccgctcgtggtgttttgcgggctgccgtacagcggcaagagccggcgtgctgaagagttgcgcgtggcgctggctgccgagggccgcgcggtgtacgtggtggacgacgcagctgtcctgggcgcagaggacccagcggtgtacggcgattctgcccgtgagaaggcattgcgtggagctctgcgagcctccgtggaacggcgcctgagtcgccacgacgtggtcatcctggactcgcttaactacatcaaaggtttccgttacgagctctactgcctggcacgggcggcgcgcaccccgctctgcctggtctactgcgtacggcccggcggcccgatcgcgggacctcaggtggcgggcgcgaacgagaaccctggccggaacgtcagtgtgagttggcggccacgcgctgaggaggacgggagagcccaggcggcgggcagcagcgtcctcagggaactgcatactgcggactctgtagtaaatggaagtgcccaggccgacgtacccaaggaactggagcgagaagaatccggggctgcggagtctccagctcttgtgactccggattcagagaaatctgcaaagcatgggtccggtgccttttactctcccgaactcctggaggccctaacgctgcgctttgaggctcccgattctcggaatcgctgggaccggcctttattcactttggtgggcctagaggagccgttgcccctggcggggatccgctctgccctgtttgagaaccgggccccaccaccccatcagtctacgcagtcccagcccctcgcctccggcagctttctgcaccagttggaccaggtcacgagtcaagtactggccggattgatggaagcgcagaagagcgctgtccccggggacttgctcacgcttcctggtaccacagagcacttgcggtttacccggcccttgaccatggcagaactgagtcgccttcgtcgccagtttatttcgtacactaaaatgcatcccaacaatgagaacttgccgcaactggccaacatgtttcttcagtatttgagccagagcctgcactgaccagaggaggtaggggggaagccatggcttctgatctccactccactttatttctctgggaaaaataggctgcaggtctccagagcatatcgatgcagtactgtactagagctgttgtgactgattcactcaaactttcctgcatacccctgtgccaggccttgggtttacagcataagttcagactaaagagaatggagaactattgtggtgcaacctggcaaatccctcagaggacagagctaaggtggacagggattacctagattggatcctacttgggctatcacagagcattgaccattggcttccctcatctgaggcgtgggagagcagactggatagatgagaattgttttaaaacaattgtgaacagaaactgaagatggtacagttctacatctgcacctgcccttttttcataccacaaaagtattttttgagtactgtactgactttttgctagtttctattctgggaccgagttcacagataaatccattggtttgtatccttgagaaactttgtttttgtggaagtaagaaagttatctactagattatttcctctaataaaatcttttaaaatagtcaaaaaaaaaaaaaaaa

SEQ ID NO: 6073 - DNA, 928 bp, Homo Sapiens
  NM_138418
cgagcccgtgcgggccctttaagggccgggggcgtgtagcgggcccgccccctccccgcggcgcccgcagtccgttaagtgcgagccccggcgcaggggccggatctggccgggggccggcggcggtgtgggagcggcgcgtcatgtacaccatcaccaaggggcccagcaagctggtcgcgcagcgccgcacaggtcccacgcagcagcaggtggagggccggctcggcgagctcctgaaatgccggcagcccgcgccgccgacctcgcagcccccgcgggcgcagccctttgcgcagccgccgggaccctggcccctgtcgagtccagggccaaggcttgtgttcaatcgtgtgaatggccggcgggccccctccacgtccccatccttcgaggggacccaggagacctacacagtggcccacgaggagaatgtccgctttgtgtccgaagcctggcagcaggtgcaacagcagctggatggtggcccagccggtgagggcgggccaaggcctgtgcagtacgtggagaggacccccaatccccggctgcagaactttgtgcccattgacctagacgagtggtgggcgcagcagttcctggcgagaatcaccagctgttcctagtggctgctgggagggggcgctgctacacggccgacctgtcgccaggagagaagcatggcgccctgcccacccactgcgcctggctgggtgccggccacacctgaagtgccagcatttggacttttgcacctttttttcccttggcccggctgtcccaaccaagctgccatggccaagggccgaacccgtctgacctcagccctgctcactgtgcccagggaccagcgaccagcccctggggctggcagggaggagctccaggctaataaagtggagaaactgtcaaaaaaaaaaaaaaaaaa

SEQ ID NO: 6074 - DNA, 1545 bp, Homo Sapiens
  NM_138421
ctcctccgcagcttccggcacggccttcaagcgcgggacgcgacaaagtcatggaccgcaacccctcgccgccgccgccgggtcgcgacaaggaggaggaggaggaggtggccggtggagactgcatagggagcacggtctacagcaaacactggctcttcggcgtcctcagcggactcatccagattgttagccctgaaaacaccaaatctagctcagatgatgaggagcagctgacggagcttgatgaagaaatggagaatgaaatttgcagagtatgggatatgtcaatggatgaggacgtggctttatttctccaagaatttaatgctcctgatatattcatgggagtactggccaagtccaagtgtcctcgattaagagaaatctgtgtgggaattttaggtaatatggcctgtttccaggagatatgtgtgtccatcagcagtgataaaaatcttgggcaggtgttattgcactgtttgtatgattcagacccacctactctgctggaaacaagcaggttgttgcttacttgcctttcccaggcagaagtggccagtgtttgggttgaaaggatccaggaacatccagctatttatgatagcatttgcttcattatgtcaagttcaacaaatgttgacttgctggtgaaggtgggggaggttgtggacaagctctttgatttggatgagaaactaatgttagaatgggtcagaaatggggctgctcagcctctggaccaaccccaggaagagtctgaagagcagccagtgtttcggcttgtgccctgtatacttgaagctgccaaacaagtacgttctgaaaatccagaatggcttgatgtttacatgcacattttacaactgcttactacagtggatgatggaattcaagcaattgtacattgtcctgacactggaaaagacatttggaatttactttttgacctggtctgccatgaattctgccagtctgatgatccacccatcattcttcaagaacagaaaacagtgctagcctctgttttttcagtgttgtctgccatctatgcctcacagactgagcaagagtatctaaagatagaaaaagtagatcttcctctaattgacagcctcattcgggtcttacaaaatatggaacagtgtcagaaaaaaccagagaactcggcagagtctaacacagaggaaactaaaaggactgatttaacccaagatgatttccacttgaaaatcttaaaggatattttatgtgaatttctttctaatatttttcaggcattaacaaaggagacggtggctcagggagtaaaggaaggccagttgagcaaacagaagtgttcctctgcatttcaaaaccttcttcctttctatagccctgtggtggaagattttattaaaatcctacgtgaagttgataaggcgcttgctgatgacttggaaaaaaacttcccaagtttgaaggttcagacttaaaacctgaattggaattacttctgtacaagaaataaactttatttttctcactgacaaaaaaaaaaaaaaa

SEQ ID NO: 6075 - DNA, 574 bp, Homo Sapiens
  NM_138425
cgttgggaacggttgtaggacgtggctctttattcgtgagttttccatttacctccgctgaacctagagcttcagacgccctatggcgtccgcctcgacccaaccggcggccttgagcgctgagcaagcaaaggtggtcctcgcggaggtgatccaggcgttctccgccccggagaatgcagtgcgcatggacgaggctcgggataacgcctgcaacgacatgggtaagatgctgcaattcgtgctgcccgtggccacgcagatccagcaggaggttatcaaagcctatggcttcagctgcgacggggaaggtgtccttaagtttgctcgcttggtcaagtcctacgaagcccaggatcctgagatcgccagcctgtcaggcaagctgaaggcgctgtttctgccgcccatgaccctgccaccccatgggcctgctgctggtggcagcgtggccgcctcctgagagttggccctcccttgtgccactgccaggggaggaaaggccttgatgttccagacaataataaatgcgcctgtgacttaaaaaaaaaaaaaaaaaaaaaaaaaaaaaaaa

SEQ ID NO: 6076 - DNA, 1468 bp, Homo Sapiens
  NM_138431
cgagagcacgtgtccagaccctagcctgtacgacgctgactctgcccggtcccagaaccaaagccatgccggggtgtggcctctgaccccacgcggaggggacctcgccttgcgggaccccacctggaacccgacctcccagcctcgcagccggcctgagccgccatgcgcgggaagttgctgccgctggccggcctctacctggtgcagggcctgccctacgggctccagtccggcctcctgccagtgctgctgcgtgccggcggcctctcgctgacgcgcgtggggctggccaaggttctgtacgctccgtggctgctcaagctggcttgggccccgctggtggacgcgcagggctcggcgagggcctgggtgacgcgcagcacggcgggcctgggcctggtgtgtgggctgcttgccgggctgccccctcctggagctggccaggccgggctgcccgccgctgtggcggggttgctgctgttgttgaacctgggtgccgccatgcaggatgtggccctggacgcgctggctgtgcagctgctggagccggccgaactggggccgggcaataccgtgcaggtggtcgcgtacaagctgggggccgcgctagctgggggcgcgctgctggcgctgctgcccaccttctcgtggccgcaactctttctgctcctggctgccacctactggctggccgcggccctggcctgggctgcaccagccctgcggcggctcccacagcagcccccttccgagcagcgtccccacaccgcgcaccttctgcgggacgtgctagccgtgccggggaccgtgtggacggcaggctttgtgctcacctacaagctgggtgagcagggtgccagcagcctgtttcctcttctcctgctggaccacggcgtttctgctcccgagttgggactgtggaatggtgtgggtgctgtggtctgctccatcgctggctcctccctgggtgggaccttgctggccaagcactggaaactgctgcctctgttgaggtcggtgctgcgcttccgcctcgggggcctagcctgtcagactgccttggtcttccacctggacaccctgggggccagcatggacgctggcacaatcttgagagggtcagccttgctgagcctatgtctgcagcacttcttgggaggcctggtcaccacagtcaccttcactgggatgatgcgctgcagccagctggcccccagggccctgcaggccacacactacagccttctggccacgctggagctgctggggaagctgctgctgggcactctggccggaggcctggctgatgggttggggccacatccctgcttcttgctcctgctcatcctctctgcctttcccgttctgtacctggacctagcacccagcacctttctttgagctgagtggctggagtggtcaataaagccacatgtgcctgtgaaaaaaaaaaaaaaaaaaaaaa

SEQ ID NO: 6077 - DNA, 866 bp, Homo Sapiens
  NM_138436
aggaaatgacgaaggcagagggcgtccaggtccgctcggtaaccgtttcccgcgcgcccggccccgactccggggtaaagagccccggagcggagcagcgctggccgcgtgccgcctccggagccggcagcccccatggctgggggttatggagtgatgggtgacgatggttctattgattatactgttcacgaagcctggaatgaagccaccaatgtttacttgatagttatccttgttagcttcggtctcttcatgtatgccaaaaggaacaaaaggagaattatgaggatattcagtgtgccacctacagaggaaactttgtcagagcccaacttttatgacacgataagcaagattcgtttaagacaacaactggaaatgtattccatttcaagaaagtacgactatcagcagccacaaaaccaagctgacagtgtgcaactctcattggaatgaaacctcagaaaaagagcaacagaagtaattgtttcaagctcctgattctttctactaaatcatgaacagctttaaaaacatttctgtctgcataaaattattttacttgtaacttttccccaattgttctgtgcattgttttgcctttttaaattacatctccaagtggctcaaaaggccttgacacagggaacctgcacatatccaggatatgtgtaaccagcgatggtgacttgaccttgccaagacctgtgattccttcaggatacaatcagtgagaaataaaaacacatcttgggaagtgggaatcctggagtttatgccatttgcaatattaaaaaataaaaatgcaagttattatttcaataataacttcctgtttcattgtaaaaaaaaaaaaaaaaaaa

SEQ ID NO: 6078 - DNA, 1044 bp, Homo Sapiens
  NM_138439
gcggaggagcggccccagccagaagacagggcacccgcggccttgctgcgcatgctcgcgctgtgaccccggcttgaggtaacagcgcgagctgaggctggggcccttggcgcggaggctgagggacccgccgcggcgctgtcgccggagagggagggcaccgctgtcgtcggccagaagccaaggagtcctcagtgacggtgggatccacaacatctccacatcgctgtccccacccagccagggcagcgccagcactagctcagacgcaaggacggaaccgctggactccaggttccttgcctgggagtaggagaaatccacctgctgggggctgagtgtggcctgagggacaggccctgggtcccgggatgcccctgcccgagcccagcgagcaggagggtgagagtgtgaaggccagccaggagccatcccccaagccaggcacagaagtcatcccggcagcccccaggaagcccagaaagttctccaaactggtcctgctcacagcctccaaagacagcaccaaggtggcgggggccaagcgcaagggtgtgcactgtgtcatgtccctgggggtgcccggccccgccacccttgccaaggccctcctccagacccaccccgaggcccagcgggccattgaggcagcccctcaggagcctgagcagaaacggagcaggcaggacccaggcacagacagaacagaagacagtggattagcagcggggcctcctgaggctgctggggagaactttgccccctgctctgtggcgcccggcaagtccctgtaaccttgacaacaggcgcatcctcccaggccaccaacccagccataggctcttctctgtccgcagggcttctggggccaaatgggtgaatctttgcttttaacattgtgtgatttcttttctttttttttttttttttagatcaagtataagttacttttgtaagcagaaaaatactttcaaacaagaataaaagaagctgttcgctagaccccataatgggcaggttttaaacaaaaaaaaaaaaaaaaaa

SEQ ID NO: 6079 - DNA, 1802 bp, Homo Sapiens
  NM_138441
agcctggggttccccttcgggtcgcagactcttgtgtgcccgccagtagtgcttggtttccaacagctgctgctggctcttcctcttgcggccttttcctgaaacggattcttctttcggggaacagaaagcgccagccatgcagccttggcacggaaaggccatgcagagagcttccgaggccggagccactgcccccaaggcttccgcacggaatgccaggggcgccccgatggatcccaccgagtctccggctgcccccgaggccgccctgcctaaggcgggaaagttcggccccgccaggaagtcgggatcccggcagaaaaagagcgccccggacacccaggagaggccgcccgtccgcgcaactggggcccgcgccaaaaaggcccctcagcgcgcccaggacacgcagccgtctgacgccaccagcgcccctggggcagaggggctggagcctcctgcggctcgggagccggctctttccagggctggttcttgccgccagaggggcgcgcgctgctccacgaagccaagacctccgcccgggccctgggacgtgcccagccccggcctgccggtctcggcccccattctcgtacggagggatgcggcgcctggggcctcgaagctccgggcggttttggagaagttgaagctcagccgcgatgatatctccacggcggcggggatggtgaaaggggttgtggaccacctgctgctcagactgaagtgcgactccgcgttcagaggcgtcgggctgctgaacaccgggagctactatgagcacgtgaagatttctgcacctaatgaatttgatgtcatgtttaaactggaagtccccagaattcaactagaagaatattccaacactcgtgcatattactttgtgaaatttaaaagaaatccgaaagaaaatcctctgagtcagtttttagaaggtgaaatattatcagcttctaagatgctgtcaaagtttaggaaaatcattaaggaagaaattaacgacattaaagatacagatgtcatcatgaagaggaaaagaggagggagccctgctgtaacacttcttattagtgaaaaaatatctgtggatataaccctggctttggaatcaaaaagtagctggcctgctagcacccaagaaggcctgcgcattcaaaactggctttcagcaaaagttaggaagcaactacgactaaagccattttaccttgtacccaagcatgcaaaggaaggaaatggtttccaagaagaaacatggcggctatccttctctcacatcgaaaaggaaattttgaacaatcatggaaaatctaaaacgtgctgtgaaaacaaagaagagaaatgttgcaggaaagattgtttaaaactaatgaaataccttttagaacagctgaaagaaaggtttaaagacaaaaaacatctggataaattctcttcttatcatgtgaaaactgccttctttcacgtatgtacccagaaccctcaagacagtcagtgggaccgcaaagacctgggcctctgctttgataactgcgtgacatactttcttcagtgcctcaggacagaaaaacttgagaattattttattcctgaattcaatctattctctagcaacttaattgacaaaagaagtaaggaatttctgacaaagcaaattgaatatgaaagaaacaatgagtttccagtttttgatgaattttgagattgtatttttagaaagatctaagaactagagtcaccctaaatcctggagaatacaagaaaaatttgaaaaggggccagacgctgtggctcac

SEQ ID NO: 6080 - DNA, 2724 bp, Homo Sapiens
  NM_138447
ggaagccggcatggcgctccggtcaataaaatcgatagctggaagctgcctgtgttccaggcaaaggcggtgcggtagcagcgccgccattttccccgaaggcatcttccggtgcctttcacccaagttcgggcaggagtttcctgaataacagcaaaaggtttccgttagccccgcgggcgaccaattccgattccctccgggcctccccggccacgctcagccctggtccggcaggggctcctcgatcccaggggccgccagcgcccgagggccgaggcctggacacggaaggccgtggcgccggcttctcgggtcccatggcgccaccttcggctccgctccctgcgcagggaccaggaaaggccagacccagtcggaaaaggggcaggaggccgagggctctgaagttcgtggacgtggccgtgtacttctccccggaggagtggggctgcctgcggcccgcgcagagggccctgtaccgggacgtgatgcgggagacctacggtcacctgggcgcgctcgggtgcgcaggtcccaaaccagccctcatctcctggttggaacgaaacaccgatgactgggaaccggctgctctagatccgcaggagtacccgagagggctaacagtccagagaaaaagcagaaccagaaagaagaatggggagaaggaagtattcccgcctaaggaggcaccccgaaaggggaagcgaggccggaggcccagcaaaccccgactgattcctaggcagacgtccgggggccccatctgccctgactgcggctgtaccttccctgatcatcaggccctggagagccacaagtgcgcccagaatctaaaaaagccttacccttgcccagactgtgggcgccgcttttcctatccatccctgctggtcagtcaccggcgggcacactccggcgagtgcccctatgtttgtgaccagtgtggcaaacgtttctcccagcgcaagaacctctcccagcaccaggtcatccatacaggggagaagccctatcactgccctgactgtggtcgctgcttccggaggagccggtccttggccaatcaccggaccacacacacaggtgaaaaaccccaccagtgccctagctgtggacgtcgcttcgcctacccctccctgctagccatccaccagcgtacacacacgggagagaagccctacacttgcctcgagtgcaaccgccgcttccgccagcgcacggccctcgtcatccaccagcgcatccacacgggcgagaagccctacccgtgcccggactgcgagcggcgcttctcctcctcctctcgcctggtcagtcaccggcgtgtgcactctggggagcgtccctatgcctgcgagcactgtgaggcccgcttctcccagcgcagcacgctgctccagcaccagctcttgcacaccggagagaagccctacccctgcccagactgtgggcgtgccttccggcggagcggctccctggccatccatcgcagcacgcacacagaggagaagctgcacgcctgcgacgactgtggtcgccgctttgcctacccctcactgctggccagccaccggcgcgtgcactcgggcgagcggccctatgcctgcgacctttgctccaagcgttttgctcagtggagccacctggcccagcaccagctgctgcacacgggggagaagcctttcccctgcctcgagtgtggccggtgcttccgccagaggtggtctctggctgtccacaagtgtagccccaaggccccaaactgtagccctagatctgctatcgggggctccagtcagaggggcaacgcccattagaaggggaaggactgcctacgttcatttcattttatggagggtcccagaaaagggaaggaggagccccaggtcatacagggcagagtcagaactaaacccgggtctcctgctgcacagagctgaactttgtatcttgcaatgcgctggctgcctccctgtgcgtgtctggaacagtcccattaggagaggtgacgtcatttgcttaaagttttccaagctaccctatcctaaaatagtttgtgtggatatcagggctaaaagttctccccatctattttaggggctgtctgcttttctagtctgtccacacagggattacctgtcatcttgcatgcaatcaggagaatctcataggggcaggaccttcccctactctgcctcttcctccatactaggttggaaaaatctggtttagcccactttttgcaacactcctgccaagtggtcttctacccattgcttgaaaatctctcttgacagggagctcactacctcacaaggcaggtcatttcattgtgggatctatagaaggttaagtaccacattctcctctaaaccttgcctacgacatgtttaatacttcatctacatagcagcccttcagataatcacaaccactttgcccccaagttttcaggttaagtagcatgaatttggtcattccttaaagacagggtttcaatttccacacatgatctctgcaaacaggcactgggttttcagtgtcctttttgaagggtcatataaaaataaggtaacaccacagtgccactacaccttctggggctggacttgtttcagcagctttggttgcactgaatttgggggagctgcatggtaccaggggtttattgggttgcagatatataaatgccctaaacttaaaaaaaaaaaaaaaaaa

SEQ ID NO: 6081 - DNA, 1238 bp, Homo Sapiens
  NM_138448
ttgtacaccacaaatatacccaacttttatttgtcaattacactttaataaagctgggggaagccactctttttttgggcacagcatccggcttttatttactaactttgagaacagagtaccttgatcaattaaatggtagggagcgctgtggagacagcatcctccccagtccgggaagagaggcctaggatgcctggggcccagcggcctcttccctcctggcgtccccggctgccctcgctcccaggccccgcagtctcatttgccgcttccgacgcgtgaccccggcgcgctagcgtccgggaccggtgacaggcgcggggtgcgccaagcagtcccatgtgtcccctccctctcgcagccgccgcagtcgctgcgccccgagcccctctccggctcctcaacagagggctcgccgccgccatgtctaccgcccagtcactcaaatccgtggactacgaggtgttcggaagagtgcagggtgtttgcttcagaatgtatacagaagatgaagctaggaaaataggagtggttggctgggtgaagaataccagcaaaggcaccgtgacaggccaagtgcaggggccagaagacaaagtcaattccatgaagtcctggctgagcaaggttggaagccctagttctcgcattgaccgcacaaacttttctaatgaaaaaaccatctctaagcttgaatactctaattttagtattagatactaatagaagagaaaaattgtaacacactgaacaatagatactgtatgttcttaagactatgtatactagaataatagtagcagagtagggtgaaaaggaactttctgttctgaaagctaagcgactgtacgtgctactaaaaatgtctgacactgaaataattttactcaactatgttttcaacaagcaaaaatatagtattctaagattaaaatgtcattacaaaatatttagtgtgaacatttaatttaaacttgtctcatggaatctttaatttcaatgaacattacagcatatatatgttatttggcgagacatcaaataaagttaaccatttaaaaattattttcatatactgttgtctatgttgaattataaaatcctctgaataatttgttactacggttatttgttattaaactcttcaaaaagaaccagtgattagaaataaatgtgatgatcaatataaccataaaatattatcaacaaagagttttaaaaaaaaaaaaaaaaaa

SEQ ID NO: 6082 - DNA, 3760 bp, Homo Sapiens
  NM_138450
cacccaagtctgagttgctaaaaaatggagctgtcactgggccttgctctgccaggacctgcagagccggggacctctctgtggcaagcccagcaagatgactgctctgaggcgccctagggctgagggaggggccgtgacaccagccccgccccccagccacctgggaaaaggaagcacaaaaaggagaagcagcaacggctgctctgcttccttcccatctcgctcttgggtcatgcctggccagcagaaagcagctccataggggaggagagccacgcaggatctcacagctgcagtctaatagtaacacagaggattcagcagtggccaccatgggttctgtgaattccagaggtcacaaggcggaagcccaggtggtgatgatgggcctggactcggcgggcaagaccacgctcctttacaagctgaagggccaccagctggtggagaccctgcccactgttggtttcaacgtggagcctctgaaagctcctgggcacgtgtcactgactctctgggacgttggggggcaggccccgctcagagccagctggaaggactatctggaaggcacagatatcctcgtgtacgtgctggacagcacagatgaagcccgcttacccgagtcggcggctgagctcacagaagtcctgaacgaccccaacatggctggcgtccccttcttggtgctggccaacaagcaggaggcacctgatgcacttccgctgcttaagatcagaaacaggctgagtctagagagattccaggaccactgctgggagctccggggctgcagtgccctcactggggaggggctgcccgaggccctgcagagcctgtggagcctcctgaaatctcgcagctgcatgtgtctgcaggcgagagcccatggggctgagcgcggagacagcaagagatcttgatccagacagagcagcatatctttgctcatacaaactagaagaaccagctgatccttgagaaatttacgcttagtctatcaaacaagaaatgctggcttggcccggtggctcatgcctgtaatcccagcactgtgggagaccacggtgggggaatcccttgagcccaggagttggagagcaacatcacaacaccccatttctactaataatcaaaaaattggccgggcatggtggcatgtgcctgtagtcccagctacttgggaggctgaggcaggagaatcgcttgagcccaagaggtagaggttgcagtgagccaagatcgcgccactgcactccagtctgggcaacagagtgagaccctgtctcaataataataataataataatgatgatactctaagaaaaaaatctcaacatacttcatttaatagctcgttaccaagtgtgaatgaagcaatatgtcataatagagtagccactggttgcataataatagagacctaaattctcaaatagggaaagaggttttaaaatcaaatttgaggccaggtgcagtggctcatgggcggaggagggcagattacttgaggctaggagttcaagaccagcctggccaacatggtgaaaccccatctctactgaaaatacaaaaattaggcatagtggtgcacgcctgcagtcccagctactcaggaggttgaggcagaagaatcgcttgaacccaggaagtggaggttgcagtgagccgagattgtgctgctgcactccagcctgggtgaaaaagacaggctgtgtctccaaaaagaaaaaaaaaagtcaaattcaaatatcatctggacatgtcacaatggatcgcggatccttatgagtgattttccccagtggcccctggggatgtgccactgtcactcagaagggcaagctaggcagggcccatacaacagcaggggtctgcaggttagacgttccctgccctgggacgctcacccctgggcaagaggctggaagttcacaccatccaaaatttatccttgttttttttctgatgctaattagcctctcccgattttatgacatcttgtgttgatctttttcaaaaactcattttcttttttttccttctcttttctccttcttgtagcacatatctttcgttaaagatcagatcaataaaatattttatttattcattaatttaacaaaaaaaacagagcatttagtttgtggcaaaaacactgagctttcgaatatgaatcatgtgctttaggtgggaattgtgaattctgaagatacagatgacagtgacgaatgccttctgtctcatgattgacagggaaaaggaaggttgaccatagcatcctagaaggctcatcaggtgatcattacctagcatccatgaagcacctgaaattatttgcaaaatgttacgctttggaccatttttccggggaaggagatccagaactttttaccagattttcaaagacatctgtgactcccaaaagttaacaatcactgatgtggttgttgtatccctcatccaaccccagaacactttctgtaatctgagttttttaatggcaagtggcctatatttagcacctgttctcatgttaaacagctctgaatgttagatattctttcttatcctggactggttctctctatctctggagtaatgcagtataaattggccatcagtaccctcctaaaatctgagatctgccaggcccctcttctaacaccaggttaggcatgcttggttatttccagtacttgtcagtcaacatgtttcaagacgctgtgttagacactagggatgcaaagatgaatgagataaggcctcaggcctcatggaaggtgagacagtaaagacattactcccataaaaatgtgaggagagagactcagttcagcaactgtttattctgtttattgagcacttacttggaccaagcactgtggtcttggtgttttacatagactgtctctaattctcacaactctgcaaaatatatatattcccattttataaaactacaaactgaggctcagagaaggtgtgacctcttgttgcttgaggcacagagttataaagtaacatatctggaatttgaaatcagatctgtttagggctaatgctgcatttttctacaacatcatgcctctagaaggtttaagctaggtaggctttcagccagcagacatgatggggagagccttctaataagagggaagagactgcttggaagcatgaagggaggtgtaagaaagataagtaagtcagtgtacttgcaacagaggcttgggatgaagggtgggtgaagttgacatcacgatagaaaacaaaactggaatgggagtttaggtccaatttgggcaaggttgtttgaatttcaataatcaggggtttgggtcaaggaagaaaaatcatgggacttgccatttaggaggataattttgtggtagtgtggaggtgaaataaagagaaaagggaaccttggagctgggaaggcaggaaaccggctagatgaccatcacacagcaaaggagggagtggaagagagatgagaaaattgagagctattattaagaaaaacagttgagagaggaagaatttgaagagggctcaagattttgagtccacatgacagaaggactggaatgccatgaactggagaaggtgagcgctgaagaaccaggatgggacggggctggaacagctgggttcagcttttgcagggtgggtacgtgtttggttatagctgctttcagattgttccattatctgtactcccaacaaccctgccggatatatttgttggctttcactc

SEQ ID NO: 6083 - DNA, 2244 bp, Homo Sapiens
  NM_138458
aatgtttggagtctggtttccaggttgccgtttttgggggctctgggtgtggcggttgccgtagctgaaattggctgcaccatgtcggccttcgagaagcctcagatcatcgcccatatccagaagggcttcaactacacggtgtttgactgtaagtgggtgccctgcagcgccaaatttgtgaccatgggcaacttcgcacggggcaccggcgtcattcagctgtacgagatccagcacggggacctgaagctgcttcgggagattgaaaaggccaaacctattaaatgtggaacatttggtgcaacatctttacagcagagatatttagctactggagattttggtggaaaccttcatatatggaatttagaagctccagagatgccagtatattctgtaaagggccataaagaaattataaatgccatagatggcataggtggactaggaattggagaaggagcacctgaaattgtgactggcagccgagatggaactgtgaaggtgtgggacccaaggcaaaaagatgatcctgttgctaatatggaacctgtacaaggagaaaacaagagagactgttggactgtggcatttggcaatgcttataatcaagaagaacgtgttgtttgtgctggctatgacaatggggatatcaaactatttgatctcagaaatatggcattacggtgggagacaaacatcaaaaatggggtgtgtagcttggagtttgacagaaaagacataagtatgaataagttagtagccacatctctggaaggaaagttccatgtttttgacatgagaacacagcatccaaccaaaggttttgcctctgtttcagaaaaggctcataaatctactgtgtggcaggtccgacacctgccgcagaacagggagctctttctgacagctggaggcgccggcggccttcacctctggaagtatgaataccctattcagcggtcaaagaaagattctgagggaatagaaatgggagtcgcaggttctgtaagccttctgcagaatgttacgttgtccacccagcccatttcaagtttggattggagtccagataaaaggggtctctgcgtctgtagttcatttgaccaaacggtgagagtactgatcgttacaaagctcaataaaatttgacttcaagactttggacttgaggctgggcacggtggctcactcctgtaatcccagcactttgggaggccgaggcgggtggatcagaaggtcaggagatcgagaccatcctggctaacatggtgaaaccccgtctctactaaaaatataaaaaaaaatttgctgggtgtcatggcgggcatctgtagtcctagctacttgggaggctgaggcaggagaatggcgtgaacccgggaggcggaggttgcagtgagccgagattgtgccactgcactccagcctgggcaactgagcaagactgtctcaaaaaaaaaaaaaaaaaaaaagactttggacttgaaaccttccagaggaacactcacacaatttaagataggttctggagtcctctgaccctcattgaacaaagctggatttggctgatgataaaagaccccagccacaagcctctgggccagcctccagcctctctcggggcttgtttgctgacttgctgctgcacgtgggtatcagaagcaccaagtaaactatctccagggccagttcttttctctcccttccatttctaagtcaatagttgtctataattaaacatatttcagatttgttctgtgtccctgaagttccatattttatctttatgcttgtgttatgttttagtgtctataatgttgtggtgggaatcatttcatttggtttaaaagagtttgccttggaaaaactgaattaaccttcataaatacattttgagagatttcagtgtgagtaattttctggacataatattattgtataaaatatcaaaatggtgggccaggcgtggtagctcacgcctgtaattccagcactttgggaggctgaggcgggtgaatcacgaggtcaggaattcgagaccagcctggccaacatggtcaaaacccgtctctactaaaaatacaaaaaattagctgggcttagtggcgggcgcctgtaatcacagctacttgggaggctgaggcaggagaatcacttgaacccaggaggtggagattgcagtgagctgagattgcgccactgcactccagccctggcgacagagtgagactccgtctc

SEQ ID NO: 6084 - DNA, 1371 bp, Homo Sapiens
  NM_138462
gcggtggcggcggcggcggcggcgcgtggcaggtccggcgggcgcgaggcggcggcggaggcccgagcccggcccagcctcgtcccgcccggagcccgcctggctgctaccccgaccccggctccggtcccgtcctgtcccggcgcgccgcggcctcgccccggcccccgctcggcgcctcccgagggagcggcgctgccggccgagagcgcaggcccggccatgaccgacttcaaattgggtatcgtgcggctcggccgggtggccgggaagaccaaatacacgctgatcgatgagcaggacatcccgctggtggagagctactcctttgaggcccgaatggaagtggatgcagatggaaatggtgctaagatatttgcctatgcctttgacaagaaccgaggaaggggctctgggagactccttcatgagctgctgtgggagcggcaccgggggggcgtggccccgggcttccaggtggtgcacctcaacgctgtgaccgtggacaatcgcctggacaacctgcaactggtgccgtggggctggcggcccaaggctgaagagacctccagcaagcagagggagcaaagcttgtattggcttgcaattcagcagctgcctacagaccctatagaagaacagtttcctgtcctaaatgtgacccggtattataatgccaacggggatgtagtggaagaggaggagaactcttgcacctactatgagtgccactaccctccctgcacagtgattgagaagcagctccgggagttcaacatctgtgggcgctgccaggtggcccggtactgcggctcccagtgccagcagaaggactggcctgcccacaagaagcactgtcgggagaggaagcgtcccttccagcatgagcttgagccagagcgatgacgggcaggggagccacacatactcacagcccccgggctctaccctgggcacagcagagacagactggtggttgaacctggaggtgccaaaaaagccagctgcgggcccaggacagctgccgtgagactcccgatgtcacaggcagtctgtgtggttacagcgcccctcagtgttcatctccagcagagacaacggaggaggctcccaccaggacggttctcattatttatatgttaatatgtttgtaaactcatgtacagttttttttgggggggaggcaatgggaagggtagaaattacaaatagaatcatttgctgtaatccttaaatggcaaacggtcaggccacgtgactaaaaactgtcctgttgtcgaagcttctcccctgggccgccgggagccccgtggagcgcggcctgcacgggagttgtgtccacaaaggcaaagtaaaggggtggaatcatca

SEQ ID NO: 6085 - DNA, 1363 bp, Homo Sapiens
  NM_138465
ggccggacacttccgtccggcgcgcggcgtcctcctcccgctcggaaggtcccaggtgtgacaccttcagcaggtctcagggaagatggcagccctaggggacattcaggagtccccttctgtcccgtcccctgtcagtctctcatcaccggggacacctggaacccagcaccacgagcctcagcttcacctccatgggcatcaacatggctcccctggctccagccctaaggtgctctcccagccgtccgacctggatctccaagacgtagaggaagtggagatcggcagagacaccttctggcccgactccgagcccaagccggagcaggctccacgctctcctggctctcaggcccctgacgagggggcgggcggggcgctgcgcagcctcctgaggagccttccccgcagggcccggtgcagcgccggcttcgggcctgaatccagcgcggagcggccggcgggccagccgcctggggccgtcccttgcgcccagccgcggggcgcctggcgcgtgacgctcgtgcagcaagcagcggccgggcccgagggtgcgcccgagcgggctgccgagctgggagtcaacttcggtcggagccggcagggcagcgcgcggggggccaagccgcacaggtgcgaggcctgcggcaagagtttcaagtataactcgctgctcctgaagcaccagcgcatccacacgggcgagaagccctacgcctgccacgagtgcggcaagcgcttccgcggctggtcgggcttcatccagcaccaccgcatccacacgggcgagaagccctacgagtgcggccagtgcggccgcgccttcagccacagctcgcacttcacgcagcacctgcgcatccacaacggcgagaagccctacaagtgcggcgagtgcggccaggccttcagccagagctccaacctggtgcgccaccagcggctgcacacgggtgagaagccctacgcctgcagccagtgcggcaaggccttcatctggagctccgtgctcatcgagcaccagcgcatccacactggcgagaagccctacgagtgctccgactgcggcaaagccttccgcggccgctcgcacttcttccggcacctgcggacccacacgggcgagaagcccttcgcgtgtggcgcctgcggcaaggccttcggccagagctcccagctcatccagcaccagcgggtgcactaccgcgagtagccgggcgggggctcggggctcggcctcctacctgcccccaacccaccctccaccccgtcccccacggtgggcactgcccagcaccgcatgccacgtgtccggaataaattctttttgattgttggaaaaaaaaaaaaaaaaaaaaaa

SEQ ID NO: 6086 - DNA, 3448 bp, Homo Sapiens
  NM_138467
tcggccaccgctcgcttcaatatggctgcccccagggagagacgaggctaccatgaaggagccgagcgcagaccctgagtccgtcacccatggatcgcagcgcggagttcaggaaatggaaggcgcaatgtttgagcaaagcggacctcagccggaagggcagtgttgacgaggatgtggtagagcttgtgcagtttctgaacatgcgagatcagtttttcaccaccagctcctgcgctggccgcatcctactccttgaccggggtataaatggttttgaggttcagaaacaaaactgttgctggctactggttacacacaaactttgtgtaaaagatgatgtgattgtagctctgaagaaagcaaatggtgatgccactttgaaatttgaaccatttgttcttcatgtgcagtgtcgacaattgcaggatgcacagattctgcattccatggcaatagattctggtttcaggaactctggcataacggtgggaaagagaggaaaaactatgttggctgtccggagtacacatggcttagaagttccattaagccataagggaaaactgatggtgacagaggaatatattgacttcctgttaaatgtggcaaatcaaaaaatggaggaaaacaagaaaagaattgagaggttttacaactgcctacagcatgctttggaaagggaaacgatgactaacttacatcccaagatcaaagagaaaaataactcatcatatattcataagaaaaaaagaaacccagaaaaaacacgtgcccagtgtattactaaagaaagtgatgaagaacttgaaaatgatgatgatgatgatctaggaatcaatgttaccatcttccctgaagattactaagctttggttctgatgtgtcttggccgtaatgtttctagtaggttttataaagctgctcttcataagagtattttagtttgttgagtgtatcagccattcataagccagtaatgacaagtgcagagcttcaaactataactttgttgcccagaggatgtgcagttgtcatctaagctctcagcagtacccggcttatcctacgacttcacctgaaatgctatagttatccctacttttttaccagtttctcccagaagcacctgcttaataaatcaaagatgtttgaatggtgtcttattctgaaataacctgacctaagacaggtatttagattattttggatacattttgaaaagggatagcataaatattttaagtaaaaagacctttattttaaataatagtggatattttaatgctggaaattagcattatagttgatatgccagaaattatatctttggttgtgatttaaacttatgctataaactaaattaatgatgtaaatacatagttttaaacattcttttagggacatgtaacttttaagtatcacttcaataatacgtattattataggaacaaagatttgggaataattgattacaggtgaggaagtactggaattccagttcaaggagataccatttcatttaggactaaaaggacaagatacaagttcacatgatgggaaaaatcagaaaacctctcgcagacaaagggtatataatggatatgaggcatcaaaaagcatggtatagtcagtgatggggaatagtccagaaaggctgaaacacagcatgtgatgcgagtcaaggtagttgatgcccaactgtgaagggccgttctaatctagcatggaggtagacagtgtttccttaatatggctgcatatcagaattacctaggtcaggacgaggcatggagatgctactttaataggccctgccgcagatcttccaaaccagaatcttaatcctggagtctaggaatctttatttttcacacaactcatccaagtggttctgataaaatcagtccagcacttttagaacccactgataacagacttattcctggagacagcatttgaggaggaattgaagatttttctaatgaaaagaaaaagggtcacatgaacagatgttgcagtgtacctgtgccagggatttcatgtgtacactttataggagaataagcaagagcttaggtaagttatagtccttaccattgggtctaaggcagtttccaggaaagcatggcaactcgttcagctatgtaagttgaactctgtaccacttgggagggaacattcccctagatgacaatgtcagtggcactcgaagttgtgcagtgcacattcttatctaccaacatatacagcagtccttctgggaaggaaatttgggcaggaaagggaactcacagtgtcggaatgcctggagcatttcttctagtctggtggacagaatatgaaagtatctgcctggcagtgcagtaaatgaaaagagaagataaatgaataaaaaaaaaagttataaataacagtaggaaagagagagtgcaggtggaacgagcctatcctgtggtgaaatgacaacacattctgcagttttaaaatctaagaggctcattgacttttcttcattcatttaaattgatctccaagaaaactatgtattttaaagattccataaactgaatatatgaatgagaattaagaagagaggggctgcttcctaatctgtttatataaggtatagtatagtataatctgtttatataaggttagtagagaggagacaccaggtgctggccataaacctaagaagacattgaatcccattcactccttaacattccttaatatacattcatgagctacataacattttaatcatcaatgatggaccatataccatatacgatatggtggccccataagattataatggacctgaaaaattcctattgctagtgatgtggtcattgtaaagctgtagcacaacacattacccacgtttgtggtgacagtcatataaaagtatggtacatataattatgtacagtgcatacataatacttgataatatgttactggtttgtgtctttgctatgctttttatcattattttagggtatactacttaaaatgttaactgtaaaacagcttctgacaggtccttcaggaagtactccagaagaaggcattgttatcatagaaggtgacagcttcatgtgtgttattgcccctgaagaccttccagtggtacaagatgtggaggaggaagacagtgatactgaggattctgaccctgtgtaggcttaggctaatgtgtgtgtttatatcttagtttttcacaaaaaggtttttccaatgttaaaaaaaatatataaaaaagcttatagaataaggatataaagaaatattttgtacagctgtacaataagctaagcattattaccaaagagtcaaaaagttttaagaaattaaagtttataaaccaaatgttcattgtgagccaaggttaatttattgaagaaataaaacatttttaatgaaaaaaaaaaaaaaaaaa

SEQ ID NO: 6087 - DNA, 7996 bp, Homo Sapiens
  NM_138468
gcgacccgaggaggcggaagagcggcgccggcgacgtactgtaagacgatattactttaatcatcttcacatcagtatttatggaatagccacaggtgcctcatcctttagtaggagttaattatacatttactggccgagtaaacatctccgaatgtcactccatggattcctttgggcaacccagaccagaagataatcagtcagtagtcagaagaatgcaaaagaaatactggaaaactaaacaggtctttatcaaagcaacaggaaaaaaagaggatgagcacttggtggcgtctgatgctgaactggatgctaaacttgaggtttttcactctgttcaagagacatgcactgaacttctgaagataatcgagaaataccagctaagactcaatgttatatcagaggaagaaaatgagctagggctctttttaaaatttcaagcagaacgggatgcaactcaagctggcaaaatgatggatgccactggcaaggcactttgttcttcagccaagcaaagattggccctgtgtactcctctgtctcgtctgaagcaagaagtagcaacattcagtcaaagggcagtatctgataccttgatgacaattaatcggatggagcaggcacgcacagaatacagaggagctctactgtggatgaaagatgtatcccaagagctggacccagacaccttaaagcaaatggaaaagtttagaaaagtacagatgcaagtgagaaatagcaaagcttcttttgacaagttaaagatggatgtttgtcagaaagtggatttacttggagctagtcgctgcaatatgctatctcattcgctcactacctaccagagaacactgcttggattctggaagaaaacagctcgaatgatgtcccaaattcatgaagcctgtattggctttcatccgtatgattttgtagctctcaagcaactacaagacacgccaagcaagattagtgaagacaataaagatgaacaaataggcggttttcttactgaacagctcaataagctagttttgtctgatgaggaagcaagctttgagagtgaacaagcaaacaaagatcacaatgaaaaacattctcaaatgagagaatttggagcacctcagttttctaactctgaaaatgttgcaaaagatctacctgtagattcattggaaggagaagattttgagaaggaattctcatttctgaacaacctcctaagttctggttcttcaagtactagtgaatttacccaagaatgccagactgcctttgggagccccagtgccagtctcacatcccaggagccttccatggggtctgagcccctcgctcattcttctcgattccttccttcacaactctttgaccttggctttcatgtggctggagcgttcaacaactgggtctcccaagaggaatcagaactttgtctttcacacactgataaccagccagtgccttcacagagtccaaagaaattaacaagatcccccaacaatggcaaccaagacatgtcagcctggttcaatctgtttgcagacttggatccactttcaaacccagatgctattggacactcagatgatgaacttcttaatgcttgactgaagttataatgtcacttcagtggccttgagacatcaattttgcaacgtatttccttcgtggaaaggatttagattgtaacccgcacacaaaagcacggtgtttgtgaatataacacctgtcagccaactttagacagatggtaaagaccacatttgaataagtacacatctttcatatcttggatttgcagctgttggtactatgtggaaaatattagaaacttctatgtggaaaatattagaaactacagagtttgcgatatttagatactgaaatttatgtcaaaataacggctaggaataattctgtcaatatggagttgagcttatttctttggaaacccttttaagttgccttgctggctgtgagaattttatatgtggataacaaagatagatagatagcatgtaaattgggttgtggtttggggtcagtttttaaatgaaatagtagcgaggaggattttctgttttggaaaacaccattagaaccagaccagctttgttttgggttagagagagtaagatttgagaactcagtttgctttaatgaaatcacagagaaacttggtacttgtttttcttcatttggaggctaaaatgtaatgttttttcattcatacaaaataatggacactccctaattccattattaaatcttgaaggggaagtagcaggataattaatttgctaagcccatcctctgcagaaacagaaaaatctatcttcccatctcctaaaactcagaatgcacagtaatacttaaggcttgtacaagtgtcttcagacccactttttcatacacttgctatatagtagtatgcagtatttatattattcctgaaaataaaatgaggggagaatattccctaagcaactggcaatagtattcctgaaatacctagaaatttctatctgaatgagggagacacttatgaacaccttatccttacatatatttgcatacttatctcatattttgtgacataattatttaacccagaatactttctggcagacatacagaaagctctgtgtgatcaataagggagtgtctcatttttctacttccctctttctgtgggtgacatgatctgaggttctatttgattactaagcaaaatctgttacccctacagggtttagaacctaagtattagagaggaaggctatttaatggaagttagtgtaagctgataaaaacgtagctaccgtacacacacatcaatcactcaatttcctgtccttttaaattgcccaccctttaattttgaagcaatttcccaagtgtgtgtttgttttatatttgtcatccagtccattgcatttccataagaagacattttgactggctgggtgcggtggctcacgcttgtaatcccagcactttgggaggctgaggcaggcggatcacgaggtcaggagatggagaccatcctggctaacatggtgaaaccccgtctctactaaaaatacaaaaaattagccaggcgtggtggcacgtgcctgtagtcccagctactccggaggctgaggcaggagaatggcgtgaacccgggaggcggagcttgcagtgagctgagatggcgccactgcactccagcctaggcaacagagcaagactccgtctcaaaaaaaaaaaaaaaaaaaaaagacattttaactaagttattcacagtagcttccatgtgctcttagttctattctaaacaggcttatttagaaaaggattgcttgtaatgtttgtcatggtacatagaaaacattggaccagagtaggtaaaatgcagtccatgtcccatccatagccatctacaatagtaactgcccacaggctctccagaaaactactacaatggccaagtacagtataggctggaaagaccttatctgaaggtcagaaacattgactcagaaaaaaggtatgaagtctttccataaaatcttttcacaatattactcctatttcttttagattttaatgagccattacttatctcttcagaagacttaagtcttcctttatactcagtgaaatttcccagaatgtaatactgtcactgttctgccaagttccaatcaccaagatcatgattacgaatcccaatctgaattctatacccatggtgactctgatgctctcaacttttgagtgcctcaaaaaatgctaaaactttggctgggcatggtggctcacgcctgtaatcccagcactttgggaggccatggcgggtggaacatttgagggcatgagttcgagaccagcctggccaacatggtgaaaccctgtctctactaaaaatacaaaaattagccaggtgtggaggtacatgcctgtaatcccagctactcaggaggctgaggcagaagaattgcttgaacccaggcggcagaggttgcagtgagtcgagattgcaccactacactccagcctgggcaacagagagcgactctctcaaaaaaaaaaaaaaaaaaaaaaaaaaaagctaactttatgtcttgagagtttgtaccatttttctttgtagtggtcaccttgctaatgcattagttctgagatatttatctccctcacatgtgtgcaaggaagtccctgttatcgaatacagatactttaacaagcagacaaagcagaaacccaaagtccatactaggaacaccctaaattttccaaaagcaaaagttctcccgaaatggagacatacaagggacttttattattctgttactagtttctataacatttcttctttcaacagagtatatgtttcccatttaacccagagcaacattaacttccttagcaagtccagttctaacttccaacaagtccaaccactgtttttgaagagcatatcagtaactatattaagatgaaggtaaccacattcgtattttctcaagattagttatttgaagctcagcagtttttgtggtcagaaagaaattttgctctattaaaccaatactgctaatataaaaaaccaccacactgaagaaacgagggaaaggacgggataagcacagaacagagaatgactggttgctttttgtctcaatctagataatccattcaataagaagtaaattaattatccttaaccaatggtaggctgagaacaaccctcaaaatagatattttttatgttaaatggggagaaatatctatactttatgttatactggataaaaatgtgttttaagtctaaaaaaaaccagacgagctaaactttgcctagtgtgtctacaaccattttttaggagacgcaggaataccagggcataataagatcagattggtgtaattttgtatgtttttgaaatccttcattaattgtagaaccttgatatgattagaaacaaactgtatttcaacaaacaggtttcagtatttgcacactgaaaaagtgttttgtattttaactataaatatttcacgtatctgtatagaccatctagaaatgtagaggtcttacagcattagaacgaaggaagtttacatgtgctctatctatttttctgagcctcttttaataaagattgcaagaaggcataaaacaagagtttgtttcctgaagtttttagtacaattattgttttcctattcaaaaacttgggttttacctcaagatcatagtattaggaaagtacattgagttgatacggacatgggagaacgaaaataaaaccagggcaattaatatccttgtaaggccaggcgcggtagctcacgcctatataacagcactttgggaggccaaggcaggcagatcacttgaagttgggagtttgagaccaccctggccaacatggtgaaaccccatctctatgaaaaatataaaaattagctgggcatggtggcagatgcctgtaatcccagctacttgggaggctgaggcaggagaatcgcttgaacccgggaggtggaggttgcagtgagctgagatcaggccatgcactccagcctgggtgacagagtgagactccgtctcaaaagaaaatccttgtgagatgaattcgttcttatttcatatacaaggggactatgtaagatatgggaaataatataatgtacgttatttatgtaaatactttcagtaacaaaaactaacaaatatcaaaaatctgagcctagacacaaacaattaaatataagccatagtatgtaacctgacttattgaaggcaggaataaaaagaagagagccagaattgattcagttatttttgtcttccatagtgttggcagggccctgcatttctctaccttgagcaatgaagcagtcccagaattttggaatatagaaattaggaaggaaaaacgaactttaaaatattaatttagtagaactgaaagtaatgcatttcatgcaacagtaaagtgcttaaacatggcaaagaaaactaagggacaagataagaaaaatggttggtaaagatgggtcacatccagaagcccaacataagctatttttccatctttttctgtaccatttaaaagactactaaagagttcaaaacaaactgtccttggcatttaaagtcaaaacatggttcttcactcagtggtgtaaattaactactcattggccaaagagtaaatacaaaaaggagatgaagttctgactggtgttgtgggtgagattttgcagtgtatgtttttacatttgtagtgtacgttttaaacttccggttttcttgctgcctcaacatctccacaaacaggctgtgagcacctggcccagtgtgatatgggtggcccctgccacaagtttcccttgctaccttgcccatgacctagtaacatttaaatgcaccagtgaaattctctttttcttgtgtgcttctccctgacccaaaggctcctgcccatgtcttaggcctctccgctccccacctgcttggctgagccccctcccatgtgaccccctctcagcatgcagtgactggtctctctaggacctgtgagtatattacaactttttttcctgtgtctctcctgtgatatctcttgtggctaaacctcactgaccataacctaaaaaaacacatacaaaaaacatgaaagaaaaagttgtttcttgagctggcctggacgaacggggagccaggggctcgaccctggctgttggaggcgcagtgaggcctggtctccggctgccagaccacgctgagcggagcgcgcggcaggctcgcctcagcgctgcggggaacgcgcgcgccgccgtccgcggtcgcccgtaggtgcctgcacgcgtcggggtcacggcctttggccgacaggagcgagaagactcaggagccgccccgcgccttcgatccggcgctgctggagttcctggtgtgcccgctctccaagaagccgctcagatatgaagcatcaacaaatgaattgattaatgaagagttgagaatagcttatccaatcattgatgggattcctaatattatcatattaggcagctaggatgacacatcaaagaagcaagaagtggagcagcgctagttcataatttaaaaaaataaaacagccaactcttcttagtaccatataccttttaaaacacagtggcaagtaataagcggaagagaagaatctttctgtctctttctacgttgactgttcttattccactggtttatttagcaggactgttccactcagcctctgtagaagaaaacttcccacagggctgcacttgcacagctagcctttgcttttacagcctgctcttgcctattaccataccggtgtatgtattcttccacctttggacctggatggttattaaactcttcatgcataactgatgcaactagagtcaatatgctgtatatattaatgatagctcttgggcatctatctctgaaagctcaaatggatggaatttagtttgtgggaaagaggctttgctttgagcatatcaggcttaggactgtggacggcttaagttgcagacgcttcttttattgtactcttgttctgcccgtgttttttgaaggctctgacataactgctttatcagaagaaacattttgacagtgtcttgttggagataaacatccctaattgacatgtgatgactacttcttattccattcatctaagagtcattgaaattttgttttctttgtttgtttagcttcaaggtctttggtagtcacatgttagggatgactgaaataattccaaaggagtgatgttggaatagtccctctaagggaaagaaatgcatttgaacgaatgtgatataaaaccacataatcaaatagaaatttcatgtacttacaaaaatttagtttgtaaaattaccttcatttctttgacattaaatgcttatattagcaataaagatgttgacactttctcataaaaaattt

SEQ ID NO: 6088 - DNA, 1548 bp, Homo Sapiens
  NM_138484
gaatgtggcggcggtagttccaggcgacggcggacggtggtacggtcctggagggcccagtgcgcggggctagccgtggctggagagcttcgaagagccttgaaatgtgaggaggaggaagatagctgttgcagaagtagtggccaaggcaaaagatggccaaggaaagatgcctgaaaaagtcctttcaagatagtcttgaagacataaagaagcgaatgaaagagaaaaggaataaaaacttggcagagattggcaaacgcaggtcttttatagctgcaccatgccaaataatcaccaacacttctacactgctgaaaaattaccaagacaacaacaaaatgttagttttagctttggaaaatgaaaaatccaaagtgaaagaagcccaagatatcatcctacagctgagaaaagaatgttactatctcacatgtcagctatatgcattgaaaggaaaacttacatcacaacaaacagtagaacctgctcagaaccaggaaatatgttcctctggaatggaccccaatagtgatgacagctccagaaatttatttgtgaaggatttaccgcaaattcctcttgaagaaactgaacttccaggacaaggagaatcatttcaaatagaagctacaccacctgaaactcagcagtcacctcatcttagcctgaaggatatcaccaatgtctccttgtatcctgttgtgaaaatcagaagactttctctttctccaaaaaagaataaagcaagcccagcagtggctctgcctaaacgtaggtgcacagccagcgtgaactataaggagcccaccctcgcttcgaaactgagaagaggggacccttttacagatttgtgttttttgaattctcctattttcaagcagaaaaaggatttgagacgttctaaaaaaagagccctggaggtatcacctgccaaagaagcaatttttattttatattatgttcgagaatttgtttcgagattcccagactgtaggaaatgtaaacttgaaacccacatctgcttgaggtaaagtccacgggcttcacatccttagaaaacttttttagtccatgcattcactaatgtatgcagacctttaatagattctagctttatgtgttgggggagagatggaggggtgttgacagtctgtttcactcagcctacatacataataaaatctaagccctttaattagagatagcaactttcccagggtgaccgaggaatcagtacgtgttgaacccctcttttaagtttccttttggttgtgtcacttggagattgccttttctttcttgtaagctcagctgtgtcctcaaatatattgcattttacccagcatttccaggtgttttcaggggtcaaagtttttaagttatcttagtctttgatattgtgtaagcgaaattctccaatcccatctcctagatgatttttttttaaatcacaaaatgtgattatgcttaacagctgtttcctgtttctcttaaaataaaatccatttcctatttctcttaaaataaaatccattattcttaaaa

SEQ ID NO: 6089 - DNA, 2626 bp, Homo Sapiens
  NM_138499
gcgggggcggcctgggacgcggcgggagcatggagccgcgcgccggctgccggctgccggtgcgggtggagcaggtcgtcaacggcgcgctggtggtcacggtgagctgcggcgagcggagcttcgcggggatcctgctggactgcacgaaaaagtccggcctctttggcctacccccgttggctccgctgccccaggtcgatgagtcccctgtcaacgacagccatggccgggctcccgaggagggggatgcagaggtgatgcagctggggtccagctccccccctcctgcccgcggggttcagccccccgagaccacccgccccgagccacccccgcccctcgtgccgccgctgcccgccggaagcctgcccccgtaccctccctacttcgaaggcgcccccttccctcacccgctgtggctccgggacacgtacaagctgtgggtgccccagccgccgcccaggaccatcaagcgcacgcggcggcgtctgtcccgcaaccgcgacccggggcgcctcatcctcagcaccatccgcctgcggccgcgccaggtgctctgtgagaagtgcaagagcacgctgagccccccggaggccagccccggacccccagccgcgcccagggcccgcaggaggctgggcagcggcccggacagggagctccgcaagccggaggagccggagaacggcgagcccacggctgcggccaccgccaggaggagcaagagggagaggcgcgaggaggacagggccccggcagagcaggtcccgcggagcccggtcatcaagatctcctacagcacgccccagggcaagggagaggtggtcaagatcccctcccgcgtgcacggctctctggagcccttccgtccccagcaggccccgcaggacgacggcagccaggaccccgaggtgctggacagagagtcccgggaccggccgtcctgcgcgccctcggcctccatccccaagttgaaactgacacggcctgtgccggccggcgcggacctgccgccccctaagatccgcctgaagccccaccgtctgggggacagcgagcacgagcccgtgtaccgggccgagctggtgggggagctgaacgggtacctgcgggacagctcgccggcgccctgtgcggacggccctgccggtgggctggcggacttgtcttctggaagttcgggtgaggacgatgacttcaagagctgtccccagggtccacagggacgcgagggcttggcttttctcgtcagctgccctgaggggagagcggactgtgccagtgagtcggcgtgcagcagcgacagcctggacgaggccagatcgtccggctcggaagggacgccggcagacacgggtgacctctcgcctggccacggcgcgtcagcgccctcggtgtccagagaggctcgccaaacggtgccgcccctgacggtcaggctgcacacacagagcgtgtcggagtgcatcacggaggacggcaggactgtggccgtgggggacatcgtctggggtaagatccatggttttccttggtggccggcgcgtgttcttgacatcagtctcggccagaaggaggacggagagccgtcttggcgagaagcgaaggtctcgtggtttggttctccgactacgtcgttcttgtctatttcaaaactctcccctttctctgaatttttcaaactgagatttaatcgtaagaagaaggggatgtatcggaaagctataaccgaggctgcaaatgccgcaagacacgtggccccggaaatcagggagctcttaacccagtttgaaacgtaactggttccctgaccaggtcaccgacgatgagggcgcacctgctgtcctggagcttccgatctctgttcggggaccctgtgagccttctggccggctgcgtgcagagcccactgggcacggtggtcggcctggtgtgaggccccccggggaccggcagtgtgtccagggaggggatggccctgagcccagcggctcctcccgctgagtgtatttcttcccaccactcagcgcatggctgccctggctcacgaggcagtcgggactcgtgacttgctggctgctggctgctgctgcctcgcgcgctggggttccatggaggaactgggcctgccgccccggcctcacctgctgcccgcatgctggggtcccatggaggaaccaggcctggcgccccggcctcgcccagcggctggtgtgggcagctgttccctgcctcgcagtgtcctggaggcagctgtctcgcagactcagcttggtctcccgcaggcttcagaaaaacccaattgcacgtgtgggattcttccccagcccttgggtgcggggtctctgtgcacttgagagctgggggacccacccaccgtctcccactccaagttcatcccagagcgtggggcccgctgggcacctggcacctggcctgcagatgctgctacgagtgaccagtgctgtgtggaggaggccaagggcggcccctgggaaaccgggcttcaacagtacaaggaaaagaaacttgctctgttttgtaagagcgtgttccttttcctcttttttgtcactttaaagaccaaaaagaataaagaaagaaaagaaaaaaaaaaaaaaaa

SEQ ID NO: 6090 - DNA, 1197 bp, Homo Sapiens
  NM_138501
ggggcggggcggacgcagagccgcgtttagtctatcgctgcggttgcgagcgctgtagggagcctgtgctgtgccgcgcagttaggcagcagcagccgcggagcagtagccgccgtgggagggagccatgaagcattacgaggtggagattctggacgcaaagacaagggagaagctgtgtttcttggacaaggtggagccccacgccaccattgcggagatcaagaacctcttcactaagacccatccgcagtggtaccccgcccgccagtccctccgcctggaccccaagggcaagtccctgaaggatgaggatgttctgcagaagctgcccgtgggcaccacggccacactgtacttccgggacctgggggcccagatcagctgggtgacggtcttcctaacagagtacgcggggccccttttcatctacctgctcttctacttccgagtgcccttcatctatggccacaaatatgactttacgtccagtcggcatacagtggtgcacctcgcctgcatctgtcactcattccactacatcaagcgcctgctggagacgctcttcgtgcaccgcttctcccatggcactatgcctttgcgcaacatcttcaagaactgcacctactactggggcttcgccgcgtggatggcctattacatcaatcaccctctctacactccccctacctacggagctcagcaggtgaaactggcgctcgccatctttgtgatctgccagctcggcaacttctccatccacatggccctgcgggacctgcggcccgctgggtccaagacgcggaagatcccataccccaccaagaaccccttcacgtggctcttcctgctggtgtcctgccccaactacacctacgaggtggggtcctggatcggtttcgccatcatgacgcagtgtctcccagtggccctgttctccctggtgggcttcacccagatgaccatctgggccaagggcaagcaccgcagctacctgaaggagttccgggactacccgcccctgcgcatgcccatcatccccttcctgctctgagcgctcacccctgctgaggctcagcccctcaacccggtggcattctgggggaggagtggggcccacagctctccagcacccggaataaagcccgcctgccccagtcggaaaaaaaaaaaaaaaaaaaaaaaaaaaaaaaaaaa

SEQ ID NO: 6091 - DNA, 3976 bp, Homo Sapiens
  NM_138553
ttttttttttttttttgcttaaaaaaaagccatgacggctctcccacaattcatcttccctgcgccatctttgtattatttctaatttattttggatgtcaaaaggcactgatgaagatattttctctggagtctccttctttctaacccggctctcccgatgtgaaccgagccgtcgtccgcccgccgccgccgccgccgccgccgccgcccgccccgcagcccaccatgtctcgccgcaagcaaggcaaaccccagcacttaagcaaacgggaattctcgcccgagcctcttgaagccattcttacagatgatgaaccagaccacggcccgttgggagctccagaaggggatcatgacctcctcacctgtgggcagtgccagatgaacttcccattgggggacattcttatttttatcgagcacaaacggaaacaatgcaatggcagcctctgcttagaaaaagctgtggataagccaccttccccttcaccaatcgagatgaaaaaagcatccaatcccgtggaggttggcatccaggtcacgccagaggatgacgattgtttatcaacgtcatctagaggaatttgccccaaacaggaacacatagcagataaacttctgcactggaggggcctctcctcccctcgttctgcacatggagctctaatccccacgcctgggatgagtgcagaatatgccccgcagggtatttgtaaagatgagcccagcagctacacatgtacaacttgcaaacagccattcaccagtgcatggtttctcttgcaacacgcacagaacactcatggattaagaatctacttagaaagcgaacacggaagtcccctgaccccgcgggttggtatcccttcaggactaggtgcagaatgtccttcccagccacctctccatgggattcatattgcagacaataacccctttaacctgctaagaataccaggatcagtatcgagagaggcttccggcctggcagaagggcgctttccacccactccccccctgtttagtccaccaccgagacatcacttggacccccaccgcatagagcgcctgggggcggaagagatggccctggccacccatcacccgagtgcctttgacagggtgctgcggttgaatccaatggctatggagcctcccgccatggatttctctaggagacttagagagctggcagggaacacgtctagcccaccgctgtccccaggccggcccagccctatgcaaaggttactgcaaccattccagccaggtagcaagccgcccttcctggcgacgccccccctccctcctctgcaatccgcccctcctccctcccagcccccggtcaagtccaagtcatgcgagttctgcggcaagacgttcaaatttcagagcaacctggtggtgcaccggcgcagccacacgggcgagaagccctacaagtgcaacctgtgcgaccacgcgtgcacccaggccagcaagctgaagcgccacatgaagacgcacatgcacaaatcgtcccccatgacggtcaagtccgacgacggtctctccaccgccagctccccggaacccggcaccagcgacttggtgggcagcgccagcagcgcgctcaagtccgtggtggccaagttcaagagcgagaacgaccccaacctgatcccggagaacggggacgaggaggaagaggaggacgacgaggaagaggaagaagaggaggaagaggaggaggaggagctgacggagagcgagagggtggactacggcttcgggctgagcctggaggcggcgcgccaccacgagaacagctcgcggggcgcggtcgtgggcgtgggcgacgagagccgcgccctgcccgacgtcatgcagggcatggtgctcagctccatgcagcacttcagcgaggccttccaccaggtcctgggcgagaagcataagcgcggccacctggccgaggccgagggccacagggacacttgcgacgaagactcggtggccggcgagtcggaccgcatagacgatggcactgttaatggccgcggctgctccccgggcgagtcggcctcggggggcctgtccaaaaagctgctgctgggcagccccagctcgctgagccccttctctaagcgcatcaagctcgagaaggagttcgacctgcccccggccgcgatgcccaacacggagaacgtgtactcgcagtggctcgccggctacgcggcctccaggcagctcaaagatcccttccttagcttcggagactccagacaatcgccttttgcctcctcgtcggagcactcctcggagaacgggagcttgcgcttctccacaccgcccggggagctggacggagggatctcggggcgcagcggcacgggaagtggagggagcacgccccatattagtggtccgggcccgggcaggcccagctcaaaagagggcagacgcagcgacactttctccaacctctttctaggttcttcacacacccccattcggcgtagtacccagagagctcaagatgtgtggcagttttcggatggaagctcgagagcccttaagttctgagaaaatttgaagcccccaggggtggggtggacgcgtgccgcccagtcgacgtcagcgtggtctgtcatcctgctagtttgtgatgttttctgacagtagcctccaagaagccgttgtgcgaagacagagtcctgcagagtccttccagcctaggcctgcagcgccattttatttatattttttaataaaaagtaaaaacaaaaaaacagacccacattggaacagtgaatcagtcccatagagagggcccgtggaccatcgctgtcatgagtgatgccctggcccttctgaaaccagccaacctaattacctgtattgtggaaatgcgcatgagtccccaaccccttgtttctatacattctatgttgtcttttaaaaagtgtgcttaacattgacacaataaatgttggagctttaggtggtgtttgcttgttctttaatttttaatgcttataagacaatgaggctgcttatgattttgtacttctgtacctgtttcctacagacacccatcgggtgggtaggaggaacagatttgagaaatgggcaggagatgtaggaggggaactaggttaccgcttatcagatggcataaattttcaaggagaatcaaaatgcaaaacttgggaataaatcatagcaatatcataattaatgtagtagtaatattgctgtttattaatgctgaagtgtggttttcctaactgtctgacttataatttgcataccattaaataatgcataatatggcacgccgaatcctgtttttcaaatatatgcttttggtggctaccatgcaggatttgaatttgtcttttaatttagcttaggaaagaacatcactgggcgagcggtaaatcctaaagaaggtgataaatgtcagtagtttcttattaaatattctaattttaggttcccaaaccttcaggaaatatatcttaatgcagacaaacaaacataaaacttctttagtacttacatcaggaaatttggggcagattttagaggggggaaattataggaggaaagaagttcacatcagaacagacaatcacagcaatgctctattccttagaaattagtgccacaaataagttacatctacaaacaggtggtaaaaattctttctggcccagttaatttgcacagaacttttctcagtttggtattttttactgcttggagatccagaagagaattagaaacaacatagcaaattaaaataggtttgtcaataatagagctcagacacctgtgtgctgtagattcacatacaggccgtgaacctaagtggggaaaatcctacctatccaccttctggctagattacctagcttagtgaaaagatagccaaataattggcatgtgaattatttcctgcttattcataataaataatgactgtcta

SEQ ID NO: 6092 - DNA, 3078 bp, Homo Sapiens
  NM_138570
cgccgcggcggcagctgagttgggctgaggtgtccctagctggctctgcggctcttccgggtctgggctcggagattcacaggcggcccgcgaggccgagcgagggacgcatggccctgaggcggccgcagggcttggcggggtccggaggttgacctcgcccccgcagccggccttcgaggctgcctcctccaggcagcctctggggcccgcgcccgcgcctgctcaggctcccgtgttcaggctgcccatcccctccccaccggcgtcccggacgttgggacctgtgaccgtggcctcgggctgggcttccaaagccggccgcagcccggcgacccccgaggcctctcgccccgggcccctagacctctcactatgaccgcggccgccgcctccaactgggggctgatcacgaacatcgtgaacagcatcgtaggggtcagtgtcctcaccatgcccttctgcttcaaacagtgcggcatcgtcctgggggcgctgctcttggtcttctgctcatggatgacgcaccagtcgtgcatgttcttggtgaagtcggccagcctgagcaagcggaggacctacgccggcctggcattccacgcctacgggaaggcaggcaagatgctggtggagaccagcatgatcgggctgatgctgggcacctgcatcgccttctacgtcgtgatcggcgacttggggtccaacttctttgcccggctgttcgggtttcaggtgggcggcaccttccgcatgttcctgctgttcgccgtgtcgctgtgcatcgtgctcccgctcagcctgcagcggaacatgatggcctccatccagtccttcagcgccatggccctcctcttctacaccgtgttcatgttcgtgatcgtgctctcctctctcaagcacggcctcttcagtgggcagtggctgcggcgggtcagctacgtccgctgggagggcgtcttccgctgcatccccatcttcggcatgtccttcgcctgccagtcccaggtgctgcccacctacgacagcctggatgagccgtcagtgaaaaccatgagctccatatttgcttcctcccttaatgtggtcaccaccttctacgtcatggtggggtttttcggctacgtcagcttcaccgaggccacggccggcaacgtgctcatgcactttccctccaacctggtgacggagatgctccgtgtgggcttcatgatgtcagtggctgtgggcttccccatgatgatcctgccatgcaggcaggccctgagcacgctgctgtgtgagcagcagcaaaaagatggcacctttgcagcagggggctacatgccccctctccggtttaaagcacttaccctctctgtggtgtttggaaccatggttggtggcatccttatccccaacgtggagaccatcctgggcctcacaggagcgaccatgggaagcctcatctgcttcatctgcccggcgctgatctacaagaaaatccacaagaacgcactttcctcccaggtggtgctgtgggtcggcctgggcgtcctggtggtgagcactgtcaccacactgtctgtgagcgaggaggtccccgaggacttggcagaggaagcccctggcggccggcttggagaggccgagggtttgatgaaggtggaggcagcgcggctctcagcccaggatccggttgtggccgtggctgaggatggccgggagaagccgaagctgccgaaggagagagaggagctggagcaggcccagatcaaggggcccgtggatgtgcctggacgggaagatggcaaggaggcaccggaggaggcacagctcgatcgccctgggcaagggattgctgtgcctgtgggcgaggcccaccgccacgagcctcctgttcctcacgacaaggtggtggtagatgaaggccaagaccgagaggtgccagaagagaacaaacctccatccagacacgcgggcggaaaggctccaggggtccagggccagatggcgccgcctctgcccgactcagaaagagagaaacaagagccggagcagggagaggttgggaagaggcctggacaggcccaggccttggaggaggcgggtgatcttcctgaagatccccagaaagttccagaagcagatggtcagccagctgtccagcctgcaaaggaggacctggggccaggagacaggggcctgcatcctcggccccaggcagtgctgtctgagcagcagaacggcctggcggtgggtggaggggaaaaggccaaggggggaccgccgccaggcaacgccgccggggacacagggcagcccgcagaggacagcgaccacggtgggaagcctcccctcccagcggagaagccggctccagggcctgggctgccgcccgagcctcgcgagcagagggacgtggagcgagcgggtggaaaccaggcggccagccagctggagggtaaggcctccgccctacagccgcctgcctcaggcccagggagcggcagccccctcccccagccctggggtgatgcccaggtcatcctcgggagccctgccaggccccccttctctttccagccgcctgctgagcagacccctcggagagctttctgctcccttcccatcagcagcttgctttctgggaaccttttatctgccttactcccctttaaacacctgcggcatcgtcacatggcttgtgattaccgttttatctcccttgctcccctttaaaacacctgcggcattgtcacttggcttgtgattaccatttcgtctttaaagcaggtttgttaacagttttaacactcggagtatttaaagccagccaggtgtgggcgtgcctgcacccagatgtggaggtttattttaaggctgtgccccaaggggacccagtttgggggtggctgtgcccgccctggtcctagcatagccctggcccagagcactgctcccacaccctcgggcctcggagctcggctgtgttcatctacagggatctgtcacctgtccctccaggaaagctccttacgcctttgctctcctgagaataaaacttgctctgaatcctcctccaaaaaaaaaaaaaaaaaa

SEQ ID NO: 6093 - DNA, 3396 bp, Homo Sapiens
  NM_138571
cattaccaacgaggcgcaggggtcaggacgactctcggcagcgccattgcgcgccctctagtggcagccggttttgaggccggcctccggctttgaagttcctcaccgcgtctccttccctctccccaaagcctggatcaccgcccagcgtcaggcgaggggcgacgtctcgaggtaaaacggaggaggtgcgggacgcggagactgcgcgggcccggtagccctggagaggccgaggctctaggccgcgaggggcgggtgcaatggcggaggaacaggtgaaccgcagcgccggcctggcccccgactgtgaggcctcggcgactgcagaaactacggtttcctcagtggggacctgtgaagccgctggcaagtcaccagagcccaaggactacgacagcacctgcgtgttctgccggatcgcggggcggcaggacccgggcaccgaactcctgcactgcgagaatgaggacctaatttgcttcaaagatatcaaaccagcagcaactcatcattatcttgtggtgccaaagaagcatattggaaactgcagaactctaaggaaagatcaagtagaactggttgagaacatggtaactgttggaaaaaccattcttgaaagaaataatttcactgacttcacgaatgtgaggatgggttttcatatgccaccattctgttccatttcccacttgcaccttcatgttctggcaccagtggatcagcttggcttcttatccaagttggtttatagagtcaattcctattggtttatcacagctgatcacttgattgaaaaactaagaacatgaaaatgtcaagagtggaagatttttctaatcttggttcagcatgaagtggtatttaggtcccttttaagtctaattgcaattttaagatttgttgggttttatgagaggctgttacttagtggccttaaatcttttctgaatgtctgtttcctaagatctgtgatacagttatgtgaatattttgttactgacttgtttcaatggttacttgtataaggattttatatatatgatactatagataaaatcctatttaagacaaattctgttaatcaacaagggctctgtatttttttaagttaaaatattttcatttctcagtaagtagtcagttataatagtgatttatttatgaagaataaactactatagaaagtactttgtgggaacctttattactgtgaaggagaaaaatagctatttcttgacagttctatagttatacacataaattttcaaaataaagaataccatactacacaatgatctctgattttgctgagggaaggaattatatatgtgccactttttcctcaaatttcagatgccagttttcactttttgaagcattgcatctttttaataaatctatcctgaaagctatataatatatataatttatatcaatgaatttacaataactatcaaattggctatcagaattcactgtaatggaattttgcctctaataacataaagggggaagaaacataaagtggttctcttaataaaactagcagaaaatgttgctttatggcatgtttttgtatcaaagagaaatcagaggttaaactttgcttttatcatgaaaagggcctgatttgaaggtagagataggcttagatgagaaaaattgataacgcaatgttaatactattgatatttcataggtatattttgttagaaattggttttttggtgctaatctataggcacaatagtgaatatgaatgaagagtaggtgctgcaagttaatcctacattgtgccagtgtatattagtaccatgtaaatgaatatgaataaatgaacatgaggattaacgaactgttgaaaataggctgagatactagttttctttcttttttagagggggcatgatattaaagatagttttaagtaacaaattacttattacaaagttacaacatgtggaatcaatagttttatttgttcattaatttattcattcagcaaacatttgttgaacatttaatgtgtaccagatattgccaggatcaggaaataaagaactaaaaatggacattcagactgcaattgctagtacaggggtcaaacaaaatcagtgattagaatttagtgcgttaagttccctgatgccttcacagccagaagaggctgtgaagggataaacacttctgagagtgggtggtagtagaactgagtattcaagactgaatgttaggcaggtagacagtgactggttaggctgagaaacttacaagtattttcgttgagttctgcttccactattatttactttacaatggatatgaagttcagatttcatcttatttactgaaggtggagaaaggatgtggaagtaggggttatgggctctcaaaagtagatttagagagatttttttatcactgttttatgatatagttcactgagcacttacatagattaacagttacaagtttccataaatcagttagaatatgactagcttcagggaaggaattttcaacaactgcaatctttgattgttttactgtgggaacttgcagtgatataattgacaacattatttaacaataataggtaaagtaggccgggtgtggtggctcacgcctgtaatcctagcactttgggaggccgaggtgggtggatcacaaggtcaggagttcgagaccagcctggccaatatggtgaaaccccgtctcttctaaaaaaatacaaaaattagccgggtatggtggcgcatgcctgtagtcccagctactggggaggctgaggcaagagaattgcttgaactcgggaggcggaggtcgcagtgagccgagatcgtgccactgcactccagcctgggtgacagagtgagactttgtctcaaagaaaaaaaaacaataataggtaaagtatttaaggaattctcagatgccttatggacctcttcaaaaatgtggttagccaattgattcaacttttataggtttatatgctctcatgtaaacctatttgtttccgagatcagacgagatcgggcgcgttcagggtggtatggccgtagacaacctatttgttaaaaacccttggaaacacatcttttagtagaggttcttatttacttataaagattaataatcaaattactacaattaatatccatttagccttttcagtagtctaaatatttggtaactccctagccatctataacactagttcaaaacaaggctaattcataacctgtcttaaaaatgtttgaagtggtatcaagagcattgtttatgcatgttgtgatactatttgtggaactgtttaatgagctatttcaaactgctagaagaaaatgaaataaaaatggaaaaatactgtcaaaaaaaaaaaaaaaaaaa

SEQ ID NO: 6094 - DNA, 7816 bp, Homo Sapiens
  NM_138576
ttttcttgcttttcttcccttttttttctttttgcaaacaaaacaaaaaacagcatagaagaaagagcaaaataaagaagaagaagaggaggaagagagggaaagagaggaagggaaaaaaaacaccaacccgggcagaggaggaggtgcggcggcggcggcggcggcggcagcggcggcagcggcgcggcggcggctcggaccccctcccccggctccccccatcagtgcagctctccgggcgatgccagaatagatgccggggcaatgtcccgccgcaaacagggcaacccgcagcacttgtcccagagggagctcatcaccccagaggctgaccatgtggaggccgccatcctcgaagaagacgagggtctggagatagaggagccaagtggcctggggctgatggtgggtggccccgaccctgacctgctcacctgtggccagtgtcaaatgaacttccccttgggggacatcctggtttttatagagcacaaaaggaagcagtgtggcggcagcttgggtgcctgctatgacaaggccctggacaaggacagcccgccaccctcctcacgctccgagctcaggaaagtgtccgagccggtggagatcgggatccaagtcacccccgacgaagatgaccacctgctctcacccacgaaaggcatctgtcccaagcaggagaacattgcagggccgtgcaggcctgcccagctgccagcggtggcccccatagctgcctcctcccaccctcactcatccgtgatcacttcacctctgcgtgccctgggcgctctcccgccctgcctccccctgccgtgctgcagcgcgcgcccggtctcgggtgacgggactcagggtgagggtcagacggaggctccctttggatgccagtgtcagttgtcaggtaaagatgagccttccagctacatttgcacaacatgcaagcagcccttcaacagcgcgtggttcctgctgcagcacgcgcagaacacgcacggcttccgcatctacctggagcccgggccggccagcagctcgctcacgccgcggctcaccatcccgccgccgctcgggccggaggccgtggcgcagtccccgctcatgaatttcctgggcgacagcaaccccttcaacctgctgcgcatgacgggccccatcctgcgggaccacccgggcttcggcgagggccgcctgccgggcacgccgcctctcttcagtcccccgccgcgccaccacctggacccgcaccgcctcagtgccgaggagatggggctcgtcgcccagcaccccagtgccttcgaccgagtcatgcgcctgaaccccatggccatcgactcgcccgccatggacttctcgcggcggctccgcgagctggcgggcaacagctccacgccgccgcccgtgtccccgggccgcggcaaccctatgcaccggctcctgaaccccttccagcccagccccaagtccccgttcctgagcacgccgccgctgccgcccatgccccctggcggcacgccgcccccgcagccgccagccaagagcaagtcgtgcgagttctgcggcaagaccttcaagttccagagcaatctcatcgtgcaccggcgcagtcacacgggcgagaagccctacaagtgccagctgtgcgaccacgcgtgctcgcaggccagcaagctcaagcgccacatgaagacgcacatgcacaaggccggctcgctggccggccgctccgacgacgggctctcggccgccagctcccccgagcccggcaccagcgagctggcgggcgagggcctcaaggcggccgacggtgacttccgccaccacgagagcgacccgtcgctgggccacgagccggaggaggaggacgaggaggaggaggaggaggaggaggagctgctactggagaacgagagccggcccgagtcgagcttcagcatggactcggagctgagccgcaaccgcgagaacggcggtggtggggtgcccggggtcccgggcgcggggggcggcgcggccaaggcgctggctgacgagaaggcgctggtgctgggcaaggtcatggagaacgtgggcctaggcgcactgccgcagtacggcgagctcctggccgacaagcagaagcgcggcgccttcctgaagcgtgcggcgggcggcggggacgcgggcgacgacgacgacgcgggcggctgcggggacgcgggcgcgggcggcgcggtcaacgggcgcgggggcggcttcgcgccaggcaccgagcccttccccgggctcttcccgcgcaagcccgcgccgctgcccagccccgggctcaacagcgccgccaagcgcatcaaggtggagaaggacctggagctgccgcccgccgcgctcatcccgtccgagaacgtgtactcgcagtggctggtgggctacgcggcgtcgcggcacttcatgaaggaccccttcctgggcttcacggacgcacgacagtcgcccttcgccacgtcgtccgagcactcgtccgagaacggcagcctgcgcttctccacgccgcccggggacctgctggacggcggcctctcgggccgcagcggcacggccagcggaggcagcaccccgcacctgggcggcccgggccccgggcggcccagctccaaggagggccgccgcagcgacacgtgcgagtactgcggcaaggtgttcaagaactgcagcaacttgacggtgcaccggcggagccacaccggcgagcggccttacaagtgcgagctgtgcaactacgcgtgcgcgcagagcagcaagctcacgcgccacatgaagacgcacgggcagatcggcaaggaggtgtaccgctgcgacatctgccagatgcccttcagcgtctacagcaccctggagaaacacatgaaaaagtggcacggcgagcacttgctgactaacgacgtcaaaatcgagcaggccgagaggagctaagcgcgcgggccccggcgccccgcacctgtacagtggaaccgttgccaaccgagagaatgctgacctgacttgcctccgtgtcaccgccaccccgcaccccgcgtgtccccggggcccaggggaggcggcactccaacctaacctgtgtctgcgaagtcctatggaaacccgagggttgattaaggcagtacaaattgtggagccttttaactgtgcaataatttctgtatttattgggttttgtaatttttttggcatgtgcaggtactttttattattattttttctgtttgaattcctttaagagattttgttgggtatccatcccttctttgttttttttttaacccggtagtagcctgagcaatgactcgcaagcaatgttagaggggaagcatatcttttaaattataatttggggggaggggtggtgctgcttttttgaaatttaagctaagcatgtgtaatttcttgtgaagaagccaacactcaaatgacttttaaagttgtttactttttcattccttccttttttttgtcctgaaataaaaagtggcatgcagttttttttttaattattttttaattttttttttggtttttgtttttggggtggggggtgtggatgtacagcggataacaatctttcaagtcgtagcactttgtttcagaactggaatggagatgtagcactcatgtcgtcccgagtcaagcggccttttctgtgttgatttcggctttcatattacataagggaaaccttgagtggtggtgctgggggaggcaccccacagactcagcgccgccagagatagggtttttggagggctcctctgggaaatggcccgacagcattctgaggttgtgcatgaccagcagatactatcctgttggtgtgccctggggtgccatggctgctattcgctgtagattaggctacataaaatgggctgagggtacctttttggggagatggggtggcctgcagtgacacagaaaggaagaaactagcggtgttcttttaggcgttttctggcttgacggcttctctctttttttaaatcacccccaccacataaatctcaaatcctatgttgctacaaggggtcatccatcatttcccaagcagacgaatgccctaattaattgaagttagtgttctctcatttaatgcacactgatgatattgtagggatgggtggggtggggatcttgcaaatttctattctcttttactgaaaaagcaggggatgagttccatcagaaggtgcccagcgctacttcccaggtttttattttttttttcctatctcattaggttggaaggtactaaatattgaactgttaagattagacatttgaattctgttgacccgcactttaaagcttttgtttgcatttaaattaaatggcttctaaacaagaaattgcagcatattcttctctttggcccagaggtgggttaaactgtaagggacagctgagattgagtgtcagtattgctaagcgtggcattcacaatactggcactataaagaacaaaataaaataataatttataggacagtttttctactgccattcaatttgatgtgagtgccttgaaaactgatcttcctatttgagtctcttgagacaaatgcaaaactttttttttgaaatgaaaagactttttaaaaaagtaaaacaagaaaagtacattctttagaaactaacaaagccacatttactttaagtaaaaaaaaaaaaaattctggttgaagatagaggatatgaaatgccataagacccaatcaaatgaagaaataaacccagcacaaccttggacatccattagctgaattatcctcagccccttttgtttttgggacaacgctgcttagatatggagtggaggtgatttactgctgaattaaaactcaagtgacacaagttacaagttgatatcgttgaatgaaaagcaaaacaaaaacaattcaggaacaacggctaattttttctaaagttaaatttagtgcactctgtcttaaaaatacgtttacagtattgggtacatacaagggtaaaaaaaaaattgtgtgtatgtgtgttggagcgatctttttttttcaaagtttgcttaataggttatacaaaaatgccacagtggccgcgtgtatattgttttcttttggtgacggggttttagtatatattatatatattaaaatttcttgattactgtaaaagtggaccagtatttgtaataatcgagaatgcctgggcattttacaaaacaagaaaaaaaatacccttttcttttccttgaaaatgttgcagtaaaatttaaatggtgggtctataaatttgttcttgttacagtaactgtaaagtcggagttttagtaaatttttttctgccttgggtgttgaatttttatttcaaaaaaaatgtatagaaacttgtatttggggattcaaaggggattgctacaccatgtagaaaaagtatgtagaaaaaaagtgcttaatattgttattgctttgcagaaaaaaaaaaaatcacatttctgacctgtacttatttttctcttcccgcctccctctggaatggatatattggttggttcatatgatgtaggcacttgctgtatttttactggagctcgtaattttttaactgtaagcttgtccttttaaagggatttaatgtacctttttgttagtgaatttggaaataaaaagaaaaaaaaaacaaaaacaaacaggctgccataatatatttttttaatttggcaggataaaatattgcaaaaaaaacacatttgtatgttaagtcctattgtacaggagaaaaagggttgtttgacaacctttgagaaaaagaaacaaaaggaagtagttaaatgctttggttcacaaatcatttagttgtatatattttttgtcggaattggcctacacagagaaccgttcgtgttgggcttctctctgaacgccccgaaccttgcatcaaggctccttggtgtggccacagcagaccagatgggaaattatttgtgttgagtggaaaaaaatcagtttttgtaaagatgtcagtaacattccacatcgtcctccctttctctaagaggccatctctaagatgtcagatgtagaggagagagagcgagagaacatcttccttctctaccatcactcctgtggcggtcaccaccaccacctctcccgcccttaccagcagaaagcaatgcaaactgagctgctttagtccttgagaaattgtgaaacaaacacaaatatcataaaaggagctggtgattcagctgggtccaggtgaagtgacctgctgttgagaccggtacaaattggatttcaggaaggagactccatcacagccaggacctttcgtgccatggagagtgttggcctcttgtctttcttccctgctttgctgctttgctctctgaaacctacattccgtcagtttccgaatgcgagggcctgggatgaatttggtgcctttccatatctcgttctctctccttcccctgcgtttcctctccatccttcatcctccattggtcctttttttttctttcattttttatttaatttcttttcttcctgtctgttcctcccctaatcctctattttatttttattttttgtaaagccaagtagctttaagataaagtggtggtcttttggatgagggaataatgcatttttaaataaaataccaatatcaggaagccattttttatttcaggaaatgtaagaaaccattatttcaggttatgaaagtataaccaagcatccttttgggcaattccttaccaaatgcagaagcttttctgttcgatgcactctttcctccttgccacttacctttgcaaagttaaaaaaaaggggggagggaatgggagagaaagctgagatttcagtttcctactgcagtttcctacctgcagatccaggggctgctgttgcctttggatgccccactgaggtcctagagtgcctccagggtggtcttcctgtagtcataacagctagccagtgctcaccagcttaccagattgccaggactaagccatcccaaagcacaagcattgtgtgtctctgtgactgcagagaagagagaattttgcttctgttttgtgtttaaaaaaccaacacggaagcagatgatcccgagagagaggcctctagcatgggtgacccagccgacctcaggccggtttccgcactgccacaactttgttcaaagttgcccccaattggaacctgccacttggcattagagggtctttcatggggagagaaggagactgaattactctaagcaaaatgtgaaaagtaaggaaatcagcctttcatcccggtcctaagtaaccgtcagccgaaggtctcgtggaacacaggcaaacccgtgattttggtgctccttgtaactcagccctgcaaagcaaagtcccattgatttaagttgtttgcatttgtactggcaaggcaaaatatttttattaccttttctattacttattgtatgagcttttgttgtttacttggaggttttgtcttttactacaagtttggaactatttattattgcttggtatttgtgctctgtttaagaaacaggcacttttttttattatggataaaatgttgagatgacaggaggtcatttcaatatggcttagtaaaatatttattgttcctttattctctgtacaagattttgggcctctttttttccttaatgtcacaatgttgagttcagcatgtgtctgccatttcatttgtacgcttgttcaaaaccaagtttgttctggtttcaagttataaaaataaattggacatttaacttgatctccaaa

SEQ ID NO: 6095 - DNA, 2575 bp, Homo Sapiens
  NM_138578
ggaggaggaagcaagcgagggggctggttcctgagcttcgcaattcctgtgtcgccttctgggctcccagcctgccgggtcgcatgatccctccggccggagctggtttttttgccagccaccgcgaggccggctgagttaccggcatccccgcagccacctcctctcccgacctgtgatacaaaagatcttccgggggctgcacctgcctgcctttgcctaaggcggatttgaatctctttctctcccttcagaatcttatcttggctttggatcttagaagagaatcactaaccagagacgagactcagtgagtgagcaggtgttttggacaatggactggttgagcccatccctattataaaaatgtctcagagcaaccgggagctggtggttgactttctctcctacaagctttcccagaaaggatacagctggagtcagtttagtgatgtggaagagaacaggactgaggccccagaagggactgaatcggagatggagacccccagtgccatcaatggcaacccatcctggcacctggcagacagccccgcggtgaatggagccactggccacagcagcagtttggatgcccgggaggtgatccccatggcagcagtaaagcaagcgctgagggaggcaggcgacgagtttgaactgcggtaccggcgggcattcagtgacctgacatcccagctccacatcaccccagggacagcatatcagagctttgaacaggtagtgaatgaactcttccgggatggggtaaactggggtcgcattgtggcctttttctccttcggcggggcactgtgcgtggaaagcgtagacaaggagatgcaggtattggtgagtcggatcgcagcttggatggccacttacctgaatgaccacctagagccttggatccaggagaacggcggctgggatacttttgtggaactctatgggaacaatgcagcagccgagagccgaaagggccaggaacgcttcaaccgctggttcctgacgggcatgactgtggccggcgtggttctgctgggctcactcttcagtcggaaatgaccagacactgaccatccactctaccctcccacccccttctctgctccaccacatcctccgtccagccgccattgccaccaggagaaccactacatgcagcccatgcccacctgcccatcacagggttgggcccagatctggtcccttgcagctagttttctagaatttatcacacttctgtgagacccccacacctcagttcccttggcctcagaattcacaaaatttccacaaaatctgtccaaaggaggctggcaggtatggaagggtttgtggctgggggcaggagggccctacctgattggtgcaacccttaccccttagcctccctgaaaatgtttttctgccagggagcttgaaagttttcagaacctcttccccagaaaggagactagattgcctttgttttgatgtttgtggcctcagaattgatcattttccccccactctccccacactaacctgggttccctttccttccatccctaccccctaagagccatttaggggccacttttgactagggattcaggctgcttgggataaagatgcaaggaccaggactccctcctcacctctggactggctagagtcctcactcccagtccaaatgtcctccagaagcctctggctagaggccagccccacccaggagggagggggctatagctacaggaagcaccccatgccaaagctagggtggcccttgcagttcagcaccaccctagtcccttcccctccctggctcccatgaccatactgagggaccaactgggcccaagacagatgccccagagctgtttatggcctcagctgcctcacttcctacaagagcagcctgtggcatctttgccttgggctgctcctcatggtgggttcaggggactcagccctgaggtgaaagggagctatcaggaacagctatgggagccccagggtcttccctacctcaggcaggaagggcaggaaggagagcctgctgcatggggtggggtagggctgactagaagggccagtcctgcctggccaggcagatctgtgccccatgcctgtccagcctgggcagccaggctgccaaggccagagtggcctggccaggagctcttcaggcctccctctctcttctgctccacccttggcctgtctcatccccaggggtcccagccaccccgggctctctgctgtacatatttgagactagtttttattccttgtgaagatgatatactatttttgttaagcgtgtctgtatttatgtgtgaggagctgctggcttgcagtgcgcgtgcacgtggagagctggtgcccggagattggacggcctgatgctccctcccctgccctggtccagggaagctggccgagggtcctggctcctgaggggcatctgcccctcccccaacccccaccccacacttgttccagctctttgaaatagtctgtgtgaaggtgaaagtgcagttcagtaataaactgtgtttactcagtgaaaaaaaaaaaaaaaaaa

SEQ ID NO: 6096 - DNA, 4104 bp, Homo Sapiens
  NM_138615
ccgcctgcaccgccgccgcgccccattgggccgggtgctggggcatcccgggcgctgggtgccccgagcggctacgacgagtcccaggtggggccgggctccaggcccgcgggggagcggagccgtgcgccgcaggcgggctccgtgacgccgggtggggaacgccgggccggtggcgggacttccgccacgggactcggaaggggccgcgccgccgctgctgggagttgtagtccggccgtggttgggggagccgcggctcatgcgcggtgcacagaggcttgtttcacatctgtaacaacaggaggaggcccagcctcgtgatgaggaatagcaaggagagaattcagctccagttcaaaagcctacaaaatctgagactgtcattgcttttataaggattccagctttccctcctggccagaaatgttcagcctggactcattcagaaaagatcgggcccagcacaggcagcgtcagtgcaaacttcccccaccccgccttccacccatgtgtgtcaaccctaccccaggagggaccatctctcgagcttctagggacctattaaaagagttcccacagcccaaaaatcttctcaacagtgtgattggaagagccctcggcatctcacatgcaaaagacaaactagtctacgtgcacacaaatggaccgaagaaaaagaaagtcacactgcacataaaatggcccaagagcgtggaggtagaaggctatggcagcaagaagatcgatgctgagcggcaggctgcagctgcagcctgccagctgttcaagggttggggtctgctaggtccccggaatgagttgtttgacgcagccaaataccgagtgctagctgatcgctttggctcccctgccgacagctggtggcgtccggaacccaccatgccccctacttcctggcggcagctgaatccagagagtattcgaccagggggacctgggggcctatcccgctctttaggccgggaagaagaggaggacgaggaggaagagctagaagaagggaccatagatgttaccgacttcttgtccatgacccagcaggattcccacgctccactcagggactcaagggggagttcctttgagatgacagatgacgacagtgccattagggctctgacccagtttccacttcccaagaaccttctggccaaggtgattcagattgcaacgtcatcctccacagctaagaacctcatgcagttccatactgtgggcaccaagaccaagctgtctacactcaccctgctctggccctgccccatgacctttgttgccaaagggcgccgcaaagcagaggctgagaataaggcggcagccttggcctgcaagaaactgaagagcctgggcctggtggacaggaacaacgaaccgcttacacacgccatgtataacctggcctctttgcgtgagctgggtgagacccagcgccgaccatgcaccatccaggtgcccgagcccatcctccgcaagatagagaccttcctgaaccattaccctgtggagagttcatggatcgccccagaactccggctgcagagtgatgacatcttgcccttgggcaaggactcagggcctctgagtgaccctatcacaggcaagccctatgtgcccctgttggaagcagaggaggtacgtctcagccagagtctgctagaactgtggcggcggcgagggccggtctggcaggaggccccccagctacctgtggacccacatcgggacaccatcctcaacgccattgagcagcacccggtggtggtcatctctggggacacgggctgtgggaagaccacgcgcatcccccagctgttgctggagcgctatgtgaccgagggccgaggtgcccgctgcaatgttatcatcacccaacctcgccgcatctctgctgtgtctgtggcacagcgggtcagccacgaactgggcccctccctgcgccggaatgtgggcttccaggtgcggttggaaagtaagcccccatcccgaggcggggccctgctcttctgcactgtgggtatcctgctgcgtaagctgcagagcaaccccagcctggagggcgtgagccacgtcatcgtggatgaggtgcatgagcgggacgtgaacacagactttctgctgatcctgctcaagggcctgcagcggctcaacccggccctgcggctggtgctcatgagtgccacaggggacaatgagcgcttctcccgatactttggtggctgccccgtcatcaaggtgcctggcttcatgtacccagtcaaggagcactacctagaggacatcctggccaagttgggcaagcaccagtacctgcaccggcaccggcaccatgagtctgaggatgaatgcgcactcgatttggaccttgtgactgatctggttctgcacatcgatgctcgcggggaaccaggtgggatcctgtgcttcctgcctgggtggcaggagatcaaaggagtgcagcagcgcctccaggaggccctgggcatgcacgagagcaagtacctcatcctgccagtgcactccaacatccccatgatggatcagaaggccatattccagcagcctccagttggggtgcgcaagattgtcttggccaccaacattgctgagacttccatcacaatcaatgacatcgtgcatgtggtggacagtgggctgcacaaggaagaacgctatgacctgaagaccaaggtgtcctgcctggagacagtgtgggtatcaagagccaatgtgatccagcgccggggccgggcgggccgctgccagtccggctttgcctaccacttgttccctcgaagccggctggagaaaatggtccctttccaagtgccagagatcctgcgcacacctcttgagaacctggtgctgcaagcgaaaatccacatgcctgagaagacggcggtggagttcctgtccaaggctgtggacagtccaaacatcaaggcagtggacgaggctgtgatcttgctccaggagatcggggtgctggaccagcgggagtacctgactaccctggggcagcgcctggctcacatctccaccgacccccggttggccaaggccattgtgttggctgccatcttccgttgcctgcacccactactggtggtcgtttcctgcctcacccgggaccccttcagcagcagcctacagaaccgggcagaggtggacaaggtgaaagcactgttgagccatgacagcggcagtgaccacctggcctttgtgcgggctgtcgccggctgggaggaggtgctgcgttggcaggaccgcagctcccgggagaattacctggaggaaaacctgctgtacgcacccagcctgcgcttcatccacggactcatcaagcagttctcagagaacatttatgaggccttcctggtggggaagccctcggactgcaccctggcctccgcccagtgcaacgagtacagtgaggaggaggagctggtgaagggcgtgctgatggccggcctctaccccaacctcatccaggtgaggcagggcaaggtcacccggcaggggaagttcaagcccaacagcgtcacatataggaccaaatcaggcaacatcctgctgcacaagtcgaccattaacagggaggccacacggttacggagccgatggctgacgtatttcatggcagtcaagtccaatggcagcgtcttcgtccgggactcctctcaggtgcacccgctagctgtgctgctgctgaccgacggggacgtgcacatccgtgatgacgggcgccgggccaccatctcactgagcgacagtgacctgctgcggctggagggtgactcgcgtaccgtgcggctgctgaaggagctgcggcgggccctgggccgcatggtggagcggagcctgcgcagcgagctggctgcacttccccccagcgtacaggaggagcacgggcagctgcttgcgctactggcagagctgctgcgaggaccctgtggcagctttgatgtgcgcaagacagctgacgactgagccctgcttctgctggggctgtgtacagagtgcaaatgtttatttaaaataaagttctatttatcccttgtgaccaaaaaaaaaaaaaaaaaa

SEQ ID NO: 6097 - DNA, 1223 bp, Homo Sapiens
  NM_138617
atcgctccctcaagccctcaagtaggtgttggagagaggggtgatgcctggtgctggtggaacccctgcacagagacggacacaggatgagctctaagtacccgcggtctgtccggcgctgcctgcccctctgggccctaacactggaagcagctctcattctcctcttctatttttttacccactatgacgcttccttagaggatcaaaaggggctcgtggcatcctatcaagtcggccaagatctgaccgtgatggcggcccttggcttgggcttcctcacctcaaatttccggagacacagctggagcagtgtggccttcaacctcttcatgctggcgcttggtgtgcagtgggcaatcctgctggacggcttcctgagccagttccctcctgggaaggtggtcatcacactgttcagtattcggctggccaccatgagtgctatgtcggtgctgatctcagcgggtgctgtcttggggaaggtcaacttggcgcagttggtggtgatggtgctggtggaggtgacagctttaggcaccctgaggatggtcatcagtaatatcttcaacacttatgtgcacagtgcggtgttggcaggaggcgtggctgtgggtacctcgtgtcacctgatcccttctccgtggcttgccatggtgctgggtcttgtggctgggctgatctccatcgggggagccaagtgcctgccggtgtgttgtaaccgagtgctggggattcaccacatctccgtcatgcactccatcttcagcttgctgggtctgcttggagagatcacctacattgtgctgctggtgcttcatactgtctggaacggcaatggcatgtttgctcctaaatctcaaaatatggaaagcacctcatgtggctaaatattttgatgaccaagttttctggaagtttcctcatttggctgttggattttaagcaaaagcatccaagaaaaacaaggcctgttcaaaaacaagacaacttcctctcactgttgcctgcatttgtacgtgagaaacgctcatgacagcaaagtctccttatgtataatgaaacaaggtcagagacagatttgatattaaaaaattaaagactaaaaacttagtttaagagtcaatttaataagtttaaaataaatgtttagtttcattaggatgatgctatcaatattttcttggttacagacacattattaaagttttgggttaatttta

SEQ ID NO: 6098 - DNA, 4216 bp, Homo Sapiens
  NM_138636
agtttctcttctcggccacctcctgcatagagggtaccattctgcgctgctgcaagttacggaatgaaaaattagaacaacagaaacatggaaaacatgttccttcagtcgtcaatgctgacctgcattttcctgctaatatctggttcctgtgagttatgcgccgaagaaaatttttctagaagctatccttgtgatgagaaaaagcaaaatgactcagttattgcagagtgcagcaatcgtcgactacaggaagttccccaaacggtgggcaaatatgtgacagaactagacctgtctgataatttcatcacacacataacgaatgaatcatttcaagggctgcaaaatctcactaaaataaatctaaaccacaaccccaatgtacagcaccagaacggaaatcccggtatacaatcaaatggcttgaatatcacagacggggcattcctcaacctaaaaaacctaagggagttactgcttgaagacaaccagttaccccaaataccctctggtttgccagagtctttgacagaacttagtctaattcaaaacaatatatacaacataactaaagagggcatttcaagacttataaacttgaaaaatctctatttggcctggaactgctattttaacaaagtttgcgagaaaactaacatagaagatggagtatttgaaacgctgacaaatttggagttgctatcactatctttcaattctctttcacacgtgccacccaaactgccaagctccctacgcaaactttttctgagcaacacccagatcaaatacattagtgaagaagatttcaagggattgataaatttaacattactagatttaagcgggaactgtccgaggtgcttcaatgccccatttccatgcgtgccttgtgatggtggtgcttcaattaatatagatcgttttgcttttcaaaacttgacccaacttcgatacctaaacctctctagcacttccctcaggaagattaatgctgcctggtttaaaaatatgcctcatctgaaggtgctggatcttgaattcaactatttagtgggagaaatagcctctggggcatttttaacgatgctgccccgcttagaaatacttgacttgtcttttaactatataaaggggagttatccacagcatattaatatttccagaaacttctctaaacttttgtctctacgggcattgcatttaagaggttatgtgttccaggaactcagagaagatgatttccagcccctgatgcagcttccaaacttatcgactatcaacttgggtattaattttattaagcaaatcgatttcaaacttttccaaaatttctccaatctggaaattatttacttgtcagaaaacagaatatcaccgttggtaaaagatacccggcagagttatgcaaatagttcctcttttcaacgtcatatccggaaacgacgctcaacagattttgagtttgacccacattcgaacttttatcatttcacccgtcctttaataaagccacaatgtgctgcttatggaaaagccttagatttaagcctcaacagtattttcttcattgggccaaaccaatttgaaaatcttcctgacattgcctgtttaaatctgtctgcaaatagcaatgctcaagtgttaagtggaactgaattttcagccattcctcatgtcaaatatttggatttgacaaacaatagactagactttgataatgctagtgctcttactgaattgtccgacttggaagttctagatctcagctataattcacactatttcagaatagcaggcgtaacacatcatctagaatttattcaaaatttcacaaatctaaaagttttaaacttgagccacaacaacatttatactttaacagataagtataacctggaaagcaagtccctggtagaattagttttcagtggcaatcgccttgacattttgtggaatgatgatgacaacaggtatatctccattttcaaaggtctcaagaatctgacacgtctggatttatcccttaataggctgaagcacatcccaaatgaagcattccttaatttgccagcgagtctcactgaactacatataaatgataatatgttaaagttttttaactggacattactccagcagtttcctcgtctcgagttgcttgacttacgtggaaacaaactactctttttaactgatagcctatctgactttacatcttcccttcggacactgctgctgagtcataacaggatttcccacctaccctctggctttctttctgaagtcagtagtctgaagcacctcgatttaagttccaatctgctaaaaacaatcaacaaatccgcacttgaaactaagaccaccaccaaattatctatgttggaactacacggaaacccctttgaatgcacctgtgacattggagatttccgaagatggatggatgaacatctgaatgtcaaaattcccagactggtagatgtcatttgtgccagtcctggggatcaaagagggaagagtattgtgagtctggagctaacaacttgtgtttcagatgtcactgcagtgatattatttttcttcacgttctttatcaccaccatggttatgttggctgccctggctcaccatttgttttactgggatgtttggtttatatataatgtgtgtttagctaaggtaaaaggctacaggtctctttccacatcccaaactttctatgatgcttacatttcttatgacaccaaagatgcctctgttactgactgggtgataaatgagctgcgctaccaccttgaagagagccgagacaaaaacgttctcctttgtctagaggagagggattgggatccgggattggccatcatcgacaacctcatgcagagcatcaaccaaagcaagaaaacagtatttgttttaaccaaaaaatatgcaaaaagctggaactttaaaacagctttttacttggctttgcagaggctaatggatgagaacatggatgtgattatatttatcctgctggagccagtgttacagcattctcagtatttgaggctacggcagcggatctgtaagagctccatcctccagtggcctgacaacccgaaggcagaaggcttgttttggcaaactctgagaaatgtggtcttgactgaaaatgattcacggtataacaatatgtatgtcgattccattaagcaatactaactgacgttaagtcatgatttcgcgccataataaagatgcaaaggaatgacatttctgtattagttatctattgctatgtaacaaattatcccaaaacttagtggtttaaaacaacacatttgctggcccacagtttttgagggtcaggagtccaggcccagcataactgggtcctctgctcagggtgtctcagaggctgcaatgtaggtgttcaccagagacataggcatcactggggtcacactcatgtggttgttttctggattcaattcctcctgggctattggccaaaggctatactcatgtaagccatgcgagcctctcccacaaggcagcttgcttcatcagagctagcaaaaaagagaggttgctagcaagatgaagtcacaatcttttgtaatcgaatcaaaaaagtgatatctcatcactttggccatattctatttgttagaagtaaaccacaggtcccaccagctccatgggagtgaccacctcagtccagggaaaacagctgaagaccaagatggtgagctctgattgcttcagttggtcatcaactattttcccttgactgctgtcctgggatggcctgctatcttgatgatagattgtgaatatcaggaggcagggatcactgtggaccatcttagcagttgacctaacacatcttcttttcaatatctaagaacttttgccactgtgactaatggtcctaatattaagctgttgtttatatttatcatatatctatggctacatggttatattatgctgtggttgcgttcggttttatttacagttgcttttacaaatatttgctgtaacatttgacttctaaggtttagatgccatttaagaactgagatggatagcttttaaagcatcttttacttcttaccattttttaaaagtatgcagctaaattcgaagcttttggtctatattgttaattgccattgctgtaaatcttaaaatgaatgaataaaaatgtttcattttacaa

SEQ ID NO: 6099 - DNA, 16235 bp, Homo Sapiens
  NM_138694
acatttggctgggacacaaacgagttaggtgagttatagtctaacgtgagtgagttacctgcgtggtggctgcaggctgagctctaaccagataacatgtccacggattcttgacagagagaaataagatcacttagaaagaaaggatcatttctcccttgagtcacaaggagacagaaacagaaaaaaaagcacaaaagctatgctgctccaatcaaaactgaaaatgcttttaatgtctgagcaatcttaagagtattgatttaagtggacagaatgactgcctggctgatctctctgatgagtattgaagtactacttttggcagtacgtcacctgagtttacatattgaacctgaagaaggtagccttgcagggggaacgtggatcacagtcatttttgatggtttggagttgggtgttctttaccccaacaatggctctcaattggagatacacctggtgaacgtgaacatggtggtgcccgcactgcggagtgttccctgtgacgtctttcctgttttcttggatttgcctgtggtgacatgccggaccagatctgtgctgtctgaagcacatgagggtctgtacttcctggaagcatacttcgggggacagctggtaagcagtccaaatccaggaccacgagatagctgtactttcaagttttccaaggcgcagacacccatcgttcaccaagtttatccaccaagtggtgttccaggaaaactaatacatgtatatggctggattatcactggaagattggaaacttttgattttgatgctgagtacattgatagcccagtgatcttggaagctcaaggagacaaatgggttactccttgctctcttataaataggcagatgggaagctgttatcctattcaggaggaccatggtcttgggactctgcagtgccatgtggaaggcgactacatcggctcccagaatgttagcttctcagtatttaacaaaggaaagtcaatggtccacaagaaggcatggctgatcagtgctaaacaggatcttttcctataccagacacactcagaaatattatctgtgtttccagaaactgggagccttgggggaagaacaaacatcacaattacaggagacttttttgacaattctgcccaggttaccattgcaggcattccatgtgatattagacacgtgtctcccaggaagattgagtgcaccactcgggctccaggaaaagatgtgaggctcaccacccctcagccaggcaatcgagggcttctttttgaagttggagatgctgttgagggactggaactgactgaagccaccccagggtacaggtggcagattgtccctaatgccagttctccatttgggttttggtcacaggaaggacaacctttcagagcacggctcagtgggttctttgtggctccagagacaaataattacactttctggattcaggcagatagccaagcttccttgcatttcagttggtcagaggaaccaaggactaaggtgaaagtggcctccatcagcgtcggcactgctgactggtttgactcctgggagcagaatagggatgaagggacctggcagcagaagactcccaagttggagctgttgggtggagccatgtactacctggaagcagagcatcatgggatagccccaagcagggggatgaggattggtgtccagattcacaacacctggctgaatcctgatgtggtcaccacttacctacgggagaagcaccagatccgagtccgagcccagaggcttccagaagtacaggtgctgaatgtatcaggcagaggaaacttcttccttacttgggacaatgtctctagtcagccaatccctgcaaatgccacagcccatctgattcaaacaaccattgaggagttacttgcagtaaaatgcaaactggaacccctttggtctaacatccttctccggcttggatttgaacgaggcccagaagtttccaactctgatggggacctcaccagtgggacggagcccttctgtggcaggttcagcctccgtcagcctcgacaccttgtccttactcccccggctgcccagaagggctatcggctagatcagtatacacacctgtgtcttgcatacaaaggccacatgaacaagatcctgaagatgattgtgtccttcacaatcggctttcaaaacatggtaaagaataccacctgtgactggagtctcacgaggaccagccccgagagctggcagttcgattgcactgacctctgggagacttgtgtgcgttgcttcggggatctccagccccctccggcaaactccccagtgctggttcatcagatcaaccttctccctctggcccaggagacgggcctgttctatgtggatgaaattattattgcagacacaaacgtaacagtttctcaagctgattctggaacggctcgcccagggggcaatctggtggaatcagtctctgtggtgggatcccctccggtctacagtgtcacctcctggctggcggggtgtggcacggagctcccgctcatcactgcacgctctgtgcccactgaaggaacagaagagggatctggactggtcctggtgacgacacagagacgacagcggacaagtccacctctaggaggacactttcgcatccagcttcctaatacagtgatttctgatgtccctgtacaaatttctgctcatcaccttcaccagctcttacagaataatgccgatgacttcacatccaggtacctcaatgccagtgacttcactgtgaaggaggatctatacacttgctacgaacacgtgtggaccttgtcctggtccactcagattggggatttgcccaattttatcagggtctctgatgaaaaccttactggagtgaatcctgctgcagccacgcgtgtggtatatgatggtggagtttttcttggacccatatttggagacatgttggctactgccaaccagcatactcaggtggttgtgcgagtgaatgatgtaccagctcattgcccaggttcctgctctttccagtacctccaagggtcaactccctgtgtccattctgtgtggtactccattgatggtgacatcaacctaatgatttacattaccggaactggtttctctggtgactcccagttcttgcaggttacagtgaacaaaacgagttgcaaagttattttctcaaaccagaccaatgtagtctgtcagacagatttgctacctgttggaatgcatcggatcttgatgttggtgagaccctctggtcttgccatcagtgccactggagaagacctcttcctaaatgtgaaacctagactggatatggtggagccttccagagctgcggatattggagggctctgggccaccatccgaggctctagtttggaaggtgttagcctgatattatttggatcttactcgtgtgccatcaatgtcgctacaagcaattcaagcagaattcagtgcaaagttccacccagggggaaagatggacgcattgtgaatgtgactgtgatcagaggggactattctgcagttcttcccagagcatttacatatgtctcttccttaaatccagttattgtgactctgagcagaaacataagcaatatagcaggcggtgagaccctggtcattggagtggcgaggctgatgaactatacggatttggatgtggaagtccacgtccaggatgccttggctccggttcacacacagtcggcttggggcctggaggtggcactgcccccactgccagctggtctccacagaatttccgtctctatcaatggggtcagcattcactcacaaggggttgatctccacatccagtacctcacagaagttttcagcatcgagccttgctgtgggtccctgctgggagggaccatcctcagcatctcaggaataggcttcagcagggacccagctttggtttgggtacttgtgggcaatcggtcctgtgacattgtgaacttaacggaggcgagcatctggtgtgaaaccctgccagccccccagatacccgatgcgggcgctcccactgttccagctgccgtggaggtctgggctggcaacaggttcttcgcccgtggtccttcaccaagcttggtggggaaaggcttcaccttcatgtatgaagcggcagcaacaccagtagtcactgccatgcaaggagaaatcacaaatagcagcctgagcctgcatgtgggaggaagtaacctctccaactcagtcatccttctggggaacctgaactgtgatgttgagacacagtccttccagggcaacgtgagcctgtctggatgctccatccctcttcacagtctggaggctggcatctatcctctccaagtacgtcagaagcagatgggatttgctaatatgtctgtggtgctccagcaatttgcagtgatgcctcggataatggccatcttcccatcgcagggttcggcatgtggtgggaccatacttactgtgagggggttgcttcttaactctagaaggaggtcagttcgggttgacctctcgggtccttttacttgtgtgattttgagtttgggagaccacaccattctctgccaggttagcctggagggtgaccccttgcctggagcttccttctccctgaacgtcacagtcctggtcaatgggctaaccagcgagtgtcaggggaattgcactcttttcataagggaagaggcaagtcctgtcatggatgccttgtccacaaacaccagtgggtctctgaccactgtgctgattaggggtcagaggttagccaccacagctgatgagccgatggtatttgtggatgatcaacttccttgcaatgtaactttttttaatgcaagccacgttgtgtgccagacaagagacttggccccaggaccccactacctgtcagttttttatacaagaaatgggtatgcttgttctggtaatgtttccagacacttctacattatgccccaagtgtttcattattttcctaagaatttcagcttacatggtggaagcctcttgaccatagagggcacaggcctgagaggacagaacaccacgtcagtctatattgaccagcagacctgcctgacggtgaacatcggtgctgagctcatccggtgcattgttcccacagggaatggctctgttgccctggaaatagaggtagatggactttggtatcacataggagtcattggttataacaaggcctttaccccagaattgatctctatttctcagagcgatgacatcttaacctttgcagtggcccagatctcaggagctgcaaacattgacatttttataggaatgtcaccctgtgtgggtgtctctggtaaccacaccgttcttcagtgcgtggtcccttcccttccggccggggagtaccacgtcagaggctatgactgcatcagagggtgggcctcatctgccctggtgttcacctcaagagttattattacagcagtgacggagaacttcggctgcctgggtggaaggctggtgcatgtgtttggagcgggattttctccagggaatgtctcagctgctgtgtgtggtgctccctgccgagtcctggctaatgctacagtgtctgccttcagctgcttggttctgcccctggatgtgtccttggccttcctgtgtggcctgaagcgtgaggaggacagctgtgaggctgccagacacacctatgtgcagtgtgatttgacagttgccatggcgacagagcaactgcttgaatcgtggccttacctctacatttgcgaggaaagttcccaatgcctctttgtgccagatcattgggcagagtcaatgtttccatcattctcgggcctctttatcagccctaaattggaaagagatgaagttctcatctataatagctcctgtaacattaccatggaaactgaggcagagatggagtgtgagacgcccaatcagccaattaccgtcaagattactgagatacggaaacgctggggccagaacactcagggcaacttttctttacagttctgccggagatggtccaggactcacagctggtttcctgaaaggctgccacaagatggcgacaacgtcacagtggagaatggccaattgcttctgctggacactaacacaagcatcctcaacttactgcacattaaagggggcaagctgattttcatggccccaggacccatcgagctcagggcacacgccatccttgtttctgatggtggagagctccggattggatccgaagacaagcccttccaaggcagagctcagatcacactctacgggagttcctactcaactcccttctttccctatggagtcaagttcctggctgtgaggaatggaactctttctctgcacggttcactaccagaagtaattgtcacctgtcttagagcaactgcccatgccctagacacagtgctggctttagaagatgctgtggactggaaccctggggatgaagttgtcatcatcagtggaacaggtgttaaaggtgccaaaccgatggaagagattgtcactgtggaaactgtgcaggatacagacctctatcttaagtcacctttgagatattctcacaactttacagagaattgggtggctggagagcaccatattttaaaggccactgtggctctgctcagcaggagtattaccatacaaggaaatctcactaatgagagggagaagctgcttgtttcatgccaggaggccaatgctccagaaggtaatctgcagcactgtttgtattccatgagtgagaagatgctaggatccagggatatgggagccagagtgatcgttcagtccttcccagaagagcccagccaggtccagttgaagggagtgcagtttcaagtcttggggcaagccttccataagcatctgagctcactcactctggtgggagctatgagagagtctttcatacagggctgcacagtgaggaactccttcagtagaggcctcagcatgtgcgggaccttgggcctgaaggtggacagtaatgtattctacaatattttaggtcatgcgctgctagttgggacatgcacggagatgagatatatctcctgggaggcaattcatggaaggaaagatgactggtcaggacatggaaatataataagaaacaacgtgatcatccaggtttctggtgccgagggactctccaatcctgaaatgttgacaccatctggcatctatatctgcagtcccaccaatgttatagaggggaacagagtgtgtggtgctggctatggctactttttccatctcatgaccaaccaaacatcacaagctccgcttctttccttcactcagaacattgcacattcttgtaccaggtatggtctctttgtataccctaaatttcagccaccttgggataatgtcactggcaccactctgttccagagcttcacagtttgggaaagtgcaggtggtgcccagatttttagaagtagcaatcttcgcctgaaaaacttcaaagtttattcatgcagagattttggaattgacgtcttggaaagtgatgcaaatacttcagttactgacagcttattacttggtcattttgcccacaagggaagtctgtgtatgtcatctgggattaaaactcctaaaagatgggaactgatggtgtctaacacaacctttgttaattttgatctcatcaactgtgtggccattagaacctgttcagactgttcccaaggacaaggtggatttactgtgaagaccagccagttgaagtttacaaactcttcaaacttagtggcatttccatttcctcatgcagcaattttggaagacttggatgggtctctgtctgggaaaaacagaagtcacattcttgcttctatggaaaccctttcagcttcttgtttggtcaattcaagctttggtcgggttgtccatggcagtgcctgtggaggaggtgttctttttcatcgtatgtctattggtttagcgaatactcctgaagtttcttatgatttaaccatgactgacagcagaaataaaacaaccactgtcaattatgtacgtgatacattgtctaaccctcgtggctggatggctctgctcttggaccaagagacctactcattgcaatctgagaacctttggatcaacagatctctgcagtactcagcaacctttgacaactttgctcctggtaattacctactgctggtgcacacagatttgccgccttaccctgacatcctcctaagatgtgggagtcgagtgggtctgtcttttccatttcttccatcaccaggtcagaaccaaggctgtgactggttcttcaatagccagctgaggcaactcacctatctggtttcaggtgaaggccaagttcaagtcattctccgggtgaaggaaggtatgcccccaactatttcagcttctacctctgcccctgaatcagctttaaaatggtccctccctgaaacatggcaaggtgttgaagaaggctggggaggatacaacaataccattccaggccctggggatgacgttctcattttacccaacagaactgtccttgtggatacagatcttccattcttcaaagggctgtatgtgatggggaccttagacttccctgtggacagaagcaatgttctgagtgtggcatgcatggtcattgcaggcggggagctgaaagttggtactttagaaaatcccttagaaaaggaacaaaagcttctgattctccttagagcctcagagggagtcttttgtgaccgtatgaatggaattcatattgacccaggaacaattggggtttatgggaaagttcatctttacagtgcttatcctaagaactcctggacacatcttggagctgatattgcctcaggaaatgagagaattatagtagaagatgcagtggattggcgcccccatgacaaaatagtccttagctcctcttcttatgagcctcatgaagcagaggtcctcactgtgaaagaagtcaagggccaccatgtgaggatctatgaacggctcaaacaccggcatattggaagtgtacatgtcacggaggatggccgacacattcgtttggctgctgaggttggactgttgacccgaaatatacaaattcagcctgacgtatcatgtagggggagactgtttgtggggtccttcaggaagtccagccgagaagaattttcaggtgtccttcaacttcttaatgtggaaattcagaacttcgggtcaccattgtactcatctgttgaattcagtaatgtgtcagcaggatcctggatcatatcatctactctgcaccagagctgtggcgggggcattcatgcagctgccagtcatggagtacttttaaatgacaatattgtgtttggcacagctggccatggcatagatttagagggtcaggcctatactgtcactaataaccttgtggttctgatgacacagccagcgtggtccaccatttgggtggcgggaatcaaagtgaaccaggtaaaggacatcaacctccatggcaacgttgtggcaggatcagagagacttggctttcacatccgaggccacaagtgctcctcttgtgaactgctttggtctgacaatgtggcgcattcaagtcttcatggccttcatctctataaggaaagtggacttgacaactgtaccagaatctctggcttcttggctttcaagaactttgactatggtgccatgttacatgtagagaacagcgtggagatagagaacattactctggtagacaatactattggtcttttggcagtagtgtatgtattttctgctccacaaaattccgtcaaaaaagtgcagattgtgcttaggaattcagtcattgtggccaccagctcttcttttgactgcattcaggacaaagtgaagccgcactcagccaacttgacatcaacagatagagctccctccaatccaagaggaggtcgaattggtattctgtggcctgtattcacctcagaaccaaatcagtggcctcaggagccatggcacaaagtgaggaatgatcattcaatttcaggaatcatgaaacttcaagatgttaccttttctagttttgtgaagagttgctatagcgatgacctggatgtctgcattctaccaaatgcagagaacagtggaattatgcacccaataacagcagagaggaccaggatgctaaagataaaagataaaaacaagttctactttccttcattacaacccaggaaagatttaggaaaagtagtctgtcctgaattagactgtgcaagtccaagaaaatatctcttcaaggatctggatgggagagccctgggtctgcctccaccagtttctgtatttcctaaaacagaggcagaatggactgcatccttcttcaacgcaggtacatttagagaagaacagaaatgtacataccaatttctgatgcaaggattcatctgcaaacagactgaccaagtggtcctaattcttgatagcgctgatgccatttgggcaattcagaagttatatccagttgtatctgtgactagtggttttgttgatgtctttagcagtgtaaatgccaatattccctgctctacttctgggtcagtgtctactttctattctatcttacccatcaggcaaatcaccaaagtctgcttcatggatcaaactcctcaagttttgcgcttttttctattggggaacaaaagtacctccaagcttctcttggctgtattctaccatgagctccagagcccccacgtcttcttaggggaaagttttattccacccactctggttcagtcagcttccttattgctgaatgaatctattggtgccaactatttcaacatcatggataacctcttgtatgttgtcctacaaggagaggagcccattgaaatacgctcaggtgtttccattcacttggccctcactgtgatggtttcagtcttagaaaaaggctgggaaatagtaatactcgaaagactaactaacttcttacagattggccaaaaccaaatcaggtttattcacgagatgcctggccatgaagagaccttaaaggccattgctgacagtagagcaaaaagaaagcgcaattgccctactgtgacttgcactagtcattatagaagagttggtcaacgtaggcctctcatgatggaaatgaactcacatagggcttcacccccaatgactgtggaaactatctcaaaagtgattgtcattgaaattggtgattcgccaacagtaaggagcactggaatgatttcatccttatcaagtaacaaattacagaatttggctcatcgagtcatcactgctcaacagactggggtactagagaatgttctgaatatgactatcggggccttactagttactcagtcaaagggagtcattggctatggaaatacaagcagttttaaaactgggaacttgatatatattcggccctatgcactttccatcctagtccagccttcagatggagaagtgggaaatgagcttccagtgcagccacaattggtatttttggatgagcagaatcgaagagtagagtccctgggacctccttcagagccatggacaatttcagcttccctggaaggagcatcagactcagtgctaaaagggtgcacccaggcagaaactcaagatggttatgttagcttctacaacttggcagtcttgatctctgggtcaaactggcactttatttttactgtcacttctcctccaggagtcaattttacagctcgatccaagccatttgctgtcttgcctgtgactaggaaggagaagtcgaccatcatcctggctgcttccctgtcctctgtggcctcatggctggctctgagctgtctggtgtgctgttggcttaaaagaagcaaaagcagaaaaacaaaacctgaagagattcctgaatcccagactaataatcaaaatattcatatccacatctcatccaaacgccgagaatcacaagggcccaaaaaagaagacactgtggtgggagaagatatgagaatgaaggtcatgctgggcaaggtgaaccagtgcccccaccagttgatgaatggagtgtccagaaggaaagttagccgccacattgtccgagaggaagaggctgctgtgcctgctcctggtactactggcatcacatcccatgggcacatctgtgctccaggtgctcctgctcagcaggtgtacctgcaagagactgggaactggaaggagggccaagagcagttgctcagataccagctggcaggccaaaatcagctgctgctgctatgcccagacttcagacaagagaggcagcagttgccagggcaaagtcggctgagtaagcaaagtggcagcttggggctttcccaagagaagaaagcctcctgcggggccactgaggcattctgccttcattcagtacacccggaaactattcaggagcaactgtgatcagggaagttgggggcatttggcctgaaaggcagaatgttcccagtatttctggataataagctggggaagtgaggactgtcctgctgggacaactaagaagagagaatgtggactctgaatccctttttcaactttaaaatggaaaacagtcatataaatgcttacagactgaaaaatgtctcatacatattttgcagctatcatgatcctagttcaatgctaggcaaataatggcacttgttaattatttaccagtttttaacttaagcctgattttaacaacttgataatggtgtaatactgacttataccagcaggggttattattaagcattctctggattgaccacccacaatgctttgagcttcttttatagaagggatcatgaaaaggtctggtcagctacagtttaattccacactgttacagaaaagcatttctttatcctgtagtagcatttgaagggacagttcaacaccctgctccctgatctgtcagagcttaccttccaaccacaaggcaacttcctggctttttacaagtggattttatttcatggtttaaattcaatcattattgagaacctacagtagtgtgagcgtatcaaatttgcacttcatgaggatttacacatgaaaattgatattctcatgggctttgctgagagtttagttaaggacaaagatgtaaaaatgccaaatttgggaaaggaaattttgtatgaccactgttctatttttcagtgattctctctgttagtagctgggtcacatttacaactggaaaagaactacattgggagatcagagaaagccaagtggccaagtcctttatcaaaaagctgctttttggagaagatgatgcataaagctgtgatactaaggagaggagagattatgtcatatgcaactgctctaggctgtgcagggggtttaaatggagatcagaacaaaggctcacctggtattgatacatttggtaaggttgttaaaggcaatttcaccaaattcacacatttgtacggggcccatttcttttcaaactgaagaatactttaaacagcctgactgtgtccttggctctggatccagaaggccttatgctccaagcatgtaaagaaaagatcgcaggaatgtggagagcttccaaaaagagattgctctcagattttcctgaaaatcctgaaaaccaggattttccaatctctacaatgttaaggggttgttgtgtagttgcattggaagagagaaaggaaacacactctttcattgctgaattctaaataatgatgccctgaattagttctatgagaagtactggcagacagctgttatgtctgcagggcatcaaggggcaggtgtgtctcaccctactaagaattggcagaaatgttttaacctcttctttaggcatctggtgagtattgcagatcttcaggctgtccctaaaaggaggtaggtagccttctctgtggtcactgtgttggatttggaagaaaatataagtagatgttaaggtcagtgctctccaggagatttcaatccaggctatctgtgttcagggaatgatttgcaagaagttggtttatagacgtttactctggaggcacaagctggctgccatgctgagtaagtcctctttgtagatgatgtattttgcttgggcaccaacagaattaaaaacgaaaaacaaaaaaaaactcgaatgacttaggcagaacatgccttccctagtttaattagtccctgttataaccagttatttatctttttttgtagattctcggtcttgaagtcatttgcctttgcaatctctactttagtatactcattggatcctcaaagagccgtaagctttttggaaaaaaacatttcagaagtgaaggcttttgaggtttataaaatggtagcagtcttagtccttgccctgcctcagtttacctgcacatgctttctttcatttcctcggattctttcaccactttttaagttttttttccacaggtatttttcctgagctctataccatgcatttagctgcctagtgagaatatccagtaggttatcctatagttactatgaagttaacacagcccaaaaacctacttctccttgtgtttttttccaactcaatgaatgacatcactgcactcagaccagaaatctagaagtcagtcatgactcttcattctatttcgcccttcacaaagagttagctgccagctctgttatttctgccccttctttacccttcttccaatttttattatcttcttatttatcctctatgtgtcacaagaccagtctttctgggaggcatgttttatcctatccctctgcgtaggaataaccataattatcttactaattccatcccagaaaagcctgtgatccctgaggccagaattgactctttgggcctaaatagcagctataaacatcttcagtaacttgccaggctctagcatgtggcatggaattttggcatctagctaaaattcctcaacccatagttaagctactcctctttctcctaaaaaaaaaaaaaaatgagagaattagggaaacaccaaaagcaaagagagcagctctatgttcattcatgtctggagatgagccaatttgagcaccactgtaggccaactctaaatttattcagatcgttaacatgggtaacccagcaaatatttcccagcagtgacaatctacaccctttatctaaataaatattgagatgtgcttttttcctgtgttagttcaaagaatctcttcttgcctcccattgctgattttctgtattgatggactcatttctctcaagagattggacaagctaaaattctagagagttcaaaagtgtttgaaagtacattttaagtgttctcaccacaaaaaatgctagtgtgtgaggtgatacatatgttaattagttcaactgatccattccacaatgtatacatatttcaaactatcgagttgtacatgataaatatatacaatttttatttgtcaaataaagaacatctataaatatttatagatttcaaaattgagaaagaagtatatatggagccacggttgttttgaccatttctccatgctttttgtttggggagggggacattttttggggggcagggactgtgttcagggaaagtacctgaccaacagaacttcaagtctcttccagagtgcgagactcagcttatctgatcaaggtgaacttgcccttcaatagacttgcccttgttactgcccagtgaggccaccaaggaccaagaacagttgagctctctcagggccttcccctttcaacaatttagttgaatgactcccttccatctatcagtcttactccaaatatatgaaattactatacattgaaatgcctgcaaactatatgcaaaaatgagtatgaggaaatcaaatgtaaatcatatgcaaatattattcaaccaagcttctataaaattgtacgtgtcaataacagtaaagaattttaattaattctgtcatttaaaattcatgcattccatattttgctttcagaacttatagtctatgccaattttgaaaaaactataagcacaaggaattaaatactattgagtatagaactgttgatttcaacatacactatagcactttgactaattacagatatatttgatagaaaagtcacatttctacaaggtaattttcaaaaagaaataaaacatttctgtaaactt

SEQ ID NO: 6100 - DNA, 1892 bp, Homo Sapiens
  NM_138712
ggcgcccgcgcccgcccccgcgccgggcccggctcggcccgacccggctccgccgcgggcaggcggggcccagcgcactcggagcccgagcccgagccgcagccgccgcctggggcgcttgggtcggcctcgaggacaccggagaggggcgccacgccgccgtggccgcagatttgaaagaagccaacactaaaccacaaatatacaacaaggccattttctcaaacgagagtcagcctttaacgaaatgaccatggttgacacagagatgccattctggcccaccaactttgggatcagctccgtggatctctccgtaatggaagaccactcccactcctttgatatcaagcccttcactactgttgacttctccagcatttctactccacattacgaagacattccattcacaagaacagatccagtggttgcagattacaagtatgacctgaaacttcaagagtaccaaagtgcaatcaaagtggagcctgcatctccaccttattattctgagaagactcagctctacaataagcctcatgaagagccttccaactccctcatggcaattgaatgtcgtgtctgtggagataaagcttctggatttcactatggagttcatgcttgtgaaggatgcaagggtttcttccggagaacaatcagattgaagcttatctatgacagatgtgatcttaactgtcggatccacaaaaaaagtagaaataaatgtcagtactgtcggtttcagaaatgccttgcagtggggatgtctcataatgccatcaggtttgggcggatgccacaggccgagaaggagaagctgttggcggagatctccagtgatatcgaccagctgaatccagagtccgctgacctccgggccctggcaaaacatttgtatgactcatacataaagtccttcccgctgaccaaagcaaaggcgagggcgatcttgacaggaaagacaacagacaaatcaccattcgttatctatgacatgaattccttaatgatgggagaagataaaatcaagttcaaacacatcacccccctgcaggagcagagcaaagaggtggccatccgcatctttcagggctgccagtttcgctccgtggaggctgtgcaggagatcacagagtatgccaaaagcattcctggttttgtaaatcttgacttgaacgaccaagtaactctcctcaaatatggagtccacgagatcatttacacaatgctggcctccttgatgaataaagatggggttctcatatccgagggccaaggcttcatgacaagggagtttctaaagagcctgcgaaagccttttggtgactttatggagcccaagtttgagtttgctgtgaagttcaatgcactggaattagatgacagcgacttggcaatatttattgctgtcattattctcagtggagaccgcccaggtttgctgaatgtgaagcccattgaagacattcaagacaacctgctacaagccctggagctccagctgaagctgaaccaccctgagtcctcacagctgtttgccaagctgctccagaaaatgacagacctcagacagattgtcacggaacacgtgcagctactgcaggtgatcaagaagacggagacagacatgagtcttcacccgctcctgcaggagatctacaaggacttgtactagcagagagtcctgagccactgccaacatttcccttcttccagttgcactattctgagggaaaatctgacacctaagaaatttactgtgaaaaagcattttaaaaagaaaaggttttagaatatgatctattttatgcatattgtttataaagacacatttacaatttacttttaatattaaaaattaccatattatgaaattgctgatagta

SEQ ID NO: 6101 - DNA, 3157 bp, Homo Sapiens
  NM_138718
agccgctgctgggagacgcctgggcgccgggggctgcaggtcccagggcgggggctgcgtccgtcaccggcaggtacccaggtatgccgcagagccaggcacgccgtgggcactcagtcagtatctgtggaatgaatgaatgatggtcgtccctgggagcttatctctgaggaatggcacaactagagaggagcgccatctctggcttcagctctaagtccaggcgaaactcattcgcatatgatgttaagcgtgaagtatacaatgaggagacctttcaacaggaacacaaaaggaaggcctcctcttctgggaacatgaacatcaacatcaccaccttcagacaccacgtccagtgccgctgctcatggcacaggttcctacgatgcgtgcttacaatctttcccttcctagaatggatgtgtatgtatcgattaaaggattggcttctgggagacttacttgctggtataagtgttggccttgtgcaagttccccaaggcctgacacttagtttgctggcaaggcaactgattcctcctctcaacatcgcttatgcagctttctgttcttcggtaatctatgtaatttttggatcgtgtcatcaaatgtccattggttccttcttcctggtgagtgctctgctgatcaacgttctgaaagtgagcccattcaacaacggtcaactggtcatgggatctttcgtcaagaatgagttttcggccccctcctaccttatgggctataataaatccttgagtgtggtggcaaccacaacttttctgactgggattattcagattattggcttcactgtgattgcaaacaagataagcatggccacagaaaccagccagacgcttattgacatgattccttatagctttctgcttcctgtaacaccagatttcagccttcttcccaagataattttacaagccttctccttatctttggtgagctcctttctgctcatatttctgggcaagaagattgccagtcttcacaattacagtgtcaattccaaccaggatttaatagccatcggcctttgcaatgtcgtcagttcatttttcagatcttgtgtgtttactggtgctattgctaggactattatccaggataaatctggaggaagacaacagtttgcatctctggtaggcgcaggtgtgatgctgctcctgatggtgaagatgggacactttttctacacactgccaaatgctgtgctggctggtattattctgagcaacgtcattccctaccttgaaaccatttctaacctacccagcctgtggaggcaggaccaatatgactgtgctctttggatgatgacattctcatcttcaattttcctgggactggacattggactaattatctcagtagtttctgctttcttcatcaccactgttcgttcacacagagctaagattcttctcctgggtcaaatccctaacaccaacatttatagaagcatcaatgattatcgggagatcatcaccattcctggggtgaaaatcttccagtgctgcagctcaattacatttgtaaatgtttactacctaaagcataagctgttaaaagaggttgatatggtaaaggtgcctcttaaagaagaagaaattttcagcttgtttaattcaagtgacaccaatctacaaggaggaaagatttgcaggtgtttctgcaactgtgatgatctggagccgctgcccaggattctttacacagagcgatttgaaaataaactggatcccgaagcatcctccattaacctgattcactgctcacattttgagagcatgaacacaagccaaactgcatccgaagaccaagtgccatacacagtatcgtccgtgtctcagaaaaatcaagggcaacagtatgaggaggtggaggaagtttggcttcctaataactcatcaagaaacagctcaccaggactgcctgatgtggcggaaagccaggggaggagatcactcatcccttactcagatgcgtctctactgcccagtgtccacaccatcatcctggatttctccatggtacactacgtggattcacgggggttagtcgtattaagacagatatgcaatgcctttcaaaacgccaacattttgatactcattgcagggtgtcactcttccatagtcagggcatttgagaggaatgatttctttgacgctggcatcaccaagacccagctgttcctcagcgttcacgacgccgtgctgtttgccttgtcaaggaaggtcataggctcctctgagttaagcatcgatgaatccgagacagtgatacgggaaacctactcagaaacagacaagaatgacaattcaagatataaaatgagcagcagttttctaggaagccaaaaaaatgtaagtccaggcttcatcaagatccaacagcctgtagaagaggagtcggagttggatttggagctggaatcagaacaagaggctgggctgggtctggacctagacctggatcgggagctggagcctgaaatggagcccaaggctgagaccgagaccaagacccagaccgagatggagccccagcctgagactgagcctgagatggagcccaaccccaaatctaggccaagagctcacacttttcctcagcagcgttactggcctatgtatcatccgtctatggcttccacccagtctcagactcagactcggacatggtcagtggagaggagacgccatcctatggattcatactcaccagagggcaacagcaatgaagatgtctaggagatgaactagaaataaggggtcagataatgctggcaaatcctcctacccaaaaaggggtcaattgtccagagacctagactggatacgaactagcagtacttccttcctgactgtgactcctactacctgccagccttcttccttgctctgcgctgggatcatactcccaaatcacattactaaatgccaacaattatctctgaattccctatccaggctcccctcatttcaccttcagcatatattctagtcatgaatttccttcttcacacaccccacatctctgggctttgtgccagaccatctctaacttaatcctctcatccctgttcccctttctccaaagagatgaagctcaaataaaatgtataactctagtaaca

SEQ ID NO: 6102 - DNA, 829 bp, Homo Sapiens
  NM_138720
gattattttctcaggtgtttgcaacagtgttctaactattaacgctacgatgcctgaacctaccaagtctgctcctgccccaaagaagggctccaagaaggcggtgactaaggctcagaagaaggacgggaagaagcgcaagcgcagccgcaaggagagctattcagtgtatgtgtacaaggtgctgaagcaggtccatcccgacaccggcatctcttccaaggcaatggggatcatgaattccttcgtcaacgacatcttcgagcgcatcgcaggcgaggcttcccgcctggcgcattacaacaagcgctcgaccatcacctccagggagatccagacggccgtgcgcctgctgcttccgggggagctggccaagcacgccgtgtcggagggcaccaaggccgtcaccaagtacaccagttccaagtaactttgccaagggagagacatgaagacagaggagaaatgaatgcataaaataactgataatatgaatctatacatagaacttaggaagtctcatctgcctgaaaatgactgtgtggatcccacccaaatccaactcatcctggtttgctgcacactggttcatcaaaagaaggttaccgaggggaaggaactaaaggtgtttgcacttcatgttactttttgagtttataaacataaaaacagaatttacttctgttacagacctagttactgggaattcattacttgccatggactacctttgctaagaaaagtctgaatgagaagatggcaggacgtctgaaaaaaaaagttataattaataaaatctgcggagaattgtaaaaaaaaaaaaaaaaaa

SEQ ID NO: 6103 - DNA, 2509 bp, Homo Sapiens
  NM_138769
gagcgaaaggcttgaggaccaggtcggggccgggttccgggtcggggagcggctccgggcggcagctatgaggcgggacgtgcgcatcctgttactgggcgaggcccaggtggggaagacgtcgctgatcctgtccctggtgggcgaggagttccccgaggaggtccctccccgcgcggaggagatcacgatccccgcggacgtcaccccggagaaggtgcccacccacatcgtggactactcagaagccgagcagacggacgaggagctgcgggaggagatccacaaggcaaacgtggtgtgtgtggtgtatgacgtctctgaggaggccaccattgagaagattcgaactaagtggatcccactggtgaatggggggaccacgcaggggcccagggtgcccatcatcctagtgggcaacaagtcagacctgcggtcggggagctccatggaggccgtgctccccatcatgagccagtttcccgagattgagacctgcgtggagtgttcggccaagaacctgaggaacatctcagagctgttctactacgcccagaaggccgtcctgcatcccacagcccccctctatgaccctgaggccaagcagttgaggcccgcgtgcgcccaggcgctgacgcgcatcttcaggctctcagatcaggacctggaccaggcgctcagtgacgaagagctcaacgctttccagaaatcctgctttgggcaccccctggccccgcaggccctggaggacgtgaagacggtggtgtgcaggaacgtggcgggcggcgtgcgggaggaccggctgaccctggatggtttcctcttcctgaacacgctcttcatccagcgcggccggcacgagaccacctggaccatcctgcggcgcttcggctacagcgatgccctggagctgactgcggactatctctcccctctgatccacgtgccccccggctgcagcacggagctcaaccaccttggctaccagtttgtgcagagagtgtttgagaagcacgaccaggaccgcgacggcgccctctcgcccgtggagctgcaaagccttttcagtgtgttcccagcagcgccctggggccccgagctcccacgcacagtccgcacagaggccggccggttgcccctgcacggatacctctgccagtggaccctggtgacctacctggacgtccggagctgccttggacacctaggctacctgggctaccccaccctctgtgagcaggaccaggcccatgccatcacagtcactcgtgagaagaggctggaccaggagaagggacagacgcagcggagcgtcctcctgtgcaaggtggtaggggcccgtggagtgggcaagtctgccttcctgcaggcttttctcggccgcggcctggggcaccaggacacgagggagcagcctcccggctacgccatcgacacggtgcaggtcaatggacaggagaagtacttgatcctctgtgaggtgggcacagatggtctgctggccacatcgctggacgccacctgtgacgttgcctgcttgatgtttgatggcagtgacccaaagtcctttgcacattgtgccagcgtctacaagcaccattacatggacgggcagaccccctgcctctttgtctcctccaaggccgacctgcccgaaggtgtcgcggtgtctggcccatcaccggccgagttttgccgcaagcaccggctacccgctcccgtgccgttctcctgtgctggcccagccgagcccagcaccaccatcttcacccagctcgccaccatggccgccttcccacatttggtccacgcagagctgcatccctcttccttctggctccgggggctgctgggggttgtcggggccgccgtggccgcagtcctcagcttctcactctacagggtcctggtgaagagccagtgaggcccctggtacccaagccccctcccctgacctgggtgtgcctcgctgctggggctctgcaggggcagcacagctggggtgcaggccaggctgccactccgggaacgcctttgcgccgggactttttgtttctgaaggcagtcgatctgcagcggggccttatgctgccatgcactgccctggctcctgccggacccccagggtgggccgtggcaggtggctgagcaggagctcccaagtgccggccaccgctgtcagggattgcccacccctgggcatcatgtgtgtggggccggggagcacaggtgtgggagctggtgaccccagacccagaattctcagggctctacccccctttcctggtcctaggtggccagtgggtatgaggagggctggaaggcagagctttgggccaaaagcaggcgttggggggtcccccctcaagtttggagccgtttccgtggttgtagcagaggaccggaggttgggttcctgattaaacttcactgtgtgttttctatctcggatcccagtctctgaagacaacttgctttgattcaacctaaaaaaaaaaaaaaaaaaaaa

SEQ ID NO: 6104 - DNA, 2473 bp, Homo Sapiens
  NM_138771
agggaggcggagcggaagccgagtgcgagggacgagcggagtaaaatctccacaagctgggaacaaacctcgtcccaactcccacccaccggcgtttctccagctcgatctggaggctgcttcgccagtgtgggacgcagctgacgcccgcttattagctctcgctgcgtcgccccggctcagaagctccgtggcggcggcgaccgtgacgagaagcccacggccagctcagttctcttctactttgggagagagagaaagtcagatgccccttttaaactccctcttcaaaactcatctcctgggtgactgagttaatagagtggatacaaccttgctgaagatgaagaatatacaatattgaggatatttttttcttttttttttcaagtcttgatttgtggcttacctcaagttaccatttttcagtcaagtctgtttgtttgcttcttcagaaatgttttttacaatctcaagaaaaaatatgtcccagaaattgagtttactgttgcttgtatttggactcatttggggattgatgttactgcactatacttttcaacaaccaagacatcaaagcagtgtcaagttacgtgagcaaatactagacttaagcaaaagatatgttaaagctctagcagaggaaaataagaacacagtggatgtcgagaacggtgcttctatggcaggatatgcggatctgaaaagaacaattgctgtccttctggatgacattttgcaacgattggtgaagctggagaacaaagttgactatattgttgtgaatggctcagcagccaacaccaccaatggtactagtgggaatttggtgccagtaaccacaaataaaagaacgaatgtctcgggcagtatcagatagcagttgaaaatcaccttgtgctgctccatccactgtggattatatcctatggcagaaaagctttataattgctggcttaggacagagcaatactttacaataaaagctctacacattttcaaggagtatgctggattcatggaactctaattctgtacataaaaattttaaagttatttgtttgctttcaggcaagtctgttcaatgctgtactatgtccttaaagagaatttggtaatttggttgatgtggtaagcagataggtgagttttgtataaatcttttgtgtttgagatcaagctgaaatgaaaacactgaaaaacatggattcatttctataacacatttatttaagtatataacacgttttttggacaagtgaagaatgtttaatcattctgtcatttgttctcaatagatgtaactgttagactacggctatttgaaaaaatgtgcttattgtactatattttgttattccaattatgagcagagaaaggaaatataatgttgaaaataatgttttgaaatcatgacccaaagaatgtattgatttgcactatccttcagaataactgaaggttaattattgtatatttttaaaaattacacttataagagtataatcttgaaatgggtagcagccactgtccattacctatcgtaaacattggggcaatttaataacagcattaaaatagttgtaaactctaatcttatacttattgaagaataaaagatatttttatgatgagagtaacaataaagtattcatgatttttcacatacatgaatgttcatttaaaagtttaatcctttgagtgtctatgctatcaggaaagcacattatttccatatttgggttaattttgcttttattatattggtctaggaggaagggactttggagaatggaactcttgaggactttagccaggtgtatataataaaggtacttttgtgctgcattaaattgcttggaaaatgttaacattatattatataagagtatcctttatgaaattttgaatttgtataacagatgcattagatattcattttatataatggccacttaaaataagaacatttaaaatataaactatgaagattgactatcttttcaggaaaaaagctgtatatagcacagggaaccctaatcttgggtaattctagtataaaacaaattatacttttatttaaatttcccttgtagcaaatctaattgccacatggtgccctatatttcatagtatttattctctatagtaactgcttaagtgcagctagcttctagatttagactatatagaatttagatattgtattgttcgtcattataatatgctaccacatgtagcaataattacaatattttattaaaataaatatgtgaaatattgtttcatgaaagacagatttccaaatctctcttctcttctctgtactgtctacctttatgtgaagaaattaattatatgccattgccaggtagaagtttggaataattgtttagtctctcctattagatgtggacatttttgtttttgtttttgttttcagggatgaaataaaatatattatttctaccta

SEQ ID NO: 6105 - DNA, 1835 bp, Homo Sapiens
  NM_138774
cccgtcacttcctgcccggcccggtgaaggccctgccgggcggcggcggcggcgacagcgtgcgagccatggtcgcgctggagaaccccgagtgcggcccggaggcggcggagggcaccccgggcgggcggcggctgctgccccttcccagctgcctgcctgccctagccagctcccaggtgaagagactctcggcttccaggcggaaacagcacttcatcaaccaggcagtgcggaactcagacctcgtgcccaaggccaaggggcggaagagcctccagcgcctggagaacacccagtacctcctgaccctgctggagacagacgggggcctgcctggcctggaggatggggacttggcaccccctgcatcaccaggcatctttgccgaggcctgcaacaacgccacctatgtggaggtctggaacgatttcatgaaccgctccggggaggagcaggagcgggttcttcgctacctggaggatgagggcaggagcaaggcgcggaggaggggccctggccgtggggaggaccggaggagagaggaccccgcctatacaccccgcgagtgcttccagcgcatcagccggcgtctgcgagccgtcctcaagcgcagccgcatccccatggaaacgctggagacctgggaggagcggctgcttcggttcttctccgtgtccccccaggccgtgtacacagcaatgctagacaacagcttcgagaggcttctgctgcacgctgtctgccagtacatggacctcatctcggccagtgctgacctggaggggaagcggcagatgaaggtcagtaatcggcacctggatttcctgccgccggggctgctcctgtccgcctacctggagcagcacagctgatggcggccccgcggagaccccgctgccacctcgcccagccatcaagccctccgataccttcggctaaaatatctttcatatttttagaatttgtcctcggaaacctttttcgcttggggtggtctctctcactctgccccctcctcacgcagctcttggcagtcaacagacgctggcggctggggctgcccatgccatcccagctccaagcttcccactccgggacttgtgtttgggtggggagacctgacctgggcatgttcctgtttcttcatcgttgagcttttctggcccggtctgaagctcaagtgaggagggggaggctgggtttttatcacttttaatgaatttggtgtgatttgttgtagatttttaaatttcccttttggagagaaaaaccaaaaaaactcgccccactggtaaaacatgggtcttggtcccagcccctgctcagcccctcccagtttttagcttgaatgagggtggggtctctgggaccctgcccctcatgccagaagcatcttgtgttgtatatgtgtgcgcgcgtgtgccctgagacccaggacagaagccacggtcctaagagccggttttatcctcgtcattctgcgtgtcctcccccacgccacctgtgtcggggctcagggtctcctgctttatatgagcccccttcctttcctcccctcctttatgctgggggtccaggacttccagccagaagcctctgcccttgcactaccttgtctgtcaccccatcccgtgtcccctcgtcccccagcctgactcctgcctgatagctcctgtgtccccatgctggtcctcctggcccaggctgcaggagccaggctggggggcctccgcacccccttgctgcgtgtgggtaattgtgttttgggggaaagtggggaatttaataaatttctggtgctctggcaaaaaaaaaaaaaaaaaaaaaaaaaa

SEQ ID NO: 6106 - DNA, 4085 bp, Homo Sapiens
  NM_138775
agttttctccaacatggccgcgcccaggggagatggcgtgcaagtatccgctgcggtgttctggtgctagagtggagaggctggcaaagaagaaggcacacgcatggtgagaatccggcctgagccgaagcggagtttgctatggacagcaaccatcaaagtaattacaaactcagtaaaactgagaagaagttcttaaggaaacagattaaagccaagcatactttgctgagacatgaaggcattgagacagtatcctatgccactcagagcctggttgttgccaatggtggtttgggtaatggtgtgagtcggaaccagctgctcccggttttagagaaatgtggactggtggatgctctcttaatgccacctaacaagccgtactcatttgcaagatacagaactacagaagaatctaagagagcctatgttaccctcaatggaaaagaagtagtggatgatttaggacaaaagatcactctgtatttgaattttgtggaaaaagtgcagtggaaggagttgaggcctcaagccttaccaccaggactcatggtagtagaagaaataatttcttctgaggaggagaaaatgcttttggaaagtgttgattggacagaagatacagacaatcaaaactctcaaaaatccttaaaacacagaagagtaaagcattttggttatgagttccactatgagaacaacaatgtagataaagataagccattatctgggggtcttcctgacatttgtgaaagctttttggagaaatggttgaggaaaggttacattaaacataaacctgatcaaatgaccataaatcagtatgaacctgggcaaggaattcccgctcatattgatacacattccgcttttgaggatgagatcgtttctctcagtttggggtcagagattgtcatggattttaagcacccagatggcattgcagtgccagttatgttgcctcgtcggagtttgctggtgatgacaggagaatctagatacctttggacccatggaatcacgtgcagaaaatttgatactgttcaagcatctgagagtcttaaaagtggaattatcaccagtgatgttggagacttaactttaagcaagaggggactacgaacatcatttacatttaggaaagtgaggcaaacaccttgtaactgtagttacccgttggtctgtgatagccagaggaaagagactcccccctcatttccagagagtgataaagaagcctcacggctggagcaagagtacgtccatcaggtttatgaagagattgctgggcacttcagcagcacaagacataccccttggccgcacattgtggagtttttgaaggctttgccaagtggttcaatagtggctgatattggatgtggtaatggaaagtatcttggcatcaataaggagttatatatgattggttgtgatcgtagccaaaaccttgtggacatttgtagagagaggcaatttcaggcttttgtctgtgatgcattggcagtaccagtccgcagtgggtcttgtgatgcctgcatctccattgctgttattcatcattttgcaacagcagagcgtagagtggcagctctccaagaaattgttcgactcctgagaccaggtgggaaggcactcatttatgtctgggcaatggaacaagaatataataagcagaagtccaagtatcttagaggaaacagaaatagccaaggaaagaaagaggagatgaacagtgatacctcagtgcagaggtcacttgtggagcaaatgcgtgacatgggcagtcgagactcggcatcttctgtcccccgcattaatgactctcaggaaggaggatgtaattcaaggcaagtttctaattccaagctgcctgttcatgttaacaggacttctttttattctcaagatgtactggttccctggcaccttaagggaaatcctgataaaggcaaacctgttgagccatttggtcccataggatcccaggacccaagtcctgtgtttcatcgttactaccatgtgttccgtgagggagaactggaaggtgcctgcaggactgtgagtgatgtcagaattctgcaaagctactacgatcaaggaaactggtgtgtgattcttcaaaaggcctgattatttacctgaacacatcatatataaagaagaaatgctcacttaaaaaaaaagagagaataaattaattacccttttaattaaagagaaaacttgtgggaaagtaccaaaggaaagctgagaaaaatttggaagtagggattcattaggagacattcaaatgtctcctgttggctgacatcacagatgtggtgttggctcctcctacttccctaggagaggtggtttctaaaagtgattgaagcagtttgtgcagtgtttgtaattcttgggtaagagcccaggattttgaagataatagttttttagtaaagtgctactaaatgtagtaaatcatgtaggattttagggatgtaattatatgttaatacagaaaatagtcctggtcaatagaaaattgtctgaagttttacctatgatttttagctctgtaaaatcatagacaataaccattctatttccatgcctgactagcccagggctggacgtatagcgggtgtccaataacgtttagtcaatcagataatacccagaacttagtaggagtttcattcaaaaactattttttgaacccaaccatgtaccagttactattttaagtactgataatgaagcagtgaataagaaagagcaaagctcttgcccttatggtgcttacattctagacggggagacagacagcaggcaaatcaataaatagatactatgtgccagatagtgataaatgccatgaaaaacataaaatgagagacgattcaccttggagcaaaagattacttttaagtgactgaaataactactaatcctgactaatttattatcaagagttaattggtattccaaattcattgagcagggtgctaaaaacaacccaaatgtgctcctttaactcctttgtttaaatgacaaaagttagaatgtggtcactcagacctaactgtgcccttagagccaaagctgtggtgtcattattggttatttctagttgattcatagtttgtcccaatccaggttcaatcgggttatttttaagatctgtacaatattgcataatagtaacccagttaacttaccacttaggttagatttcctggaggaacaaaggtagaaattcaaccataggtcaaattatcacatagaaggaaaaggctttttttcaaagaaaaaattttttgaacactttactcccagtatgcattacttttgtagtagtaatgcttaagactgttttaaagaaaaattgctttctgtttaattaatgtttactgttattaatgctagtgatacttaatcttgaagcatcaagttttcagaaacctatagtgatcaataatgggtctcagatgagaggatgattatttttttcatggaatttcagtccaacatcctggtgtactggtccctctgggatgaatttataaggctcatgatataggaaaaggaatatagggctaaaaatagttttatttctgatataaattctggtacttgacaccaaagtttgaagtcaagtcatgccaataaattttaacatccaaatgaaatagatgattttctatgaagatgaaaaataccaaaattgactcaagaagggagagaaaatggaagatgttgaaaaatagcataggaattcagaactgggctctagaatcagatttcctgagagttgaattctagatctgccatttattagctgtgggattttgggcaaatttcttgactttctgtgcttcagttttcttagctgtaaaattggaagagttgttatgaaaattcactgaaagtatatttgtatacatcataggatagtgtaagaatatagtatggctttgagaaatgttcattattattactcccagaggagttttaggtattaagtgatgccaaatataatttgttaattgtataataaaaatctatattcttactgaaaaaaaaaaaaaaaaaaa

SEQ ID NO: 6107 - DNA, 2036 bp, Homo Sapiens
  NM_138777
acaggacaatccggggcggggcctgagatgcagtcctgcgagggcggcctcctgtaagacctcttagcgggcccatcgctgaggtgcagggacatgtcgcggccgaactcacctcgtggcctcggcgtggtgctctcagctcatgcccggaaaccaggtcccgacgccgcggtcagacggacctctagacgcgtccgcctcaatgccgccagctgccaggccgcccgtgacgcgttaagcctgcgccgcctcctggcttcgtgacgtcacgacgtccgcgcagctgcggtcgccgccgtcgcacgagtctttccttagtaacctgggcgatagctgtggatgtttccaaggattgtcttcagtcatggccttgggattaaagtgcttccgcatggtccaccctacctttcgcaattatcttgcagcctctatcagacccgtttcagaagttacactgaagacagtgcatgaaagacaacatggccataggcaatacatggcctattcagctgtaccagtccgccattttgctaccaagaaagccaaagccaaagggaaaggacagtcccaaaccagagtgaatattaatgctgccttggttgaggatataatcaacttggaagaggtgaatgaagaaatgaagtctgtgatagaagctctcaaggataatttcaataagactctcaatataaggacctcaccaggatcccttgacaagattgctgtggtaactgctgacgggaagcttgctttaaaccagattagccagatctccatgaagtcgccacagctgattttggtgaatatggccagcttcccagagtgtacagctgcagctatcaaggctataagagaaagtggaatgaatctgaacccagaagtggaagggacgctaattcgggtacccattccccaagtaaccagagagcacagagaaatgctggtgaaactggccaaacagaacaccaacaaggccaaagactctttacggaaggttcgcaccaactcaatgaacaagctgaagaaatccaaggatacagtctcagaggacaccattaggctaatagagaaacagatcagccaaatggccgatgacacagtggcagaactggacaggcatctggcagtgaagaccaaagaactccttggatgaaagtccactggggccagcaatactccagagcccagtttctgctggatcccatgggtggcacattgggacttctctccctcccccatctacacagaagactgtcaccatgctgacagaagcctgtccttgtaaggcccagccttccaggggaacactcagacatgttcattctcttcctgcttctgctctgggccggtgggtggctctcagaaaatacttgctgctggcaaaaggcctgtactcaggcatttgctttgacttgatgttgccaagggactgaggccattggcaggcttagtaccacctgctcctcatcttaggagtctccttttcaaataattaggctctgttcccattttaaaactctgatattggccttcacctgtgactggacactttactagaggcccattttcactaaacaataaaatctaaataaattggaaggaataacaaccacaaaggaaagaatagagttggtctggattgatgatcactgaggatctgtatgtgaggcacccataacagtagttttgcctgtgagtcgtcttcacacatgctgttttctctgcctggctctctcttcccctccttacctggccagtcctgtttatcatcaggccttgtcttggatatcacgtcctctgggaagtcttcttttcccctctaacctaggaccctcattaccggctctcatagcacagtctactgctttgtacgaattctaagtattcttgttgcacttaattagcctgtatatcctcagaactttgtgtaatgcctggagcatagtaggcagtcatatgttgtatcgtgaataaattgcacatagtagctacccagcaaaaaaaaaaaaaaaaaaaaaaaaaaaaaaaaaaaaaaa

SEQ ID NO: 6108 - DNA, 1847 bp, Homo Sapiens
  NM_138778
ccccggaaggagtcgcgagagaggcggcccgcgctgacggtgtccctggggctctgcgctcgtccggccggccccggcctcgccgccccgcgcagtacccagcccggccccgccgacccgcctctactgccggctccgcgcccttccccgagggctggatgatgggctgtttcgccctgcaaacggtggacaccgagctgaccgcggactcggtggagtggtgcccgctgcaaggctgcaggcacctgctggcgtgcgggacctaccagctgcggcggccggaggaccggcctgccggcccccagaacaagggtggaatggaagttaaggagcctcaggtccgtttaggccgtctcttcctgtacagtttcaatgacaacaactctattcaccctctggtcgaggtccaaagaaaagatacttctgcaatcctggacatgaaatggtgtcacatcccggtggctggacatgccctcttgggcttggcagatgccagtggatccatacaactgctccgcctggtggaatctgagaagagccacgtgctggagccattgtccagccttgccctggaggagcagtgtctggctttgtccctagattggtccactgggaaaactggaagggccggggaccagcccttgaagatcatcagcagtgactccacagggcagctccacctcctgatggtgaatgagacgaggcccaggctgcagaaagtggcctcatggcaggcacatcaattcgaggcctggattgctgctttcaattactggcatccagaaattgtgtattcagggggcgacgatggccttctgaggggctgggacaccagggtacccggcaaatttctcttcaccagcaaaagacacaccatgggtgtgtgcagcatccagagcagccctcatcgggagcacatcctggccacgggaagctatgatgaacacatcctactgtgggacacacgaaacatgaagcagccgttggcagatacgcctgtgcagggtggggtatggagaatcaagtggcaccctttccaccaccacctgctcctggccgcctgcatgcacagtggctttaagatcctcaactgccaaaaggcaatggaggagaggcaggaggcgacggtcctgacatctcacacattgcccgactcgctggtgtatggagccgactggtcctggctgctcttccgttctctgcagcgggccccctcgtggtcctttcctagcaacctaggaaccaagacggcagacctgaagggtgcaagcgagttgccaacaccctgtcatgaatgcagagaggataacgatggggagggccatgccagaccccagagtggaatgaagccactcacagagggcatgaggaagaatggcacctggctgcaggctacagcagccaccacacgtgactgtggcgtgaacccagaagaagcagactcagccttcagcctcctggccacctgctccttctatgaccatgcgctccacctctgggagtgggaggggaactgagcttgaaatcatgaagccccttcccacaaggaaaccaggagggagactgcgagtgagtgcccgggaccacctcatcagagatgcttactgcagccctgcaggtgcctgggcactgatggaatccacagtgtagtcagaaaagctgttgacttctcttaaatcagcttccctgctgggcccctgaaagtggactgggtgattctgtctggcagagagtggggaaaagacgcggtttccagcttgcagatttgttaagtttctcaggcagattttgactttcagcctttcatacttgtttaagcaactatttgtattaaatgaagttttttg

SEQ ID NO: 6109 - DNA, 1177 bp, Homo Sapiens
  NM_138779
gtgcgtcgtagccgaacgctgtggcggggcaggcgaggcggtcgcttcgagcgcgctagtcagctccctgaagggagtgacggcggttgggtgcccgcggccacttttgccttcccggggagatgtcctttgcttctcagatgtaaatgcactttaagtttgttattcaacagtgaaaatgagtcatacagaggttaaattaaaaataccttttggaaataaattactagatgctgtttgtttggtacctaacaagagcttaacatatggaataattcttacacatggagcatcaggagatatgaatcttcctcatttgatgtcactggcatcccatcttgcatctcatgggtttttctgcctgagatttacctgtaaaggccttaatattgtacatagaattaaggcgtataaatcagttttgaattacctgaagacatcaggagaatacaaacttgcaggtgtttttcttggaggtcgttcaatgggctcaagagcagctgcttctgtaatgtgtcacattgagccagatgatggtgatgattttgttcggggtctcatttgtatttcttacccactgcaccatccaaagcagcagcataaactcagagatgaagacctctttcgtttaaaagagcctgtactgtttgtgtcaggctcagcagatgaaatgtgtgaaaagaacttgttggagaaagtggcacagaaaatgcaagctccccataaaatccactggattgagaaggcaaatcattccatggcagtgaaaggacggtcgacaaatgatgttttcaaagaaataaatacacagattttgttttggatccaagaaattactgaaatggacaagaaatgtcattagttaaaagccatgttatcttgagtacacatacagttaatttgataaagaagagtatgcctctcagcattgtgagatatatttcagactaatttgatgttctttaatgttcccttatttttgaaacacgttttaaatgtgaaattaatgtccttcacaaaatgtcttttgaaagcactgttacagttgtataaagatgatgtaaaaatattgaaggtggtctacatataatttattttcattagtatagttaagttttgaaaaaaattaaacatctgaattttgttacaaaaaaaaaaaaaaaaaaaaaaaaaaaaa

SEQ ID NO: 6110 - DNA, 1437 bp, Homo Sapiens
  NM_138781
agtgtgtaagacgctcacgggcgcgcggactatcgggcggctaggctctctgaggaggctgccacagtgaagcaaccgtgacaagtggtgcccgaccagggacctgaacgaggaaggtctgccagagcagagaaagtgaaactgatcagacgaactacgaacccctggacgggagagtctgccggcggagaatataaggagatggacaaaccgtgtgggtgccctccaggtgtgtgtgaccatggaacgggagaccggagggatccatggtattcaaccgtgggcctgttacctccagtacgagccatgagccagcggaatctgaatgcaaagacagaacaagggccgaccggagtcacaatgacatccaaccccataacatggggacagatcaagaaaacgacacaagaagctgagaaactactggagcgccagggtcaggcaaaaacccctgactccatgttcttggccatgctagctgtagtgtcctgtgcgtctataggatcgggtgaaccaccaaccggcaattgaaagctgcacagcctgaaattacctttattcaattaatgcaaaaacaaaaggggagatgttggaggccgaaggaatgagggtcgtgaccaactcagtataccactggaggctctgtgagcaaacagcaaactgttctcatgaaagcaggatgttggcgaactgacaaactctgtctgccgccagaaggaatgctgggggcagtcatgtcccaggtcccgtgctccttgaggttatccacaggaacatccagaacctgttgaacaaagaaaggaatcatgtgggcctgtgttaaatcaaatagctgaccgacagttatcccttcctccctattcactctacctaataaatatgaagggctgtaaaagctcaggtccctgttccctaatatcaaggagccccctgaccccttctttcaaacagatccttttgtctgtctcatttctgcattcgtcgtccttcgttcggtccagaagcaaccgcgacagtcctgcatgtgttgatgccacctgtatgtgcaggtgtgacctcaggtgtgtgagtatccctcataccccttatcatcactgcctattcgctcttcctccagcctctggcaaccactaatccacgttatatgtctagatttgcctcttctggacacttcatataaatggagtcatacaatatgtggtttcttgtgtctggctttttaccactgaacgttttcagagttcatccatgttgtagcatgtatcagtttttcattcctctttatggctgaataatactgcattgtatggatataccacagtttgtttactcattagttcatagacattggggttgtttccaactctctgatattataaatgctactgctgtgaaaaaaaaaaaaaaaaaaaaaaaaaaaaaaaaaaaaaaaaaaaa

SEQ ID NO: 6111 - DNA, 837 bp, Homo Sapiens
  NM_138787
ctgggagaggggactcctgcaatgtgtctgtgaataaagactagccgaagatactgtggcctcatgaataggaatgtctgcccatatgtcaggattggaaataatggatgaagatcaattaatcaaagacgtcttggataaattccttaattgtcatgagcaaacatatgatgaagaatttctgaacacttttactcatctttcacaagaggatcatgtgtccaaaaggggagtgtttggaactgattcttcagaaaacatttttacctcagcaaaagttactcataaaaatgaagcagatgactaccatcttagaaataaaaccatctttcttcgtacttcatcacaatgtttggaagaacaggtagataatttcctagatttagaagatttggacatggatgaagagattaaaccccaaatgagtgaggatttgctgctgcttccaggagaagtggagcaggatgtaagcaccagcattccttcctgtatcccttttgtggcccagcctcctacctgtgaagtgaagccaaagcccagtgttaaaagaatggacaaacagacggaagagatacttggagatgaagttcaacttttttcacttgatgaagaatttgattatgacaatgtgatgctaacctccaagtttagtcctgcagagatagagaacatcaaagagctatgcaagcagcagaagagaaaggacaccagcccagacttagagaaatcctgtgactgattcacagaggcattttgtgtgtgtgtgcttattttaattttgttcttattctagcaacattagaataaaagataaacctacaaaaaaaaaaaaaaaaa

SEQ ID NO: 6112 - DNA, 2162 bp, Homo Sapiens
  NM_138792
gcggacgtgagcgataatggcggatatggaggatctcttcgggagcgacgccgacagcgaagctgagcgtaaagattctgattctggatctgactcagattctgatcaagagaatgctgcctctggcagtaatgcctctggaagtgaaagtgatcaggatgaaagaggtgattcaggacaaccaagtaataaggaactgtttggagatgacagtgaggacgagggagcttcacatcatagtggtagtgataatcactctgaaagatcagacaatagatcagaagcttctgagcgttctgaccatgaggacaatgacccctcagatgtagatcagcacagtggatcagaagcccctaatgatgatgaagacgaaggtcatagatcggatggagggagccatcattcagaagcagaaggttctgaaaaagcacattcagatgatgaaaaatggggcagagaagataaaagtgaccagtcagatgatgaaaagatacaaaattctgatgatgaggagagggcacaaggatctgatgaagataagctgcagaattctgacgatgatgagaaaatgcagaacacagatgatgaggagaggcctcagctttccgatgatgagagacaacagctatctgaggaggaaaaggctaattctgatgatgaacggccggtagcttctgataatgatgatgagaaacagaattctgatgatgaagaacaaccacagctgtctgatgaagagaaaatgcaaaattctgatgatgaaaggccacaggcctcagatgaagaacacaggcattcagatgatgaagaggaacaggatcataaatcagaatctgcaagaggcagtgatagtgaagatgaagttttacgaatgaaacgcaagaatgcgattgcatctgattcagaagcggatagtgacactgaggtgccaaaagataatagtggaaccatggatttatttggaggtgcagatgatatctcttcagggagtgatggagaagacaaaccacctactccaggacagcctgttgatgaaaatggattgcctcaggatcaacaggaagaggagccaattcctgagaccagaatagaagtagaaatacccaaagtaaacactgatttaggaaacgacttatattttgttaaactgcccaactttctcagtgtagagcccagaccttttgatcctcagtattatgaagatgaatttgaagatgaagaaatgctggatgaagaaggtagaaccaggttaaaattaaaggtagaaaatactataagatggaggatacgccgagatgaagaaggaaatgaaattaaagaaagcaatgctcggatagtcaagtggtcagatggaagcatgtccctgcatttaggcaatgaagtgtttgatgtgtacaaagccccactgcagggcgaccacaatcatctttttataagacaaggtactggtctacagggacaagcagtctttaaaacgaaactcaccttcagacctcactctacggacagtgccacacatagaaagatgactctgtcacttgcagataggtgttcaaagacacagaagattagaatcttgccaatggctggtcgtgatcctgaatgccaacgcacagaaatgattaagaaagaagaagaacgtttgagggcttccatacgtagggaatctcagcagcgccgaatgagagagaaacagcaccagcgggggctgagcgccagttacctggaacctgatcgatacgatgaggaggaggaaggcgaggagtccatcagcttggctgccattaaaaaccgatataaagggggcattcgagaggaacgagccagaatctattcatcagacagtgatgagggatcagaagaagataaagctcaaagattactcaaagcaaagaaacttaccagtgatgaggaaggtgaaccttccggaaagagaaaagcagaagatgatgataaagcaaataaaaagcataagaagtatgtgatcagcgatgaagaggaagaagatgatgattgaagtatgaaatatgaaaacattttatatattttattgtacagttataaatatgtaaacatgagttattttgattgaaatgaatcgatttgcttttgtgtaattttaattgtaataaaacaatttaaaagcaaaaaaaaaaaaaaaa

SEQ ID NO: 6113 - DNA, 963 bp, Homo Sapiens
  NM_138798
cccgctcaacttcatcctgggttgaggcggaggagaacttccagaattatggcgaagtccgggctgaggcaggacccgcagagcacagctgcagccactgtgctaaagcgggcagtagaactagattcggagtcgcggtatccgcaggctctggtgtgttaccaagaggggattgatctgctcctgcaggttctgaaaggtaccaaagataatactaagagatgtaatctcagagaaaaaatttccaaatacatggacagagcggaaaacataaagaagtacttggaccaagaaaaagaagatggaaaatatcacaagcaaattaaaatagaagagaatgcaacaggtttcagttatgagtcactttttcgcgaataccttaatgagacagttacagaagtttggatagaagatccttatattagacatactcatcagctgtataactttcttcgattttgtgagatgcttattaagagaccatgtaaagtaaaaactattcaccttctcacctctctggatgaaggcattgagcaagtgcagcaaagtagaggcctgcaagaaatagaagagtcactcaggagtcacggagtgctgttggaagttcaatactcttcttcaatacatgaccgagaaattaggttcaacaatggatggatgattaagattggaaggggacttgattattttaagaaaccacagagtcgtttttcccttggatattgtgattttgatttaagaccatgtcatgaaacaacagtagacatttttcataagaagcatacaaaaaatatatgatgggtggtagcctaatttgtattatgtctactttaagtgaatattggattttttttaaaagatcacttttataatgtatgaatttaacaataaacttttatatttctactaaaaaaaaaaaaaaaaaaaaaaaaaaaaaaaaaaaaaaaaaaaaaaaaaaaaaaa

SEQ ID NO: 6114 - DNA, 3804 bp, Homo Sapiens
  NM_138799
ggccttccccgcgcagagctccgaccgcgggcggcccaggggcgggcgcgccgctgcatccccatcctcgtcgtcgcccggcacagcgcgagcgggcgagcggcgcgggcggccggagcgccgaggcccggccatggccaccaccagcaccacgggctccaccctgctgcagcccctcagcaacgccgtgcagctgcccatcgaccaggtcaactttgtagtgtgccaactctttgccttgctagcagccatttggtttcgaacttatctacattcaagcaaaactagctcttttataagacatgtagttgctacccttttgggcctttatcttgcacttttttgctttggatggtatgccttacactttcttgtacaaagtggaatttcctactgtatcatgatcatcataggagtggagaacatgcacaattactgctttgtgtttgctctgggatacctcacagtgtgccaagttactcgagtctatatctttgactatggacaatattctgctgatttttcaggcccaatgatgatcattactcagaagatcactagtttggcttgcgaaattcatgatgggatgtttcggaaggatgaagaactgacttcctcacagagggatttagctgtaaggcgcatgccaagcttactggagtatttgagttacaactgtaacttcatggggatcctggcaggcccactttgctcttacaaagactacattactttcattgaaggcagatcataccatatcacacaatctggtgaaaatggaaaagaagagacacagtatgaaagaacagagccatctccaaatactgcggttgttcagaagctcttagtttgtgggctgtccttgttatttcacttgaccatctgtacaacattacctgtggagtacaacattgatgagcattttcaagctacagcttcgtggccaacaaagattatctatctgtatatctctcttttggctgccagacccaaatactattttgcatggacgctagctgatgccattaataatgctgcaggctttggtttcagagggtatgacgaaaatggagcagctcgctgggacttaatttccaatttgagaattcaacaaatagagatgtcaacaagtttcaagatgtttcttgataattggaatattcagacagctctttggctcaaaagggtgtgttatgaacgaacctccttcagtccaactatccagacgttcattctctctgccatttggcacggggtatacccaggatattatctaacgtttctaacaggggtgttaatgacattagcagcaagagctatgagaaataactttagacattatttcattgaaccttcccaactgaaattattttatgatgttataacatggatagtaactcaagtagcaataagttacacagttgtgccatttgtgcttctttctataaaaccatcactcacgttttacagctcctggtattattgcctgcacattcttggtatcttagtattattgttgttgccagtgaaaaaaactcaaagaagaaagaatacacatgaaaacattcagctctcacaatccaaaaagtttgatgaaggagaaaattctttgggacagaacagtttttctacaacaaacaatgtttgcaatcagaatcaagaaatagcctcgagacattcatcactaaagcagtgatcgggaaggctctgagggctgttttttttttttgatgttaacagaaaccaatcttagcaccttttcaaggggtttgagtttgttggaaaagcagttaactggggggaaatggacagttatagataaggaatttcctgtacaccagattggaaatggagtgaaacaagccctcccatgccatgtccccgtgggccacgccttatgtaagaatatttccatatttcagtgggcactcccaacctcagcacttgtccgtagggtcacacgcgtgccctgttgctgaatgtatgttgcgtatcccaaggcactgaagaggtggaaaaataatcgtgtcaatctggatgatagagagaaattaacttttccaaatgaatgtcttgccttaaaccctctatttcctaaaatattgttcctaaatggtattttcaagtgtaatattgtgagaacgctactgcagtagttgatgttgtgtgctgtaaaggattttaggaggaatttgaaacaggatatttaagagtgtggatatttttaaaatgcaataaacatctcagtatttgaagggttttcttaaagtatgtcaaatgactacaatccatagtgaaactgtaaacagtaatggacgccaaattataggtagctgattttgctggagagtttaattaccttgtgcagtcaaagagcgcttccagaaggaatctcttaaaacataatgagaggtttggtaatgtgatattttaagcttattctttttcttaaaagagagaggtgacgaaggaaggcaggaatgaagaagcactgcgtggcctccggtggaatgcacggggcacagccgcgactctgcaggcagcttcccccccatgccagggctctgcgccgtcatgtgagacttaaaaaaaaagttgaatgacttcgtgatactttggacttctaaattaaatttatcaggcataaattatgtagaattagaggctttgaaaataatactggtaggttgctcaaaggttttgaaagagaaatcgctaggtaggttactatctggctaatccatttcttatccttgacaatttaattcatatttgggaaacttttagggaaatgaaaaataaaagtcactgagtctgggtgacattttttaagaataatataaattcagtttcaaactcttctcacattaaaattttgctgtgaactcttactaaaatgagttttaggttctgtaagtggaaaaatgtgcttttattttatgggccatttttaccacaactaatcttgccttggattactaagcatctcctgcgatcccacagaggactgtggtggccacaggagctgaaagcagaagagtgggatttgatgccaggcagtggagtggcctcagccccagattgtacctcctgccctgtaggaggggagggggcaaagccttctgacttcacctttgtttgacctatgtatggaacttacttttactttttgccttaaatttttaatgaaatgcaaattttctgtgatggggttctctctctctttttttcggggggtggagtcactaataaatttgcaaatgaagttaaagacaaggcaaccatctggcttatgctatataatacttcatttaaagaagaaaggaaaagcaaatgcacttgcagcttttgaggtctcagcaaaaatgggcatgtgtcttttttgaagtttagaaatatcctaatctatttttatttatctaaaagtaagtgttttccggctgataaggctaaccctacccaggaaaggattgataactaaataaatttcctctgttttcccatgcattgaaattatgttggctgagcatggtggctcacacctgtaatcctagcactttgggaggccgaggtgggcggatcacttgaggtcaggagttggagaccagcctggccaacgtggtgaatccccgtctctactgaaaacacaaaaattagacgggcatggtggcgcacacctgtaatcccagctacttgggaggctgaggcaggagaattgcttgaacctgggaggtggaggttgcagtgagctaaaattgtgccactgcactccagcctgggtgacagaggaagactccgtctcac

SEQ ID NO: 6115 - DNA, 2272 bp, Homo Sapiens
  NM_138806
attgctgtgtcaagttccagagaaaagcttctgttcgtccaagttactaaccaggctaaaccacatagacgtgaaggaaggggctagaaggaagggagtgccccactgttgatggggtaagaggatcctgtactgagaagttgaccagagagggtctcaccatgcgcacagttccttctgtacctgtgtggaggaaaagtactgagtgaagggcagaaaaagagaaaacagaaatgctctgcccttggagaactgctaacctagggctactgttgattttgactatcttcttagtggccgaagcggagggtgctgctcaaccaaacaactcattaatgctgcaaactagcaaggagaatcatgctttagcttcaagcagtttatgtatggatgaaaaacagattacacagaactactcgaaagtactcgcagaagttaacacttcatggcctgtaaagatggctacaaatgctgtgctttgttgccctcctatcgcattaagaaatttgatcataataacatgggaaataatcctgagaggccagccttcctgcacaaaagcctacaagaaagaaacaaatgagaccaaggaaaccaactgtactgatgagagaataacctgggtctccagacctgatcagaattcggaccttcagattcgtaccgtggccatcactcatgacgggtattacagatgcataatggtaacacctgatgggaatttccatcgtggatatcacctccaagtgttagttacacctgaagtgaccctgtttcaaaacaggaatagaactgcagtatgcaaggcagttgcagggaagccagctgcgcatatctcctggatcccagagggcgattgtgccactaagcaagaatactggagcaatggcacagtgactgttaagagtacatgccactgggaggtccacaatgtgtctaccgtgacctgccacgtctcccatttgactggcaacaagagtctgtacatagagctacttcctgttccaggtgccaaaaaatcagcaaaattatatattccatatatcatccttactattattattttgaccatcgtgggattcatttggttgttgaaagtcaatggctgcagaaaatataaattgaataaaacagaatctactccagttgttgaggaggatgaaatgcagccctatgccagctacacagagaagaacaatcctctctatgatactacaaacaaggtgaaggcatctgaggcattacaaagtgaagttgacacagacctccatactttataagttgttggactctagtaccaagaaacaacaacaaacgagatacattataattactgtctgattttcttacagttctagaatgaagacttatattgaaattaggttttccaaggttcttagaagacattttaatggattctcattcatacccttgtataattggaatttttgattcttagctgctaccagctagttctctgaagaactgatgttattacaaagaaaatacatgcccatgaccaaatattcaaattgtgcaggacagtaaataatgaaaaccaaatttcctcaagaaataactgaagaaggagcaagtgtgaacagtttcttgtgtatcctttcagaatattttaatgtacatatgacatgtgtatatgcctatggtatatgtgtcaatttatgtgtccccttacatatacatgcacatatctttgtcaaggcaccagtgggaacaatacactgcattactgttctatacatatgaaaacctaataatataagtcttagagatcattttatatcatgacaagtagagctacctcattctttttaatggttatataaaattccattgtatagttatatcattatttaattaaaaacaaccctaatgatggatatttagattcttttaagttttgtttatttcttttaagttttgtttgtggtataaacaataccacatagaatgtttcttgtgcatatatctctttgtttttgagtatatctgtaggataactttcttgagtggaattgtcaggtcaaagggtttgtgcattttactattgatatatatgttaaattgtgtcaaatatatatgtcaaattccctccaacattgtttaaatgtgcctttccctaaatttctattttaataactgtactattcctgcttctacagttgccactttctctttttaatcaaccagattaaatatgatgtgagattataataagaattatactatttaataaaaatggatttatattttt

SEQ ID NO: 6116 - DNA, 1270 bp, Homo Sapiens
  NM_138807
ctctgcctgtgcgaccgccgcccacccgagcctatctgggctgcgtcttctcgccgctgctcttcgtggcccaacgccccaatccttgcgtgtgcttgcagtcccaccccacactcagccttgtgtccctcgatccagtctccgacttccatttcccaccctaaaccgcctacccggtgtctgttccccgcccggttgtcctcgccctgctgcgctgagtgtcccctgttagcctcgaccccatggcgctgcagacgctgcagagctcgtgggtgaccttccgcaagatcctgtctcacttccccgaggagctgagtctggctttcgtctacggctccggggtgtaccgccaggcagggccgagttcagaccagaagaatgctatgctggactttgtgttcacagtagatgaccctgtcgcatggcattcaaagaacctgaagaaaaattggagtcactactctttcctaaaagttttagggcccaagattatcacgtccatccagaataactatggcgctggagtttactacaattcattgatcatgtgtaatggtaggcttatcaaatatggagttattagcactaacgttctgattgaagatctcctcaactggaataacttatacattgctggacgactccaaaaaccggtgaaaattatctcagtgaacgaggatgtcactcttagatcagccctcgatagaaatctgaagagtgctgtgaccgctgctttcctcatgctccccgaaagcttttctgaagaagacctcttcatagagattgccggtctctcctattcaggtgactttcggatggtggttggagaagataaaacaaaagtgttgaatattgtgaagcccaatatagcccactttcgagagctctatggcagcatactacaggaaaatcctcaagtggtgtataaaagccagcaaggctggctggagatagataaaagcccagaaggacagttcactcagctgatgacattgcccaaaaccttacagcaacagataaatcatattatggaccctcctggaaaaaacagagatgtggaagaaactttattccaagtggctcatgatcccgactgtggagatgtggtgcgactaggcctgaagaagtcagtgatttatagttcactaaaactgcacaaaatgtggaaagggtggctgaggaaaacatcctgattttgcttgcttttatatatgttatgtgtagatgaataaagtgtttgatcctttttgacaaaaaaaaaaaaaaaaaa

SEQ ID NO: 6117 - DNA, 4047 bp, Homo Sapiens
  NM_138809
tcccttcctctctgcggttccctccctcccaccccctctccctgcacctttctttatcttggagcctctcccatctctccctccctcttcctccctaccccaccctccgaccaccccacttcttcccctcccctcacacttccctccctcccttctctcgtctcctccccactgcgcctccctccctcctggccttccttcccttccccgactttgcagatttctcttcccccaggcctccctcctccacctctccgccccctccgggcttggctctcccaggaggctacgactggagccactggtcccgcaggatccccgcgtcctcggtcgccgcgtccacgtccctctcgcgtccccgcccggcgccacgccgcctcctctgggttcggcctccgcgcggtgcagcgcagtctcaggccgcgggacaagcccgacttaaatctctgcaatggctaacgaagcttatccttgtccgtgtgacattggccacagacttgagtatggagggctaggccgtgaagttcaagtcgagcacatcaaggcttatgtcaccaaatcccccgttgatgcaggcaaagctgtgattgtcattcaagatatatttggctggcagttgcccaataccagatatatagctgacatgatctcaggaaatggatacacaaccattgttccagacttctttgtagggcaagagccttgggacccctctggcgactggtctatcttccctgagtggctgaaaacaagaaatgcccagaagatcgatagagagatcagtgctatcttgaagtatctgaaacaacagtgtcatgcccagaaaattggcatcgtgggattctgctggggtggaactgctgtccatcatttgatgatgaaatactcagaattcagggcaggggtgtccgtctatggcattgtcaaggattctgaagacatttacaatttaaagaaccccactttgttcatttttgctgaaaatgatgttgtgattccactcaaggacgtatctttgctgactcagaagttgaaagaacactgcaaagttgaatatcaaattaaaacattttctgggcagactcatgggttcgtgcatcggaagagagaagattgctcacctgcagacaagccctacattgacgaggccagaaggaatttaattgagtggctgaacaagtacatgtagcaagaatcaagggcaagccttcctagaatagctttcatcccaaaatttgcttggaaatagttagatcatttgatttaattttcacttttataaaataagtgtaggaatcctaaaattgattatttcatttgaaacacaaattcagtaggacgtaatgcatgaaataatttaatttttgacatgtacatcgaatcataatttaaaaacaaggtctgaccaggtgtagtgcctcatgcctgtaattccagcactttgggaggccaaagtgggtggatcacctgaggtcaggagtttgagaccagcctggccaacatggtgagaccccatctctacaaaaaatacaaaaattagcctggtgtggtggtgcacgcctgtagtcccagctacttgggaggctgaggcacaagaatcaatagaacccaggaggtggagactgcagtgagccaagattgtgccactactgtactctagcctgggcagcagagtgagaccctgtctcaaaaataaataagtaaataaataaataaataaaataaaaaccaggtcagtacctggagaatttgaatgatagagaatgatagagtaataccctaattattagttaaaacctacaggccgggtgcggtggctcacgcctgtaatcccagcactttgggaggccgaggtgggtggatcacttgaggtcaggagttcaagaccagcctggccaacatggtgaaaccccatctctactaaaaatataaaaatcagccgggcatggtggcatgtgcctgtaatcccagctactcaggagtctgaggaggagaatcacttgaacctggaggcagaggttgcagtgagtcgaggttgcgctactgcactccagcctggacaacagagggagactctgtctcaaaaaaaaaaaaaaacctacagctgttcaaggaccagctgacaggtcaagtgtggccttttctggtctttgaacacatcatagaaagtgacaaatgctgcaaagccatgaagaacatgaactataaacgggtagactaactgcccagcttagacacttatctatgccacaaaacagctgaatttgtcacatttatatattgcaatatgggaagtattgagatcaaaacaggattccattgacctaattatattaagctaataaactaattttttgaatttttgaatttgcagcttttttaaaaagatagcagagaacggtgggctagagttgtcacccagctgttgtctcctaagcagtggatttccaagcactggcatttttgggtcccagggcctgaggctacctcagaaatatctcctgtgtttctggtggtggcgtaaaggggagagccggtgagaaactctgcacctgcacctacggggtgcgtacatgtgactttgggcaagtgacttgatgttgtagtttttttcctaattttgtcttgacgtccttctcaggagagagtggctgtaaactctagccctgccctgacggggatcctggggatgtggtcgtgggtgtttcccatgtgcctttcatgggatccttctttgacctcacagacggcctgattcctgagtgtccaacctgtggccaggtgtccctctcgcaggaagcttgtttatcctggcacatgaccttgtggctctcatctgacctgtgtccagtttattcctactgagacagccactctcccggagagccctgaccgggaaagaagttaggatggggtagaggaggcaactcatcagaacccaagaaatgacagaagcagtttattgcttacagatccagagaacagagggcagcacgcttcacagggccagcaaaaagggggagccattcaggacacatgggctcaaccagaaggtggagaacgagagagagagggagctatgagccaaagccttcactggggcccagggtgtcatctatgcaggtttcccctggaggttctaactggggggtttagagcaagcaggcatgagccccggggactcacgctgtgactgagaggggtcggtgtgggtaggatatcggcatggtccatgtgggtgtgggggtcagtgggacaagtcaagcaggtggtatccagctgtccatgggaaggtggtcccaggaggcggttttgtaaggcagatgtctggatcgaccaccttggggaacagtgagaagttgtataactggaaactgtgttactaatccctgcttctagtatgagaaagtccaacttacattcaaatagatgctcaggaaacataaaattcaaagaattcccaaacttgagcttcctgagcctcagtttttgcatctgtcaaatgggtatggggagaccctttgcctaatgttgagagaatccaagcctgagcagggctggtctactgtggacacttagttgtggaccccaacaggccaaagcccttgcctgctgagggctgctcccaggaggcctcacacattcatccggcctcccaggaaacccctgagatgtgctgggcttttgccgtggaacggtgtcggtgagcatgtggccagtagccagagtcttcaacataggtgggaggtctgaaattcgtgcgagaatgaaccaagggtgtggctgtatccttcatggtgagcttggggcctgggcagccttccctctgctgagtcctttggtcaaatgtcatggtgttctgaaccagcactgcagatagaagtataatgtaagtcacacacgtacttctttaaaaagatatgttcttcagtgactattagacaaacagataaatgaaggtaaagggaaaaaatggcaactttagcttttttccccatgtatgtaattttaaattttcttatagccccattaaaaaaaggaaagaga

SEQ ID NO: 6118 - DNA, 1344 bp, Homo Sapiens
  NM_138810
gacatagctgccctaaaaggaatgaggaagcgagagctctccagtgtctggctggctccgtccgtgtgacagcccatgatgttctttccggtctctgtaatattctgaatttccacctgcccgccccttcgcttataatgcagagcatgtgaagggagaccggctcggtctctctctctcccagtggactagaaggagcagagagttatgctgtttctcccattctttacagctcaccggatgtaaaagaactctggctagagaccctccaaggacagaggcacagccacacgggagtgaaatccacccctggacagtcagccgcaatactgatgaagctgagaagcagccacaatgcttcaaaaacactaaacgccaataatatggagacactaatcgaatgtcaatcagagggtgatatcaaggaacatcccctgttggcatcatgtgagagtgaagacagtatttgccagctcattgaagttaagaagagaaagaaggtgctgtcctggccctttctcatgagaaggctctcccctgcatcagatttttctggggctttggagacagacttgaaagcatcgctatttgatcagcccttgtcaattatctgcggtgacagtgacacactccccagacccatccaggacattctcactattctatgccttaaaggcccttcaacggaagggatattcaggagagcagccaacgagaaagcccgtaaggagctgaaggaggagctcaactctggggatgcggtggatctggagaggctccccgtgcacctcctcgctgtggtctttaaggacttcctcagaagtatcccccggaagctactttcaagcgacctctttgaggagtggatgggtgctctggagatgcaggacgaggaggacagaatcgaggccctgaaacaggttgcagataagctcccccggcccaacctcctgctactcaagcacttggtctatgtgctgcacctcatcagcaagaactctgaggtgaacaggatggactccagcaatctggccatctgcattggacccaacatgctcaccctggagaatgaccagagcctgtcatttgaagcccagaaggacctgaacaacaaggtttgttctgcttactgatgagaaatccccaacttatgatctcaccatctgtttgccaagtccaggcaataaaatgcttcagaatgtctccaactgactcagaatcacagtgaaaatataaaatgcaaaatgcttttgtcatagttccactctctcagatacatgtatctaatgaaactgaataaatccgtgtcttctgtcaaaaaaaaaaaaaaaaaaaaaaaaaaaa

SEQ ID NO: 6119 - DNA, 1393 bp, Homo Sapiens
  NM_138815
agccctttgtttatggcctgatctagctaaggcttctagacttcaggagcttaagaatcgtccggagggctgggcgtggcggtgcaggcctgtagtcccacccactccgaaggctgcggagggaggatcaacttgagtctgggaactcagccaggaattcaagaccagcctgggcaacacagtgaggccccctacccacatcctctccgtccccgcaatctccttccatcccagggtgttgctgaaaatgtcagatgcaaatttggatagcagcaagaagaatttcttggagggggaagtagatgatgaggaaagtgtgattttgacactggtgccagttaaagatgacgcaaatatggaacaaatggaaccaagcgtttcttcaacttctgatgtcaaactggagaagcctaagaaatacaatccaggtcatctacttcaaacaaatgagcaatttacagctccacaaaaagctagatgcaaaataccagcccttcccttgccgaccattttgcctcccattaataaggtgtgtcgggacactttgcgggactggtgtcaacaactcggtttgagtactaatggcaagaaaatcgaagtttatctgaggcttcataggcatgcttaccctgaacaacggcaagatatgcctgaaatgtcacaagagaccagattacagcgatgttcgaggaaacgcaaggcagtgaccaagagagcaaggcttcagagaagttatgagatgaatgagagagcagaagagaccaatacagttgaagtgataacttcagcaccgggagccatgttggcatcatgggcaagaattgctgcaagagctgttcagcctaaggctttgaattcatgttccattcctgtttctgttgaggcctttttgatgcaagcctctggcgtcaggtggtgtgtggtccatggcagacttctctcggcagacacaaagggttgggtacgcctgcagtttcatgcaggtcaggcctgggtgcctaccactcacaggaggatgatttctctcttcttgttacctgcctgcattttcccatccccaggcatagaagataatatgttatgccccgactgtgctaagaggaataagaagatgatgaaaagattaatgacagtagagaagtagcagcaacctgtttgaatacaatgtactaaaggagggatgtactttcagatcatgtaacctattacgaaggagtggaagaggagacaatttgaatgaatcctcatgatctacaaaacaaaatcatagtgactaggactccacagtgaagatggttgactagtgacacagccccatctaaagaatccctttctgtatgtctgaaaacccattaaaataaagtcactgcaattggccttgtaaaaaaaaaaa

SEQ ID NO: 6120 - DNA, 628 bp, Homo Sapiens
  NM_138820
cggagtcccgattttctcctgctgctgtggcccggacatggcgactcccggccctgtgattccggaggtcccctttgaaccatcgaagcctccagtcattgaggggctgagccccactgtttacaggaatccagagagtttcaaggaaaagttcgttcgcaagacccgcgagaacccggtggtacccataggttgcctggccacggcggccgccctcacctacggcctctactccttccaccggggcaacagccagcgctctcagctcatgatgcgcacccggatcgccgcccagggtttcacggtcgcagccatcttgctgggtctggctgtcactgctatgaagtctcgaccctaagcccagggtctggccttgaaagctccgcagaaatgattccaaaacccagggagcaaccactggccctaccgtgggacttactccctcctctcctttgagaggcccatgtgtcgctggggaggaagtgaccctttgtgtaactgtaaccgaaagttttttcaaaaatcctagatgctgttgtttgaatgttacatacttctatttgtgccacatctcccctccactcccctgcttaataaactctaaaaatccaaaaaaaaaaaaaaaaaa

SEQ ID NO: 6121 - DNA, 5035 bp, Homo Sapiens
  NM_138821
gttctgaatgatgactgacgcgggtttgggtgatacccctcacagcccctgtcattccggagtcataaggcacccgcgcgtctagccccagcgccagggcacgcgagcggcgctggagggaggaaagcttccgcctgcgggccggacaaaagtcccgcctgcccacggctttttgcccgccgctcgtgaccgagacgcctcgccgcggccagctcgctgctctcgctggcggatggtgtgtggccgccgcaggacgcccgccgtgcccgggccatgaagtagcggctgctggcggcgccgctgcccaaccgccagccccagccccgcgctgcgctgcccggtcctctcccggcggggtcgtatcggcgtggacatggctggccgcgtccctagcctgctagttctccttgtttttccaagcagctgtttggctttccgaagcccactttctgtctttaagaggtttaaagaaactaccagaccattttccaatgaatgtcttggtaccaccagacccgtagttcctattgattcatcagattttgcattggatattcgcatgcctggggttacacctaaacagtccgatacatacttctgcatgtctatgcgaataccagtggatgaggaagccttcgtgattgacttcaagcctcgagccagcatggatactgtccatcacatgttactttttggatgcaatatgccttcatccactggaagttactggttttgtgatgaaggaacctgtacagataaagccaatattctgtatgcctgggcgagaaatgctccccctacccggctccccaaaggtgttggattcagagttggaggagagactggaagtaaatactttgtactacaggtacactatggggatattagtgcttttagagataataacaaggactgttctggtgtgtccttacacctcacacgtctgccacagcctttaattgctggcatgtaccttatgatgtctgttgacactgttatcccagcaggagaaaaagtggtgaattctgacatttcatgccattataaaaattatccaatgcatgtctttgcctatagagttcacactcaccatttaggtaaggtagtaagtggatacagagtaagaaatggacagtggacactgattggacggcagagccctcagctgccacaggctttctaccctgtggggcatccagttgatgtaagttttggtgacctactggctgcaagatgtgtattcactggtgaaggaaggacagaagccacacacattggtggcacgtctagtgatgaaatgtgcaacttatacattatgtattacatggaagccaagcatgcagtttctttcatgacctgtacccagaatgtagctccagatatgttcagaaccataccaccagaggccaacattccaattcccgtgaagtctgatatggttatgatgcatgaacatcataaagaaacagaatataaagataagattcctttactacagcagccaaaacgagaagaagaagaagtgttagaccaggatttccacatggaagaggcactggattggcctggagtatacttgttaccaggccaggtttctggggtggctctagaccctaagaataacctggtgattttccacagaggtgaccatgtctgggatggaaactcgtttgacagcaagtttgtttaccagcaaataggactcggaccaattgaagaagacactattcttgtcatagatccaaataatgctgcagtactccagtccagtggaaaaaatctgttttacttgccacatggcttgagtatagataaagatgggaattattgggtcacagacgtggctctccatcaggtgttcaaactggatccaaacaataaagaaggccctgtattaatcctgggaaggagcatgcaaccaggcagtgaccagaatcacttctgtcaacccactgatgtggctgtggatccaggcactggagccatttatgtatcagatggttactgcaacagcaggattgtgcagttttcaccaagtggaaagttcatcacacagtggggagaagagtcttcagggagcagtcctctgccaggccagttcactgttcctcacagcttggctcttgtgcctcttttgggccaattatgtgtggcagaccgggaaaatggtcggatccagtgttttaaaactgacaccaaagaatttgtgagagagattaagcattcatcatttggaagaaatgtatttgcaatttcatatataccaggcttgctctttgcagtgaatgggaagcctcattttggggaccaagaacctgtacaaggatttgtgatgaacttttccaatggggaaattatagacatcttcaagccagtgcgcaagcactttgatatgcctcatgatattgttgcatctgaagatgggactgtgtacattggagatgctcataccaacaccgtgtggaagttcaccttgactgagaaattggaacatcgatcagttaaaaaggctggcattgaggtccaggaaatcaaagaagccgaggcagttgttgaaaccaaaatggagaacaaacccacctcctcagaattgcagaagatgcaagagaaacagaaactgatcaaagagccaggctcgggagtgcctgttgttctcattacaacccttctggttattccggtggttgtcctgctggccattgccatatttattcggtggaaaaaatcaagggcctttggagattctgaacacaaactcgagacgagttcaggaagagtactgggaagatttagaggaaagggaagtggaggcttaaaccttggtaatttctttgcaagccgtaagggctacagtcgaaaagggtttgaccggcttagcactgagggcagtgaccaagagaaagaggatgatggaagtgaatcagaagaggagtattcagcacctctgcctgcgctcgcaccttcctcctcctgaaaaccaagctttgatttagattgagtaagatttacccagaatgtcagattcctttccctttagcacgtttaaagttctgtgtatttaattgtaaactgtactagtctgtgtgggactgtacacactttatttacttcgttttggttaagttggcttctgtttctagttgaggagtttcctaaaagttcataacagtgccattgtctttatatgaacatagactagagaaaccgtcctctttttccatcataattctaatctaacaatggaagatttgcccatttacacttttgagactttttggtggatgtaaataaccccattctttgcttgaacacagtattttcccaatagcactttcattgccagtgtctttctttggtgcctttcctgttcagcattcttagcctgtggcagtaaagagaaactttgtgctacatgacgacaaagctgctaaatctcctatttttttaaaatcactaacattatattgcaatgaaggaaataaaaaagtctctatttaaattcttttttaaattttcttcagttggtgtgtttttgggatgtcttatttttagatggttacactgttagaacactattttcagaatctgaatgtaatttgtgtaataaagtgttttcagagcattagctgtcagtgtattttccagtttttgcgtatttgcagattttacatacaacttttataataattacacaaacccacaaatattagtgaaacttactcgatgtcttcaactaaaagaaatgtgtgtattgtacaaaatttagaagatactttagccaatataaattaaaaaccagcctgagtttacataaatttgtaaagtcaggctcttctaaaatccaaagagggtttttgcctatatatcaatcagaggataaatactttaataaaaggtaatcacagctaagtggatacctgtgtctcaaattacatatgcaaatgatccatcagtagggatcactaataatagttttccttttaaaaaataatttcagggcaggtacagtggctcaagcctatacttccaggactttgggaggccaagcagaaggattgtgggaggccaagcagaaggattgtttgagcccagaaattcaaggctgcagtgagctatgatcaatccactgtactccagcctaggctacagagtgagatcctttctctaaaataaaatacaatttccatgtatccataggaatatattcatcttttacagtgattgcagattagttttaaaacgtctttttcgtaattcgtcaatgcaagttagtaagaaccagataattttccattttaaaatgataggaatctaaaactctttttcaaaaatgccaacctgtttttccggcatcatagtagttggaataatacagatataattgactaatcataaagtacatgagagtacagaagggaaatttggaaacggtaagtctgctagggcattacaatcctgtcctagcactccacctttattctgccaacctgggttaattaaagatggtagcctggaaagtaatgaatgacattgacttcaggcaatctttccactgattattcttggctgaacttcatttatcgagtcagagaatgcactgcctgagaaatgtcccagaggagtgaatcctaggcctggccacagtagaatcgcctggagaatttaagaaaaaaattgttgggcactcactctttccagtgatctttatttagttggcttacaatggaatacaggtatggttcatgtttttaaatttgtccaggtgtttctattgtgcagtcacagttgaaaaccattgtcttcgagaatagctattctatcttgccagttacaataagtggatagctatattttcacataaattatagtttacagatgtttggagggggaagacaggatctgaggtgttttgatatgactgttagcaccaaaatctgaatgccttaattgttgaatgtgttaaattggataattaaaatgggcataaatgacttattaaaaaagcaaagggaaaaaaaaaaaaaaaaaaaaaaaa

SEQ ID NO: 6122 - DNA, 1469 bp, Homo Sapiens
  NM_138930
acttccggcgtgtgcgtctggcgtccgcgcgctgcacaatggcggctctgaagagttggctgtcgcgcagcgtaacttcattcttcaggttcctgcttggctcgagtttgagtttacagcccctgcaagtaaatccaagagcctgttacagattggcggtcgtgccttatgaaatctgacttctacttccagaaatcagagcctcattcccttagtagtgaagcattgatgaggagagcagtgtctttggtaacagatagcacctctacctttctctctcagaccacatatgcgttgattgaagctattactgaatatactaaggctgtttataccttaacttctctttaccgacaatatacaagtttacttgggaaaatgaattcagaggaggaagatgaagtgtggcaggtgatcataggagccagagctgagatgacttcaaaacaccaagagtacttgaagctggaaaccacttggatgactgcagttggtctttcagagatggcagcagaagctgcatatcaaactggcgcagatcaggcctctataaccgccaggaatcacattcagctggtgaaactgcaggtggaagaggtgcaccagctctcccggaaagcagaaaccaagctggcagaagcacagatagaagagctccgtcagaaaacacaggaggaaggggaggagcgggctgagtcggagcaggaggcctacctgcgtgaggattgagggcctgagcacactgccctgtctccccactcagtggggaaagcaggggcagatgccaccctgcccagggttggcatgactgtctgtgcaccgagaagaggcggcagatcctgccctggccaatcaggcgagacgcctttgtgagctgtgagtgcctcctgtggtctcaggcttgcgctggacctggttcttagcccttgggcactgcaccctgtttaacatttcaccccactctgtacagctgctcttacccattttttttacctcacacccaaagcattttgcctacctgggtcagagagaggagtcctttttgtcatgcccttaagttcagcaactgtttaacctgttttcagtcttatttacgtcgtcaaaaatgatttagtacttgttccctctgttgggatgccagttgtggcagggggaggggaacctgtccagtttgtacgatttctttgtatgtatttctgatgtgttctctgatctgcccccactgtcctgtgaggacagctgaggccaaggagtgaaaaacctattactactaagagaaggggtgcagagtgtttacctggtgctctcaacaggacttaacatcaacaggacttaacacaggcctcttgttccttcctttctttccgtttctctattgtatccaaaggagaagagtgtaagattttgtttgcatctgaaagagaaaatgcgtctctcctggggtcctaaaaaaaaaaaaaaaaaaaaaa

SEQ ID NO: 6123 - DNA, 3630 bp, Homo Sapiens
  NM_138931
ggtattccagaagtgtttgaggatcccttccatgaaggaagagaggaaagtttttaagtaaacctcccactcccatgtgtcttcagctttcttttgcaaaggagaaaatccttgaagtttggtaaagaccgagttagtctatctctctttgcctatctcgagttgggctggggagaggaggagataggttcttttgtctttttctgtcttctcccttccccacttccttccctccagtccccactcactcacatgcacacactaaccttggagccgatgggattgagtgactggcacttgggaccacagagaaatgtcagagtgtttggttacagactcaaggaaacctctcattttagagtgctcatttggttttgagcaaaattttggactgtgaagcaaggcattggtgaagacaaaatggcctcgccggctgacagctgtatccagttcacccgccatgccagtgatgttcttctcaaccttaatcgtctccggagtcgagacatcttgactgatgttgtcattgttgtgagccgtgagcagtttagagcccataaaacggtcctcatggcctgcagtggcctgttctatagcatctttacagaccagttgaaatgcaaccttagtgtgatcaatctagatcctgagatcaaccctgagggattctgcatcctcctggacttcatgtacacatctcggctcaatttgcgggagggcaacatcatggctgtgatggccacggctatgtacctgcagatggagcatgttgtggacacttgccggaagtttattaaggccagtgaagcagagatggtttctgccatcaagcctcctcgtgaagagttcctcaacagccggatgctgatgccccaagacatcatggcctatcggggtcgtgaggtggtggagaacaacctgccactgaggagcgcccctgggtgtgagagcagagcctttgcccccagcctgtacagtggcctgtccacaccgccagcctcttattccatgtacagccacctccctgtcagcagcctcctcttctccgatgaggagtttcgggatgtccggatgcctgtggccaaccccttccccaaggagcgggcactcccatgtgatagtgccaggccagtccctggtgagtacagccggccgactttggaggtgtcccccaatgtgtgccacagcaatatctattcacccaaggaaacaatcccagaagaggcacgaagtgatatgcactacagtgtggctgagggcctcaaacctgctgccccctcagcccgaaatgccccctacttcccttgtgacaaggccagcaaagaagaagagagaccctcctcggaagatgagattgccctgcatttcgagccccccaatgcacccctgaaccggaagggtctggttagtccacagagcccccagaaatctgactgccagcccaactcgcccacagagtcctgcagcagtaagaatgcctgcatcctccaggcttctggctcccctccagccaagagccccactgaccccaaagcctgcaactggaagaaatacaagttcatcgtgctcaacagcctcaaccagaatgccaaaccagaggggcctgagcaggctgagctgggccgcctttccccacgagcctacacggccccacctgcctgccagccacccatggagcctgagaaccttgacctccagtccccaaccaagctgagtgccagcggggaggactccaccatcccacaagccagccggctcaataacatcgttaacaggtccatgacgggctctccccgcagcagcagcgagagccactcaccactctacatgcaccccccgaagtgcacgtcctgcggctctcagtccccacagcatgcagagatgtgcctccacaccgctggccccacgttccctgaggagatgggagagacccagtctgagtactcagattctagctgtgagaacggggccttcttctgcaatgagtgtgactgccgcttctctgaggaggcctcactcaagaggcacacgctgcagacccacagtgacaaaccctacaagtgtgaccgctgccaggcctccttccgctacaagggcaacctcgccagccacaagaccgtccataccggtgagaaaccctatcgttgcaacatctgtggggcccagttcaaccggccagccaacctgaaaacccacactcgaattcactctggagagaagccctacaaatgcgaaacctgcggagccagatttgtacaggtggcccacctccgtgcccatgtgcttatccacactggtgagaagccctatccctgtgaaatctgtggcacccgtttccggcaccttcagactctgaagagccacctgcgaatccacacaggagagaaaccttaccattgtgagaagtgtaacctgcatttccgtcacaaaagccagctgcgacttcacttgcgccagaagcatggcgccatcaccaacaccaaggtgcaataccgcgtgtcagccactgacctgcctccggagctccccaaagcctgctgaagcatggagtgttgatgctttcgtctccagccccttctcagaatctacccaaaggatactgtaacactttacaatgttcatcccatgatgtagtgcctctttcatccactagtgcaaatcatagctgggggttgggggtggtgggggtcggggcctgggggactgggagccgcagcagctccccctcccccactgccataaaacattaagaaaatcatattgcttcttctcctatgtgtaaggtgaaccatgtcagcaaaaagcaaaatcattttatatgtcaaagcaggggagtatgcaaaagttctgacttgactttagtctgcaaaatgaggaatgtatatgttttgtgggaacagatgtttcttttgtatgtaaatgtgcattcttttaaaagacaagacttcagtatgttgtcaaagagagggctttaatttttttaaccaaaggtgaaggaatatatggcagagttgtaaatatataaatatatatatatataaaataaatatatataaacctaacaaagatatattaaaaatataaaactgcgttaaaggctcgattttgtatctgcaggcagacacggatctgagaatctttattgagaaagagcacttaagagaatattttaagtattgcatctgtataagtaagaaaatattttgtctaaaatgcctcagtgtatttgtatttttttgcaagtgaaggtttacaatttacaaagtgtgtattaaaaaaaacaaaaagaacaaaaaaatctgcagaaggaaaaatgtgtaattttgttctagttttcagtttgtatatacccgtacaacgtgtcctcacggtgccttttttcacggaagttttcaatgatgggcgagcgtgcaccatccctttttgaagtgtaggcagacacagggacttgaagttgttactaactaaactctctttgggaatgtttgtctcatcccattctgcgtcatgcttgtgttataactactccggagacagggtttggctgtgtctaaactgcattaccgcgttgtaaaatatagctgtacaaatataagaataaaatgttgaaaagtcaaactggaaaaaaaa

SEQ ID NO: 6124 - DNA, 1499 bp, Homo Sapiens
  NM_138957
gcccctccctccgcccgcccgccggcccgcccgtcagtctggcaggcaggcaggcaatcggtccgagtggctgtcggctcttcagctctcccgctcggcgtcttccttcctcctcccggtcagcgtcggcggctgcaccggcggcggcgcagtccctgcgggaggggcgacaagagctgagcggcggccgccgagcgtcgagctcagcgcggcggaggcggcggcggcccggcagccaacatggcggcggcggcggcggcgggcgcgggcccggagatggtccgcgggcaggtgttcgacgtggggccgcgctacaccaacctctcgtacatcggcgagggcgcctacggcatggtgtgctctgcttatgataatgtcaacaaagttcgagtagctatcaagaaaatcagcccctttgagcaccagacctactgccagagaaccctgagggagataaaaatcttactgcgcttcagacatgagaacatcattggaatcaatgacattattcgagcaccaaccatcgagcaaatgaaagatgtatatatagtacaggacctcatggaaacagatctttacaagctcttgaagacacaacacctcagcaatgaccatatctgctattttctctaccagatcctcagagggttaaaatatatccattcagctaacgttctgcaccgtgacctcaagccttccaacctgctgctcaacaccacctgtgatctcaagatctgtgactttggcctggcccgtgttgcagatccagaccatgatcacacagggttcctgacagaatatgtggccacacgttggtacagggctccagaaattatgttgaattccaagggctacaccaagtccattgatatttggtctgtaggctgcattctggcagaaatgctttctaacaggcccatctttccagggaagcattatcttgaccagctgaaccacattttgggtattcttggatccccatcacaagaagacctgaattgtataataaatttaaaagctaggaactatttgctttctcttccacacaaaaataaggtgccatggaacaggctgttcccaaatgctgactccaaagctctggacttattggacaaaatgttgacattcaacccacacaagaggattgaagtagaacaggctctggcccacccatatctggagcagtattacgacccgagtgacgagcccatcgccgaagcaccattcaagttcgacatggaattggatgacttgcctaaggaaaagctcaaagaactaatttttgaagagactgctagattccagccaggatacagatcttaaatttgtcaggtacctggagtttaatacagtgagctctagcaagggaggcgctgccttttgtttctagaatattatgttcctcaaggtccattattttgtattcttttccaagctccttattggaaggtatttttttaaatttagaattaaaaattatttagaaagttacatataaa

SEQ ID NO: 6125 - DNA, 1581 bp, Homo Sapiens
  NM_138962
ctcgccgctgccccggctccgccgctcgcagagagattcggaggagcccgggcgggggggaggaggagggggaggagggagcggagatctcggggctcggagccggccgccgctccgctccgatcgctgtggggcttggttttttgggggtgggggggcgggggggctcagatatggaggcaaatgggagccaaggcacctcgggcagcgccaacgactcccagcacgaccccggtaaaatgtttatcggtggactgagctggcagacctcaccagatagccttagagactattttagcaaatttggagaaattagagaatgtatggtcatgagagatcccactacgaaacgctccagaggcttcggtttcgtcacgttcgcagacccagcaagtgtagataaagtattaggtcagccccaccatgagttagattccaagacgattgaccccaaagttgcatttcctcgtcgagcgcaacccaagatggtcacaagaacaaagaaaatatttgtaggcgggttatctgcgaacacagtagtggaagatgtaaagcaatatttcgagcagtttggcaaggtggaagatgcaatgctgatgtttgataaaactaccaacaggcacagagggtttggctttgtcacttttgagaatgaagatgttgtggagaaagtctgtgagattcatttccatgaaatcaataataaaatggtagaatgtaagaaagctcagccgaaagaagtcatgttcccacctgggacaagaggccgggcccggggactgccttacaccatggacgcgttcatgcttggcatggggatgctgggatatcccaacttcgtggcgacctatggccgtggctaccccggatttgctccaagctatggctatcagttcccaggcttcccagcagcggcttatggaccagtggcagcagcggcggtggcggcagcaagaggatcaggctccaacccggcgcggcccggaggcttcccgggggccaacagcccaggacctgtcgccgatctctacggccctgccagccaggactccggagtggggaattacataagtgcggccagcccacagccgggctcgggcttcggccacggcatagctggacctttgattgcaacggcctttacaaatggataccattgagcaggtgctttcgttgccatctcactctgagagcatacctggatgtccaggcaagactgggcgaagtttctgagtggccctttgtttaggtgatgtcctcagacctggacccccaccagcctcactccccatcccaaccagagatggctcacttcggatcgagggttgactacatctcatcatctcacgaatctgctgtaatataagacaacagcttttaaatgtgtatataacccatgatttcggttttgttttgttttgtttttcttgatggtttccctctccctccctctcttcccattctccttttaaatctctttgaatcacatttggtagtgattttgacttagtccagtagtcacatagctttaatatctagttcaaagctaaccatagtataattgttatattaaggagttat

SEQ ID NO: 6126 - DNA, 4353 bp, Homo Sapiens
  NM_139012
ttctctcacgaagccccgcccgcggagaggttccatattgggtaaaatctcggctctcggagagtcccgggagctgttctcgcgagagtactgcgggaggctcccgtttgctggctcttggaaccgcgaccactggagccttagcgggcgcagcagctggaacgggagtactgcgacgcagcccggagtcggccttgtaggggcgaaggtgcagggagatcgcggcgggcgcagtcttgagcgccggagcgcgtccctgcccttagcggggcttgccccagtcgcaggggcacatccagccgctgcggctgacagcagccgcgcgcgcgggagtctgcggggtcgcggcagccgcacctgcgcgggcgaccagcgcaaggtccccgcccggctgggcgggcagcaagggccggggagagggtgcgggtgcaggcgggggccccacagggccaccttcttgcccggcggctgccgctggaaaatgtctcaggagaggcccacgttctaccggcaggagctgaacaagacaatctgggaggtgcccgagcgttaccagaacctgtctccagtgggctctggcgcctatggctctgtgtgtgctgcttttgacacaaaaacggggttacgtgtggcagtgaagaagctctccagaccatttcagtccatcattcatgcgaaaagaacctacagagaactgcggttacttaaacatatgaaacatgaaaatgtgattggtctgttggacgtttttacacctgcaaggtctctggaggaattcaatgatgtgtatctggtgacccatctcatgggggcagatctgaacaacattgtgaaatgtcagaagcttacagatgaccatgttcagttccttatctaccaaattctccgaggtctaaagtatatacattcagctgacataattcacagggacctaaaacctagtaatctagctgtgaatgaagactgtgagctgaagattctggattttggactggctcggcacacagatgatgaaatgacaggctacgtggccactaggtggtacagggctcctgagatcatgctgaactggatgcattacaaccagacagttgatatttggtcagtgggatgcataatggccgagctgttgactggaagaacattgtttcctggtacagaccatattgatcagttgaagctcattttaagactcgttggaaccccaggggctgagcttttgaagaaaatctcctcagagtctgcaagaaactatattcagtctttgactcagatgccgaagatgaactttgcgaatgtatttattggtgccaatcccctggctgtcgacttgctggagaagatgcttgtattggactcagataagagaattacagcggcccaagcccttgcacatgcctactttgctcagtaccacgatcctgatgatgaaccagtggccgatccttatgatcagtcctttgaaagcagggacctccttatagatgagtggaaaagcctgacctatgatgaagtcatcagctttgtgccaccaccccttgaccaagaagagatggagtcctgagcacctggtttctgttctgttgatcccacttcactgtgaggggaaggccttttcacgggaactctccaaatattattcaagtgcctcttgttgcagagatttcctccatggtggaagggggtgtgcgtgcgtgtgcgtgcgtgttagtgtgtgtgcatgtgtgtgtctgtctttgtgggagggtaagacaatatgaacaaactatgatcacagtgactttacaggaggttgtggatgctccagggcagcctccaccttgctcttctttctgagagttggctcaggcagacaagagctgctgtccttttaggaatatgttcaatgcaaagtaaaaaaatatgaattgtccccaatcccggtcatgcttttgccactttggcttctcctgtgaccccaccttgacggtggggcgtagacttgacaacatcccacagtggcacggagagaaggcccataccttctggttgcttcagacctgacaccgtccctcagtgatacgtacagccaaaaaggaccaactggcttctgtgcactagcctgtgattaacttgcttagtatggttctcagatcttgacagtatatttgaaactgtaaatatgtttgtgccttaaaaggagagaagaaagtgtagatagttaaaagactgcagctgctgaagttctgagccgggcaagtcgagagggctgttggacagctgcttgtgggcccggagtaatcaggcagccttcataggcggtcatgtgtgcatgtgagcacatgcgtatatgtgcgtctctctttctccctcacccccaggtgttgccatttctctgcttacccttcacctttggtgcagaggtttcttgaatatctgccccagtagtcagaagcaggttcttgatgtcatgtacttcctgtgtactctttatttctagcagagtgaggatgtgttttgcacgtcttgctatttgagcatgcacagctgcttgtcctgctctcttcaggaggccctggtgtcaggcaggtttgccagtgaagacttcttgggtagtttagatcccatgtcacctcagctgatattatggcaagtgatatcacctctcttcagcccctagtgctattctgtgttgaacacaattgatacttcaggtgcttttgatgtgaaaatcatgaaaagaggaacaggtggatgtatagcatttttattcatgccatctgttttcaaccaactatttttgaggaattatcatgggaaaagaccagggcttttcccaggaatatcccaaacttcggaaacaagttattctcttcactcccaataactaatgctaagaaatgctgaaaatcaaagtaaaaaattaaagcccataaggccagaaactccttttgctgtctttctctaaatatgattactttaaaataaaaaagtaacaaggtgtcttttccactcctatggaaaagggtcttcttggcagcttaacattgacttcttggtttggggagaaataaattttgtttcagaattttgtatattgtaggaatcctttgagaatgtgattccttttgatggggagaaagggcaaattattttaatattttgtattttcaactttataaagataaaatatcctcaggggtggagaagtgtcgttttcataacttgctgaatttcaggcattttgttctacatgaggactcatatatttaagccttttgtgtaataagaaagtataaagtcacttccagtgttggctgtgtgacagaatcttgtatttgggccaaggtgtttccatttctcaatcagtgcagtgatacatgtactccagagggacagggtggaccccctgagtcaactggagcaagaaggaaggaggcagactgatggcgattccctctcacccgggactctccccctttcaaggaaagtgaacctttaaagtaaaggcctcatctcctttattgcagttcaaatcctcaccatccacagcaagatgaattttatcagccatgtttggttgtaaatgctcgtgtgatttcctacagaaatactgctctgaatattttgtaataaaggtctttgcacatgtgaccacatacgtgttaggaggctgcatgctctggaagcctggactctaagctggagctcttggaagagctcttcggtttctgagcataatgctcccatctcctgatttctctgaacagaaaacaaaagagagaatgagggaaattgctattttatttgtattcatgaacttggctgtaatcagttatgccgtataggatgtcagacaataccactggttaaaataaagcctatttttcaaatttagtgagtttctcaagtttattatatttttctcttgtttttatttaatgcacaatatggcattatatcaatatcctttaaactgtgacctggcatacttgtctgacagatcttaatactactcctaacatttagaaaatgttgataaagcttcttagttgtacattttttggtgaagagtatccaggtctttgctgtggatgggtaaagcaaagagcaaatgaacgaagtattaagcattggggcctgtcttatctacactcgagtgtaagagtggccgaaatgacagggctcagcagactgtggcctgagggccaaatctggcccaccacctgtttggtgtagcctgctaagaatggcttttacatttttaaatggttgggaaagaaaaaaaaagaagtagtagattttgtagcatgtgatgtaagtaatgtaaaacttaaattccagtatccataaataaagttttatgagaacaga

SEQ ID NO: 6127 - DNA, 1431 bp, Homo Sapiens
  NM_139013
ttctctcacgaagccccgcccgcggagaggttccatattgggtaaaatctcggctctcggagagtcccgggagctgttctcgcgagagtactgcgggaggctcccgtttgctggctcttggaaccgcgaccactggagccttagcgggcgcagcagctggaacgggagtactgcgacgcagcccggagtcggccttgtaggggcgaaggtgcagggagatcgcggcgggcgcagtcttgagcgccggagcgcgtccctgcccttagcggggcttgccccagtcgcaggggcacatccagccgctgcggctgacagcagccgcgcgcgcgggagtctgcggggtcgcggcagccgcacctgcgcgggcgaccagcgcaaggtccccgcccggctgggcgggcagcaagggccggggagagggtgcgggtgcaggcgggggccccacagggccaccttcttgcccggcggctgccgctggaaaatgtctcaggagaggcccacgttctaccggcaggagctgaacaagacaatctgggaggtgcccgagcgttaccagaacctgtctccagtgggctctggcgcctatggctctgtgtgtgctgcttttgacacaaaaacggggttacgtgtggcagtgaagaagctctccagaccatttcagtccatcattcatgcgaaaagaacctacagagaactgcggttacttaaacatatgaaacatgaaaatgtgattggtctgttggacgtttttacacctgcaaggtctctggaggaattcaatgatgtgtatctggtgacccatctcatgggggcagatctgaacaacattgtgaaatgtcagaagcttacagatgaccatgttcagttccttatctaccaaattctccgaggtctaaagtatatacattcagctgacataattcacagggacctaaaacctagtaatctagctgtgaatgaagactgtgagctgaagattctggattttggactggctcggcacacagatgatgaaatgacaggctacgtggccactaggtggtacagggctcctgagatcatgctgaactggatgcattacaaccagacagttgatatttggtcagtgggatgcataatggccgagctgttgactggaagaacattgtttcctggtacagaccatattgatcagttgaagctcattttaagactcgttggaaccccaggggctgagcttttgaagaaaatctcctcagagtctgcaagaaactatattcagtctttgactcagatgccgaagatgaactttgcgaatgtatttattggtgccaatcccctgggtaagttgaccatatatcctcacctcatggatattgaattggttatgatataaattggggatttgaagaagagtttctccttttgaccaaataaagtaccattagttga

SEQ ID NO: 6128 - DNA, 1376 bp, Homo Sapiens
  NM_139022
agggcgatgttgacagacagacagaggggcggatgcagcctacctcctgggcagtgagctgcggtctgaggcccctgcccagctggaaaccacagggaggggaagggaggggaggagaggagaggagaggaaccgtcatggggccttggagtcgagtcagggttgccaaatgccagatgctggtcacctgcttctttatcttgctgctgggcctctctgtggccaccatggtgactcttacctacttcggggcccactttgctgtcatccgccgagcgtccctggagaagaacccgtaccaggctgtgcaccaatgggccttctctgcggggttgagcctggtgggcctcctgactctgggagccgtgctgagcgctgcagccaccgtgagggaggcccagggcctcatggcagggggcttcctgtgcttctccctggcgttctgcgcacaggtgcaggtggtgttctggagactccacagccccacccaggtggaggacgccatgctggacacctacgacctggtatatgagcaggcgatgaaaggtacgtcccacgtccggcggcaggagctggcggccatccaggacgtgtttctgtgctgtgggaagaagtctcctttcagccgtctggggagcacagaggctgacctgtgtcagggagaggaggcggcgagagaggactgccttcagggcatccggagcttcctgaggacacaccagcaggtcgcctccagcctgaccagcatcggcctggccctcacggtgtccgccttgctcttcagctccttcctgtggtttgccatccgctgtggctgcagcttggaccgcaagggcaaatacaccctgaccccacgagcatgtggccgccagccccaggagcccagcctcttgagatgctcccagggtggacccacacattgtctccactccgaagcagttgctattggtccaagaggatgctcgggtagtcttcggtggctgcaggagagcgatgctgcgcctctgcccctctcctgccacctggctgcccacagagctctccagggcagaagtcgcggtgggctcagtgggtgccctgagcggggtctctcagactgacgtcaggccttggtgggctgcactctcacctggaggctccggggaagcatctgcctccaggaccattcaggctgttgacaagtcaactcctcatggctgtaggactgaggttcccaagtccttgtccctggtcctgtggtccctccaccttcaaaccagcaatggtgcattgagcaaattgtggtcaaatatacatcacatcaaatttaccatcttaaccattgttaagtgtatggtttgtggcattaaatacattcacattgttgtgcaaccatc

SEQ ID NO: 6129 - DNA, 3778 bp, Homo Sapiens
  NM_139062
gctaggggaagtgacgtcacagcgcgatggcggcggctcctttaggcagctgaaaggggatttaggcccggaagatccgagtccatccgcggcggggagagggcaagcgggaccggtaggggccggagcagcggcggcggcgctcggactgtcccatccgccccgtattgaggcgctgggagcggcggggcgacaggaaagcgatggtgaaagcggggccgtgaggggggcggagccgggagccggacccgcagtagcggcagcagcggcgccgcctcccagagttcagacccaggaagcggccgggagggcaggagcgaatcgggccgccgccgccatggagctgagagtcgggaacaggtaccggctgggccggaagatcggcagcggctccttcggagacatctatctcggtacggacattgctgcaggagaagaggttgccatcaagcttgaatgtgtcaaaaccaaacaccctcagctccacattgagagcaaaatctacaagatgatgcagggaggagtgggcatccccaccatcagatggtgcggggcagagggggactacaacgtcatggtgatggagctgctggggccaagcctggaggacctcttcaacttctgctccaggaaattcagcctcaaaaccgtcctgctgcttgctgaccaaatgatcagtcgcatcgaatacattcattcaaagaacttcatccaccgggatgtgaagccagacaacttcctcatgggcctggggaagaagggcaacctggtgtacatcatcgacttcgggctggccaagaagtaccgggatgcacgcacccaccagcacatcccctatcgtgagaacaagaacctcacggggacggcgcggtacgcctccatcaacacgcaccttggaattgaacaatcccgaagagatgacttggagtctctgggctacgtgctaatgtacttcaacctgggctctctcccctggcaggggctgaaggctgccaccaagagacagaaatacgaaaggattagcgagaagaaaatgtccacccccatcgaagtgttgtgtaaaggctacccttccgaatttgccacatacctgaatttctgccgttccttgcgttttgacgacaagcctgactactcgtacctgcggcagcttttccggaatctgttccatcgccagggcttctcctatgactacgtgttcgactggaacatgctcaaatttggtgccagccgggccgccgatgacgccgagcgggagcgcagggaccgagaggagcggctgagacactcgcggaacccggctacccgcggcctcccttccacagcctccggccgcctgcgggggacgcaggaagtggctccccccacacccctcacccctacctcacacacggctaacacctccccccggcccgtctccggcatggagagagagcggaaagtgagtatgcggctgcaccgcggggcccccgtcaacatctcctcgtccgacctcacaggccgacaagatacctctcgcatgtccacctcacagaatagcattcctttcgaacaccacggcaagtagctgctcgtctcccatcggaaggcagcactggattcctggtcgggtggcttccagtggtcttcagtctgtcgtgcaccgatgagaactctccttattgctgtgaagggcagacaatgcatggctgatctactctgttaccaatggctttactagtgacacgtcccccggtctaggatcgaaatgttaacaccgggagctctccaggccactcacccagcgacgctcgtgggggaaacatactaaacggacagactccaagagctgccaccgctggggctgcactgcggccccccacgtgaactcggttgtaacggggctgggaagaaaagcagagagagaattgcagagaatcagactccttttccagggcctcagctccctccagtggtggccgccctgtactccctgacgattccactgtaactaccaatcttctacttggttaagacagttttgtatcattttgctaaaaattattggcttaaatctgtgtaaagaaaatctgtctttttattgtttcttgtctgtttttgcagtcttacaaaaaaaatgttgactaaggaattctgagacaggctggcttggagttagtgtatgaggtggagtcgggcagggagaaggtgcaggtggatctcaagggtgtgtgctgtgtttgttttgcagtgttttattgtccgctttggagaggagatttctcatcaaaagtccgtggtgtgtgtgtgtgcccgtgtgtggtgggacctcttcaacctgattttggcgtctcaccctccctcctcccgtaattgacatgcctgctgtcaggaactcttgaggccctcggagagcagttagggaccgcaggctgccgcggggcaggggtgcagtgggtgttaccaggcaaagcactgcgcgcttcttccccaggaggtgggcaggcagctgagagcttggaagcagaggctttgagaccctagcaggacaattgggagtcccaggattcaaggtggaagatgcgtttctggtcccttgggagaggactgtgaaccgagaggtggttactgtagtgtttgttgccttgctgcctttgcactcagtccattttctcagcactcaatgctcctgtgcggattggcactccgtctgtatgaatgcctgtgcttaaaaccaggagcggggctgtccttgccacgtgccaagactagctcagaaaagccggcaggccagaaggacccaccctgaggtgccaaggagcaggtgactctcccaaccggacccagaaccttcacggccagaaagtagagtctgcgctgtgaccttctgttgggcgcgtgtctgttggtcagaagtgaagcagcgtgcgtggggccgagtcccaccagaaggcaggtggcctccgtgagctggtgctgccccaggctccatgctgctgtgccctgaggttcccaggatgccttctcgcctctcactccgcagcacttgggcggtagccagtggccatgtgctcccaaccccaatgcgcagggcagtctgtgttcgtgggcacttcggctggaccccatcacgatggacgatgttccctttggactctagggcttcgaaggtgtgcaccttggttctcccttctcctccccagagttccccggatgccataactggctggcgtcccagaacacagttgttcacccccccaccagctggctggccgtctgcctgagcccatggatgctttctcaatcctaggctggttactgtgtaagcgttttggagtacggggccttgagcgggtgggagctgtgtgttgaagtacagagggaggttggggtgggtcagagccgagttaagagattttctttgttgctggaccccttcttgaaggtagacgtcccccacccggagagacgtcgcgctgtggcctgaagtggcgcaagcttgctttgtaaatatctgtggtcccgatgtagtgcccagaacgtttgtgcgaggcagctctgcgcccgggttccagcccgagcctcgccgggtcgcgtcttcggagtgcttgtgacagtccttgcccagtatctagtccccgtcgccccgtgcaggagacgtaggtaggacgtcgtgtcagctgtgcactgacggccagtctccgagctgtgcgtttgtatcgccactgtatttgtgtactttaacaatcgtgtaaataataaattcataatgacttctacctttcttcccaaaaaaaaa

SEQ ID NO: 6130 - DNA, 5336 bp, Homo Sapiens
  NM_139067
gcggccgcggcggcgggaggcggcgggaggcgggcggaggaggaggcggaggaggcgggagctgagctgagtggggcgggcggcggcggggcccgagccggagaagatggcggtgcggaagaaggacggcggccccaacgtgaagtactacgaggccgcggacaccgtgacccagttcgacaacgtgcggctgtggctcggcaagaactacaagaagtatatacaagctgaaccacccaccaacaagtccctgtctagcctggttgtacagttgctacaatttcaggaagaagtttttggcaaacatgtcagcaatgcaccgctcactaaactgccgatcaaatgtttcctagatttcaaagcgggaggctccttgtgccacattcttgcagctgcctacaaattcaagagtgaccagggatggcggcgttacgatttccagaatccatcacgcatggaccgcaatgtggaaatgtttatgaccattgagaagtccttggtgcagaataattgcctgtctcgacctaacatttttctgtgcccagaaattgagcccaaactactagggaaattaaaggacattatcaagagacaccagggaacagtcactgaggataagaacaatgcctcccatgttgtgtatcctgtcccggggaatctagaagaagaggaatgggtacgaccagtcatgaagagggataagcaggttcttctgcactggggctactatcctgacagttacgacacgtggatcccagcgagtgaaattgaggcatctgtggaagatgctccaactcctgagaaacctaggaaggttcatgcaaagtggatcctggacaccgacaccttcaatgaatggatgaatgaggaagactatgaagtaaatgatgacaaaaaccctgtctcccgccgaaagaagatttcagccaagacactgacagatgaggtgaacagcccagattcagatcgacgggacaagaaggggggaaactataagaagaggaagcgctccccctctccttcaccaaccccagaagcaaagaagaaaaatgctaagaaaggtccctcaacaccttacactaagtcaaagcgtggccacagagaagaggagcaagaagacctgacaaaggacatggacgagccctcaccagtccccaatgtagaagaggtgacacttcccaaaacagtcaacacaaagaaagactcagagtcggccccagtcaaaggcggcaccatgaccgacctggatgaacaggaagatgaaagcatggagacgacgggcaaggatgaggatgagaacagtacggggaacaagggagagcagaccaagaatccagacctgcatgaggacaatgtgactgaacagacccaccacatcatcattcccagctacgctgcctggtttgactacaatagtgttcatgccattgagcggagggctctccccgagttcttcaacggcaagaacaagtccaagactccagagatctacctggcctatcgaaactttatgattgacacttaccgactgaacccccaagagtatcttacctctaccgcctgccgccgaaacctagcgggtgatgtctgtgccatcatgagggtccatgccttcctagaacagtggggtcttattaactaccaggtggatgctgagagtcgaccaaccccaatggggcctccgcctacctctcacttccatgtcttggctgacacaccatcagggctggtgcctctgcagcccaagacacctcagggccgccaggttgatgctgataccaaggctgggcgaaagggcaaagagctggatgacctggtgccagagacggctaagggcaagccagagctgcagacctctgcttcccaacaaatgctcaactttcctgacaaaggcaaagagaaaccaacagacatgcaaaactttgggctgcgcacagacatgtacacaaaaaagaatgttccctccaagagcaaggctgcagccagtgccactcgtgagtggacagaacaggaaaccctgcttctcctggaggcactggaaatgtacaaagatgactggaacaaagtgtccgagcatgtgggaagccgcacacaggacgagtgcatcttgcattttcttcgtcttcccattgaagacccatacctggaggactcagaggcctccctaggccccctggcctaccaacccatccccttcagtcagtcgggcaaccctgttatgagcactgttgccttcctggcctctgtcgtcgatccccgagtcgcctctgctgctgcaaagtcagccctagaggagttctccaaaatgaaggaagaggtacccacggccttggtggaggcccatgttcgaaaagtggaagaagcagccaaagtaacaggcaaggcggaccctgccttcggtctggaaagcagtggcattgcaggaaccacctctgatgagcctgagcggattgaggagagcgggaatgacgaggctcgggtggaaggccaggccacagatgagaagaaggagcccaaggaaccccgagaaggagggggtgctatagaggaggaagcaaaagagaaaaccagcgaggctcccaagaaggatgaggagaaagggaaagaaggcgacagtgagaaggagtccgagaagagtgatggagacccaatagtcgatcctgagaaggagaaggagccaaaggaagggcaggaggaagtgctgaaggaagtggtggagtctgagggggaaaggaagacaaaggtggagcgggacattggcgagggcaacctctccaccgctgctgccgccgccctggccgccgccgcagtgaaagctaagcacttggctgctgttgaggaaaggaagatcaaatctttggtggccctgctggtggagacccagatgaaaaagttggagatcaaacttcggcactttgaggagctggagactatcatggaccgggagcgagaagcactggagtatcagaggcagcagctcctggccgacagacaagccttccacatggagcagctgaagtatgcggagatgagggctcggcagcagcacttccaacagatgcaccaacagcagcagcagccaccaccagccctgcccccaggctcccagcctatccccccaacaggggctgctgggccacccgcagtccatggcttggctgtggctccagcctctgtagtccctgctcctgctggcagtggggcccctccaggaagtttgggcccttctgaacagattgggcaggcagggtcaactgcagggccacagcagcagcaaccagctggagccccccagcctggggcagtcccaccaggggttcccccccctggaccccatggcccctcaccgttccccaaccaacaaactcctccctcaatgatgccaggggcagtgccaggcagcgggcacccaggcgtggcggacccaggcacccccctgcctccagaccccacagccccgagcccaggcacggtcacccctgtgccacctccacagtgaggagccagccagacatctctccccctcaccccctgtggacatcacggttccaggaacagcccttcccccaccactgggaccctccccagcctggagagttcatcactacgtaaggaaagctccttccgcccctccaaagccctcaccatgcctaacagaggcatgcatttttatatcagattattcaaggacttctgtttaaaagatgtttataatgtctgggagagaggataggatgggaatgctgccctaaaggaagggctggtgaaaggtgtttatacaaggttctattaaccacttctaagggtacacctccctccaaactactgcattttctatggattaaaaaaaaaaaaaaaaagtagattttaaaaagccacattggagctcccttctacccactaaaaaataaccaatttttacattttttgagggggagtgagttttaggaaaggggaattaagattccagggagagctctggggatagaacagggcgcagattccatctctccccaagcccctttttagtgactaagtcaaggccccaactcccctcccccaccctacgctgagcttattcgagttcattcgtactaataatccctcctgcggcttcctcattgttgctgttttaggccaccccagctcagccaatgattcctttccctctgaatgtcagttttgtttttaaaagtcacttgcttagttgatgtcagcgtatgtgtatttggtggggaaaacctaatttcggggatttctgtggtaggtaataggagaagaaagggcactgggggctgttctccttccttccctgggctgtatccatggactcctggaaggcacagagaagggagctataagaggatgtgaagttttaaaacctgaaattgttttttaaagcacttaagcacctccatattatgacttggtgggtcaccccttagcttcctccctctcccaccaagactatgagaacttcagctgatagctgggggctccccagatgaggatgcagggatttgggagcagtggaagagggtgcccaaccttgggttggaccaacccttggctcgcagctcaactctgcttcccgcattcctgctccacgtgtcccagcttctcccctgtgacgggaaggcaggtgtgactccaggctctgcactggttcttcttggttcctcccaccaggccctttgttcctcatgtccccatgtttctctccctctgcgtcttagcacctttcttctgttcaaagttttctgtaaattttctctttttttctttctttcttttttttttttttataaattaatttgctttcagttccatcttgtgggtgcattctgtgttcttacctgtggctgtcaggcagggggattgtgatgggagcagctttcctggagtccttcacagcggcgtttacctgggccgaaagacactctgcaagccacacggcctacagacactgcgcctccccacaaaacacgaacggcagcacaactgtcgagactatgtgctggtataggagcagaggctctcacctgccctaaaagctgtttaagacttggaaggacattcccacaacatggaattttgtatctctgtcccttcagaagtagtggtttcactccttcccttattagagaggaggcaagccccttacctacttttgttataattggcccttcaccctgctgaggtgacggacaggcttaggcagtgctaataatggcctggctttagctccaataaacactccacaggcttccccacaaaaggccttattgggagcttgggagggcgggggccagatttaaggagctggaagggtagga

SEQ ID NO: 6131 - DNA, 2066 bp, Homo Sapiens
  NM_139078
gcggccgcgtggggcccagcacaaagacctgtccccaggggccgccgcctccgccgctgctgctgccgccagcctagagccgcccgccgaagcagagccggcgccggggtcctcatccccaccggtcccgaggggcggctgctgcccgtcgccacgaggcccaggggcccgagtgccgagccctttgctccctcggccgcgcggggacagggctgctgagcagcctccgcctctcccggctgtgggggccccactgagtatgtcggaggagagcgacatggacaaagccatcaaggaaacttccattttagaagaatacagtatcaattggactcagaagctgggagctggaattagtggtccagttagagtctgtgtaaagaaatctactcaagaacggtttgcgctgaaaattcttcttgatcgtccaaaagctagaaatgaggtacgtctgcacatgatgtgtgccacacacccaaacatagttcagattattgaagtgtttgctaacagtgtccagtttccccatgagtccagccctagggcccgactcttaattgtaatggagatgatggaagggggagagctatttcacagaatcagccagcaccggcactttacagagaagcaagccagccaagtaacaaagcagatagctttggctctgcggcactgtcacttgttaaacattgcgcacagagacctcaagcctgaaaatctgctttttaaggataactctttggatgccccagtgaagttgtgtgactttggatttgccaagattgaccaaggtgacttgatgacaccccagttcaccccttattatgtagcaccccaggtactggaggcgcaaagaaggcatcagaaggagaaatctggcatcatacctacctcaccgacgccctacacttacaacaagagctgtgacttgtggtccctaggggtgattatctatgtgatgctgtgcggataccctcctttttactccaaacaccacagccggactatcccaaaggatatgcgaagaaagatcatgacaggcagttttgagttcccagaggaagagtggagtcagatctcagagatggccaaagatgttgtgaggaagctcctgaaggtcaaaccggaggagagactcaccatcgagggagtgctggaccacccctggctcaattccaccgaggccctggataatgtgctgccttctgctcagctgatgatggacaaggcagtggttgcaggaatccagcaggctcacgcggaacagttggccaacatgagaatccaggatctgaaagtcagcctcaaacccctgcactcagtgaacaaccccattctgcggaagaggaagttacttggcaccaagccaaaggacagtgtctatatccacgaccatgagaatggagccgaggattccaatgttgccttggaaaaactccgagatgtgattgctcagtgtattctcccccaggctggtaaaggagagaatgaagatgagaaactgaatgaagtaatgcaggaggcttggaagtataaccgggaatgcaaactcctaagagatactctgcagagcttcagctggaatggtcgtggattcacagataaagtagatcgactaaaactggcagaaattgtgaagcaggtgatagaagagcaaaccacgtcccacgaatcccaataatgacagcttcagactttgtttttttaacaatttgaaaaattattctttaatgtataaagtaattttatgtaaattaataaatcataatttcatttccacattgattaaagctgctgtatagatttagggtgcaggacttaataatagtatagttattgtttgtttttaagaaaagctcagttctagagacatactattactttaggactgtgtagttgtatatttgtaagatgacagatgatgctgtcaagcaatattgttttatttgtaataaaatatacaaaaatcacttgccagcagtagaaaaaggaccgactataccgacctttctgattagtaaacagttgaatcaaggactctggaaaaaaaaaaaaaaaaaaaaaaa

SEQ ID NO: 6132 - DNA, 1585 bp, Homo Sapiens
  NM_139178
gggagttgctggagtcggtgcttcactcttaaggttccgatcacagactgcggagtgggtcaggggctgcgagggctgccccaagtcctaccgggtttgcacgggcgcgcccggctccgcccgcaagtgcgccttcctgacttactgctgggtgcgcggggctgggggtgcgagtaccacccctgaagtctcttcctgggcgacctccggggcctcattctaggcctccttaaagagaaggatctaaattaggaaaaggaagtgcccttatccacgaccaagctcttccacctgcggagctcgcttagtctgcacctcaaccgtgcggaaagtgactgccctgtttactgaggaaaaactggggctcagaaagataccatggagtagtttgaaacaggaacaaaatcttctgaaagctcggagcagaagcctttttggtcaacatggaggaaaaaagacggcgagcccgagttcagggagcctgggctgcccctgttaaaagccaggccattgctcagccagctaccactgctaagagccatctccaccagaagcctggccagacctggaagaacaaagagcatcatctctctgacagagagtttgtgttcaaagaacctcagcaggtagtacgtagagctcctgagccacgagtgattgacagagagggtgtgtatgaaatcagcctgtcacccacaggtgtatctagggtctgtttgtatcctggctttgttgacgtgaaagaagctgactggatattggaacagctttgtcaagatgttccctggaaacagaggaccggcatcagagaggatataacttatcagcaaccaagacttacagcatggtatggagaacttccttacacttattcaagaatcactatggaaccaaatcctcactggcaccctgtgctgcgcacactaaagaaccgcattgaagagaacactggccacaccttcaactccttactctgcaatctttatcgcaatgagaaggacagcgtggactggcacagtgatgatgaaccctcactagggaggtgccccattattgcttcactaagttttggtgccacacgcacatttgagatgagaaagaagccaccaccagaagagaatggagactacacatatgtggaaagagtgaagatacccttggatcatgggaccttgttaatcatggaaggagcgacacaagctgactggcagcatcgagtgcccaaagaataccactctagagaaccgagagtgaacctgacctttcggacagtctatccagaccctcgaggggcaccctggtgacgtcagagctttgagagagaagcttcactgaaacggagcaaaccttccactgagaagccacttcaagaggctggtgctgctagatctcatgatgtggctgttgggaagatggtggggtttgtttgccagcttggagtcctattaaatgaaagccagcaactcatgttggtaataggtctactgtgggaacagttatccctaaccacagctcaaaatcgctatcatctttaggcaaattaaaatctatgtggcagtgctcatggataaaaaaaaaaaaaaaa

SEQ ID NO: 6133 - DNA, 1427 bp, Homo Sapiens
  NM_139212
gcaccagatctacgctttgaaatgaggcaacatctaactggaaactcgctcaaagtaaggaagtggatgagaagactcagggtcccttttctcttccccgtcttctctcagccacatctctcttatcctatcttggtgaagaagcttgcttggctaggagagaggtcagggacgagaagatagtgacgagaaagttccatgagactctcagaagtcccagcctgaacatcaaacctgaataaccaggagagacgtaacctcggcatactttcagtggtttacctcctgcccacgctgcaggtttttcaggtccttgctcgagtgtgtgctcataggcgtaaataaacgtgctatcagcagcctgcgtcagccagcccagctatttaagcaggctggcatcagcaaacacagcttccaaacccagggcttgcgcttgcctttgcctcttccaccgcgcagggaccatgtcggcggagaccgcgagcggccccacagaggaccaggtggaaatcctggagtacaacttcaacaaggtcgacaagcacccggattccaccacgctgtgcctcatcgcggccgaggcaggcctttccgaggaggagacccagaaatggtttaagcagcgcctggcaaagtggcggcgctcagaaggcctgccctcagagtgcagatccgtcacagactaaggagatggcaggcattgacagcttcactccatgaaggccatctctgtttctctcctccgcttaaccaagctgttgtggtttttcagcatagtgttgtatgttccattgctagctgtcctgctgtttaacacagtgttgtattttttttctaaatgtacataattagaaaagaaaataacaataggaagctatgtgtatcttctgtgtaaagcagtggcttcactggaaaaatggtgtggctagcatttccctttgagtcatgatgacagatggtgtgaaaaccatctaagtttgcttttgaccatcacctcccagtagcaatttgctttcataatccatttagcaatccaggcctctgttgaaaagataatatgagggagaagggaacacatttccttctgaacttacttccctaagtcactttccttatgtatcatctaatacaatgatggttgagtgaaaatacagaaggggtgtttgagtattcagatttcataaaacacttccttggaatatagctgcattaacttggaaagaagcctgttgggccagaagacagaaactccaactggcaaaaaagcaagcatctaagaaaaaaaaccaccaaagttcttgaatttactatatttaaatgcattggttaagtttattttgctaaataaagtgaactgctttttgtctctaaaatgatattctaaataaaaccttaactttttgttgaagatgcactgaaaaaaaaaa

SEQ ID NO: 6134 - DNA, 2153 bp, Homo Sapiens
  NM_139215
agtacagctccggccgccgcgccgcctggctttcgtattcgttgttctcggcgggctgtggggcctccgcgccgcggccgttagtcatgtcggattctggaagttacggtcagtctgggggtgagcagcaaagttattctacctatggaaatccaggcagccaaggctatggacaagcatcacaaagctattctggctatgggcaaacgactgattcctcttatggacagaactacagcggttactccagttatggacaaagtcagtcaggttattcacagtcctatggtggttatgagaatcaaaagcagagctcatatagccagcaaccatataataaccagggacagcagcaaaacatggaatcatcaggaagccaaggtggaagagcaccttcctatgaccagccagactatggtcaacaagattcatatgaccagcagtcaggctatgatcaacatcaaggctcatatgatgagcagtcaaattatgatcagcagcatgattcctatagtcaaaaccagcagtcctatcattcacaaagggaaaactacagccaccacacacaagatgaccgtcgtgatgtgagtaggtatggagaagataatagaggatatggcgggtcacagggaggaggtagagggcgtgggggatatgacaaggatggaagaggtcctatgacaggatcaagtggtggtgaccgcggtggcttcaaaaattttggtggtcacagggattatggacccagaacagatgctgattcagaatctgataattcagataacaacacaatctttgtgcaaggacttggggagggtgtgtctacagatcaagttggggagttctttaaacaaataggaattatcaagacaaataagaagaccggaaaaccaatgataaatctttatacagacaaggacacaggaaagccaaagggggaggcaacagtgtcatttgatgaccctccttcagctaaggcagccattgactggtttgatggaaaagaattccatggcaacatcattaaagtgtcctttgccactagaagacctgaattcatgagaggaggtggaagtggaggtgggcggcgaggccgtggaggatatagaggtcgtggaggctttcaagggagaggtggagaccccaaaagtggggattgggtttgccctaatccgtcatgcggaaatatgaactttgctcgaaggaattcctgcaatcagtgcaatgagcctagaccagaggactctcgtccctcaggaggagatttccgggggagaggctacggtggagagaggggctacagaggtcgtgggggcagaggtggagaccgaggcggctatggtggagacagaagtgggggtggctatggtggagacagaagcagcggtggtggctacagcggagatagaagtgggggcggctatggtggagacagaagtgggggtggctatggtggggacagaggcggcggctatggtggggacagaggaggcggctatggaggagaccgaggaggtggctatggaggagatcgaggtggctatggaggagaccgaggtggaggctatggtggagaccgaggaggctatggaggagatcgaggaggttacggaggagatcgaggaggttatggaggagatcgaggaggctatggaggagacagaagccgggggggctatggaggagaccgtggtggtggcagtggctacggtggagaccgaagtggaggctatggaggagacaggagtggtggcggctatggaggagaccgaggtgggggctacggaggagaccgaggtggctatggaggcaaaatgggaggaagaaacgactacagaaatgatcagcgcaaccgaccatactgatgactgttttgaatgttcctttgtctctgacatgatccatagtgaaattgccagagttttgcctgctgctttcctcgtggcctcttcttgggtagtgaaattaagtgacatttggatttttatttgggtgggagggctgggacagtttttcttctagaaatgtctgttgagatttccccctttagtttccaaccttctccccaacccttggagctaaatgcgttgtaaaatattgccaaaatgaaaagtgttttgtaatactgcaataaaggctgcttgtttttgtgg

SEQ ID NO: 6135 - DNA, 3554 bp, Homo Sapiens
  NM_139235
tggacttgggcctggagttaggcatttccgcccacgtgggaagctatgaggtatagacccggctagaatctgaagtgcgggagagtgctggaccctgagtgatggggccggcgccagctggagagcagcttcgcggagcgactggagagccagaggtgatggaaccagccctggaaggcacaggcaaagaggggaagaaagcatcctccaggaagcgtacattggctgaacctccagcgaagggcctcctgcagccagtgaagctcagcagggcagaactgtacaaggagcctaccaatgaggagcttaatcgccttcgggagactgagatcttgttccactccagcttgcttcgtttacaggtagaggagctactaaaggaagtaaggctgtcagagaagaagaaggatcggattgatgccttcctacgggaggtcaaccagcgggttgtgagggtgccctcagtccctgagacagagctcactgaccaggcatggctcccagctggggttcgagtgcccctccaccaagtgccctatgccgtgaagggctgtttccgcttcctgcccccagcccaggttactgttgtgggcagctaccttctgggcacctgcatccgaccagacatcaatgtggatgtggcactgaccatgcccagggaaatcctacaggacaaggacgggctgaaccagcgctacttccgcaagcgtgccctctacctggcccacttggctcaccacctggcccaggaccccctctttggcagtgtttgcttctcctacacaaatggctgccacctgaaaccctcactgttgctgcggccgcgtggaaaggatgagcgcctggtcactgtacgtctgcatccgtgccctccacctgacttcttccgcccgtgccgcttgctgccaaccaagaacaatgtgcgctctgcctggtaccgagggcagagtcctgcaggggatggtagcccagagcctcctaccccccgctataacacatgggtcctgcaagatacagttctcgagtcccatttgcagctgctgtcaaccattctgagttcagcccagggcctgaaggatggcgtggcacttctgaaggtctggctgcggcagcgggagctggacaagggccagggtgggtttactgggttccttgtctccatgctggttgtcttccttgtgtctacacgcaagatccataccaccatgagtggctaccaggtcctgagaagtgtcttgcagtttctggccactacagacctgacagtcaacgggatcagtttatgtctcagctcagatccctctttgccggccctggctgacttccaccaggccttctccgttgtcttcctggattcctcaggccatctcaacctctgtgctgatgtcactgcctctacttaccaccaggtacagcatgaggcacggctgtctatgatgttgctggacagcagagctgacgacgggttccacctgctgttgatgactcccaaacccatgatccgggcttttgaccatgtcctgcatctccgtccactgagtcgcctgcaggcagcgtgccaccggctgaagctctggccagagctgcaggacaatggtggggactatgtctcagctgctttgggccccctgaccaccctcctggagcagggcctgggggctcggctgaacctgctggctcactctcgacccccagtcccagagtgggacatcagccaagatccaccaaagcacaaagactctgggaccctgaccctgggactccttctccggcctgagggactgaccagcgtccttgagctgggtccagaggcagaccagcctgaggctgctaaattccgccagttctggggatcccgctcggagcttcggcgtttccaggacggagccattcgggaagctgtggtctgggaggcagcctctatgtcccagaagcgccttattccccaccaggtggtcacccacctcttggcactccatgctgacatcccagaaacctgtgtccactatgtggggggccccctggatgcacttatccaaggcctgaaagaggcctccagcacaaaggggcgcatggtgatgtctcgaggtggggagctagtaatggtgcccaatgttgaagcaatcctggaggactttgctgtgctgggtgaaggcctggtgcagactgtggaggcccgaagtgagaggtggactgtgtgatcccagctctggagcaagctgtagacggacagcaggacattggacctctagagcaagatgtcagtaggatgacctccaccctccttggacatgaatcctccatggagggcctgctggctgaacatgctgaatcatctccaacaaaacccagccccaactttctctctgatgctccagcattggggcaggggcatggtggcccatgtagtctcctgggcctcaccatcccagaagaggagtgggagccagctcagagaaggaactgaacccaggagatccatccacctattagccctgggcctggacctccctgcgatttcccactcctttcttagtcttcttccagaaacagagaaggggatgtgtgcctgggagaggctctgtctccttcctgctgccaggacctgtgcctagacttagcatgcccttcactgcagtgtcaggcctttagatgggacccagcgaaaatgtggcccttctgagtcacatcaccgacactgagcagtggaaaggggctatatgtgtatgaatagaccacattgaaggagcacaatgccctcctgtgttgatgccacttcccagggtggagacagtggaaaagaaccgaggacaggaaaggattgggtaggtgaaggggtcaggggactggtagtcacccaatcttggagaggtgcaaaaagcactgggggctacccgttagctgcatctgccctggctgtttgcccgttcatgtcacaaactgccactactatgtacctgcagtggggttgcagagatgggggagactcaagtcttactccccaggagctcccagggcccaaggaggagaatgctgcctcctttcagtctggtctacacccactttctggtagcctctctgcttcctgtaattctggctgtttttccagactcagctcaaatagtgcccctccttaagcccatccctcgcccccagcctgaggtgatctttccctcctctgaactattagagcagttactgtctgttcagttcgtttggcaggcacacacagtggcataaattctattgttttgaactctgatttaaaattaaattgcagctgggcgtggtggcttatgcttgtaatcccaacacttagggagtcaggagaatcacttgagctcaggagttctagaccaatctgggcaacagagagaccccatctcttttaaataaaaagttaaattgcttaatttcccccgtattcctggcctgtctgcccctttcacataattttaacctggtttcttgtatgtaaactccttgagggcaagaacatgtttgaacatagaaaaaaaaaaaaaaaaaaaaaaaaaaaaaaaaaaaaaaaaaaa

SEQ ID NO: 6136 - DNA, 8312 bp, Homo Sapiens
  NM_139241
ggagggctggttaccatggaatccaccatctgttcactccccaccggaatgtgattatccttgctgggctgggaagtggggaaagcaggggagcctgtgctgggtgagattatctgcaatggaccgggttaatgggaggcttgctttggctcgctggaagaacaaatgaagggagttttacttcaaccatttgtgacttctggccaagaggaataaattcagcttttataaggcagcagtacctgtccaaagatcgctttagttccaccttgctccacaagcagcacaaccacactggttggtgagaatgtatctgaagaagaggctcagggaataaatgggaacaggccagcaaaacactcagctgcaagtccaaagccacaagtgcctccaaagccattacacctgcagaattcaccttcgtccaatatacaccaaacccccaggcataaagctttacctagtgcaaaaccaaggatggaggaaattaaacctgcctctgcttcttgtgtctcaaaagaaaaacccagtaaggtatcagatctcatcagtcgctttgaaggaggcagctcattatcaaattatagtgatttgaagaaagagtctgctgtgaacctaaatgctcctagaaccccaggaaggcatggattgacaaccacacctcaacaaaaactcctctcccagcacttgccacagaggcagggaaatgatacagataagactcagggtgcacagacttgtgtggccaacggtgtaatggcagcacaaaaccagatggaatgtgaggaggagaaagctgccactcttagctcagatacttctattcaagcttctgaacccttgcttgatacgcacatagtgaatggagaaagagatgaaactgccacagctcctgcatcacccacaacagacagctgtgatggaaatgcttctgacagtagctacaggactccaggcataggcccagtgctccccctagaagaaagaggggcagaaacagaaaccaaggtacaagagagggaaaatggggaaagccctctggaactggagcagctggaccagcaccatgagatgaaggagactaatgagcaaaaacttcacaaaatagccaatgaacttttgcttactgaaagagcttatgtcaaccgacttgacctcttagatcaggtattttattgcaaactgttggaagaagcaaaccgaggctcgtttccagcagagatggtgaataaaatcttttctaatatttcatcaataaatgccttccatagtaaattcctcttgccagagctggagaaacgaatgcaagaatgggaaactactcctagaattggagacatccttcagaaattggcaccattccttaagatgtatggagaatatgtgaaaggatttgataatgcaatggaattggttaaaaacatgacagaacgtattccccagttcaaatcagtggttgaagaaattcagaaacagaaaatctgtgggagcttaactttgcagcatcacatgctagaacctgttcagcggattccccggtatgagatgctccttaaggactatctaaggaaattgcctcctgattccctggactggaatgatgctaaaaaatcacttgaaattatatctacagcagcaagccattctaatagtgcaataaggaaaatggagaacctaaagaaactcttagagatttatgaaatgttgggagaagaagaagacattgtaaacccttcaaatgaactaataaaagaaggacagatcctcaaactagctgctcggaacacttcagcacaagaacgctaccttttcttattcaacaacatgttgctgtactgtgtgcccaaattcagcttggtaggctctaaattcacagttcgaaccagggttggcattgatggaatgaaaattgtagagactcaaaatgaagaatatccacatactttccaggtgtctgggaaagagagaacactggaactgcaggccagttctgcgcaagacaaagaagaatggatcaaggcccttcaagaaaccatcgatgcttttcatcaaaggcatgaaaccttcagaaatgcaattgcaaaggataatgacattcactcagaggtttctactgctgagctagggaaaagagccccaagatggatccgagataatgaagtgacaatgtgtatgaaatgtaaagaacctttcaatgcactgacacgaaggaggcatcattgtcgagcatgtggatatgtggtttgttggaaatgctccgactacaaagctcaacttgaatatgatggtggtaaattgagcaaagtttgtaaagactgttatcaaatcataagtggattcacagacagtgaagaaaagaaaagaaaaggaattttagagattgaatcagcagaagtatctggaaacagtgtggtgtgcagctttcttcagtatatggagaagtcaaaaccttggcagaaagcttggtgtgtgatccccaagcaagaccctcttgtgctgtacatgtatggtgccccccaggacgtcagagcccaggccaccattccacttctgggctatgtggtggatgaaatgccaaggagcgcagacctgccacacagtttcaaactgacccagtctaagtccgtgcacagctttgctgcagacagtgaggaactgaagcagaagtggctgaaagtcatccttttagctgtcacaggtgagacaccaggtggtccaaatgagcatccagccaccttggatgatcatcctgaacctaagaaaaaatcagaatgctgaactcctccaggaccagccatggtgtggaggtctcaggacttacagctcaagacattcccagctcttcttacacatctgctagcactttatgttgaaaaatataggcccataaatgcatcttttgaggactattttcctatgtttatgtactcttagtgaaattagtgtgcagagtcattctaccgataaagttttgaaataatgtgaaaactggagcattttttgagctattccttgaatatgtgcttttttgtcttgaagaaatggtgtatcaattgattctgtcaccgtcaggttagaatgagcacttccatttaagaaatcctttcatgtcttcttctctttcacatgtaggacctggaacagtttgaaagatatacctccatgttgccaaaatagatccatggtgaaaaatacagggacagttgaggctattgtattaacttatttaatttagtttataaatctctagctgcataaatgatgtctgttcttttaaaacaaaagaaaaaggacaaattgttggtgttcagatttccgatttataaagaaaagataacttgtttttgtagaaatactcctaagaatgtcttaagtatatagcaattatgtatatatagtattaaatatatatattatacatgcttttaggttcacattcatctctaatttattttttaaatataaagcatggtttatcgtggaattgagcaatgttctaaactgaagaaatgttttggtgatttatgttttgctgattggcatttgagggtattgatatttttataataagcggtaatttatgtggcatgggatatatttgtgaattccaacagtacttttaaagtaccattttttgtttctgtgcctatttaaaacagtgcctctcttagaaggtgctattaatataagatgagggttcagttaatgcttcagtcttgattattctaagattaaagtgcattttggtcactgggacagtcaaagtcatacaggttattttaccgtttacaatcctataattattgcagtagttaacatcagcatgtacaaacattttcaccaaaacccaaactttatgagacacctgaccttttacagaactaggatatgtggaaaccacatttatcgtaatgtttttcttttccgtaagataatcgagcatggttaaataaggtctctatataatgaacacttaagataactgtatgggccttttcctttgtcggaatgaaacaaaatccacatgtgataacctatgtttggggtgggggctggtcacatgattccttgtcatgaaggctgctcttcactcttttgtacttgtgattaaaatctcacactaagtttactatttaacttaatcctttttctcaaattaaacctttttttatactgtcataccccaaacattgtcactttttaatgtaccagtctgctagaaatctacaagaatgatcccactatctttagtatgtaaggattacaccttagatatagaatagaatttgagactgccacacatttattcaggccttgttactttaagaaatatcttattttttccaccccaaaggagcaagtgaaccaattattgctgacataataggttcccttcctccataaaaggattatcagccatgatcattaacattaaaccaaatagatggagccaaaaagagataaaagtagcttcttaggccctattaaatcagggaaagactagaagaaaatttacattgcttctcttttttaatggccagcggggtatgtgtgtgatgtatactcagagtggttttttggaaaattaaactgtagctatagatgatgctttggttttcttaatctcaagaaaagagaagcaatggaaatacagaatgattaactggggaagaggacttttgtaagtgtgactagaacaatggtaatgtatgggccaatgggaagatttataagtcagattatttttgaaaactatttttaaaagcaagaagactacactttccctaccaaaacagaagtaacatggacacacttaagttttggctcaataaatatcaatgttatttaacttagatcattgaaagaatactcatgtaaagataatgtttattatcatgctcttaacagtcattatctttaattttttaaatgagaagcattaatactagaagagaatttctggttatccggtcaccatattcactttccaccccacattcttcagctaaacgcaaagagaagcagtgaaacagccttacccgcttctctcttattaaagaatcactgatgtttttactcaatgaaaggtaaagtaatacccttagccatttattaaacaattcaaccaagagacctcaaagtgtgattgatgataagaataatcaatgccttttcccttccaacatacttgagcagtcatgacaacctaaaaatatcattggttgctttcccattaaaaccaacgttccctgtgggtcttaattctttattttcactcatttggtgctttccaagtcatcttttctttaaagtgcccttcctccaaactttaaaaagtacttccttgacaaaatttctattcattataaaacatttcaatattttaagcttaaattttgcttttgctgaaagcctaccatttggcgtgttaagtatgaaatatagtgcagacttttatcttggttttaagtggggctcaataaaaaacaccagccacttttgtaataatggcatcacagtgtcatcatgtatgcaagcaataaaactctttagggtatggttttatactgaaaatttaatatgaaggccccttcccacaagaatatagataattattaactttctagatgtgatacggtaattcgaattgcagagtataaggaagggaaatgggaaggggcatcattccttggattttaaataactatcaagaacatttttactttaacaaagaaaatggatagaaaaagcacattttgttttccctgaagtttaatttgacatcaggtttgtgtacttatcttcactaggtgacttaacttaccccaatttttttaaaaattattaaactttttacagaaactaaccttttaaatgtaccctttccccatatatatatacgcacacgtttggattttttttttttaagaacacttgttctagttataaatatataaagaaaacgataaagtttgtggtactgcagggttgttaaagattctttgatgccttctaaaaacttttgtcaaaaatacttttgagttcacaattctgttttacttttccttgtccttactttttggaaacagggtggttgcttttatttgttttctggttatattcaaagccttaagttcttaatctgagcatattgtctgtgataaatttctgatgatctttctggactagatacaacctgagtagcaagcaccaaccggagcaagtaaacttctagggaacaagcgtcttgggttttataggtatctttgctataatgcagaatagattaatgaagatttcctatatcatatgatatttgtgttagtgggtctaagattaagcacatgatatttataagctaaaattaactcaaaagtcaagaatgtcttaatgttttcattcttaaattttgtattctccaagaatgtattagtatatgaactgtggccaaccagttcctattcttcagactgtattgacatctgtagtggatcatgttgcttcttcattcttaccaattttattagaatcaaacttcttgttatttgcatactattatctactatagattctcagctttagaaaatgactatgatacataaagaccactaggtcaacttaaaaaaccctttctgtgaatttatacatgtatgtatatatgtaaaaacactgttgatttgcaattctgtctttccatagaaatgaactttttctatcgaaattgtttaacttaaatattttaacataaattatttacatggatctttatgtataattcatccttatatataccccttaatcacgtagtcatgagaagataactttgctttctttacagaaagggcagagaggaataagataagaaactgaaacaagcaagaatgaagagagatgtgggggagagactgctggtctccagaccacagcaatgtgttttaagataagatgaaatattttaactgcagaagggatataaaatctatgtaattacatgctgatgggatccattgcacccaggtttttgaccttggcctgtaaatgctagactatgatatcttgttattctttttctcctttgggcttttaaaaaataatttcattctcagatcattttctgtactgtttactgaggcaaaaaaaaaaaaaatctgaagtcaatcatggtcttctactttctggactgagcatttggcagaatgcagtatcttttcctgtattttgacatgaaatagcacatggcttctacaagatagttttaacttgttggggtcaccgggagttatatgatggtcaaccccttttcccaaaattcattgtggtagttttagtggaaaacgtaaatcaagaaatctcatatcatactttaataaataaataccaaatacatagtgacatataggtttgggaagaaactagtctgtggggaccattataagagaatcacattatatattacacagtatatggatattggaatgtatcacttgtggggggttctcttcattagcaaaacagtcatgtctgtctgtatataagacttttttttttttaaccaaactagcatttcattttgtgagtgacaattgacattttaaaataagcataggccgggcatagtggctcatgcctgtaatcccagcccttgggaggccgaggtgggcagatcacttcaggtcaggagtttgagaccagcctggccaacatggtgaaaccctgtctctactaaataaaaataaaacaaaataagtgtatctgggccaggcacggtagcccatgcctgtaatcccagcactttgggaggccgaggagttcgagaccagcctggccaacatggcaaaaccctgtctctacaaaaattagccaggtgtggtggcacatgcctgtaatcccagctactcgggaggttgaggcaggagaattgcttgaacccgggagacagaggttgcagtgagccgagattgcaccactgcactccggcctgggtgacagagcaagacttcgactcaaaaaataaaataagcgtatctggatttttcttttgaattcttgactgataagtttgagaatgtatgtttttggaattttacagttgactcaagtgtgaaagtatacacaagtaatttttcttttctagctatgtgaatgtaaaatacttgcagataatgtatatattgtgtaatatatgtatatttggtcataaaagcagataattggaaacattgtaaaattaagcactttaattcctattaaatattaaacatttgtatcttgtaaataaacacatccttaaattaaaaaaaaaaaaaaaaaaa

SEQ ID NO: 6137 - DNA, 6325 bp, Homo Sapiens
  NM_139244
tgttcggattatcttttgcttccccccagctgcctccttaccctcacactcccactcctccgtttccgcggtcgaagctgccttcggccccgggtggtctcccccgcccggggaccccctgtgcctcccctcccgggctgcgggggagcccctccgagaccatgaggaaattcaacatcaggaaggtgctggacggcctgaccgccggctcgtcctcggcgtcgcagcagcaacagcagcagcatccgcctgggaaccgggagccggagatccaggaaacgctccagtccgagcactttcagctctgcaagactgttcgccatggatttccctatcaaccctcagccctggcctttgatcctgtacagaagatcctggcagtgggaactcagactggtgctttaaggctctttggtcgtccaggagtagaatgttattgccagcatgacagtggagctgcagtaatccagctccagttcctgattaatgagggagcgcttgtgagtgccttggctgatgacaccttacacttatggaatttacgtcagaagaggcctgccatactacattcgcttaaattttgcagagaaagggttacattttgccatctgcctttccagagtaagtggctctatgtgggcactgaacgaggtaatatacatattgtcaatgtggagtccttcacactctcaggctacgtcattatgtggaataaagccattgaactgtcatctaaatctcacccaggacctgtggtccatataagtgataatccaatggacgagggaaagcttttgattggctttgaatctggaacagtagttttatgggacctcaaatcaaagaaagccgactacagatacacatatgatgaggctatccactctgttgcttggcatcatgaaggaaaacaatttatttgcagtcattcagatggcaccttgactatatggaatgtaaggtcccctgctaaaccagtacagacaatcactccacatggaaaacagttaaaggatgggaagaagccagaaccatgcaaacctatcctcaaggtggaattcaaaacgactagatctggggagccttttattattttatcaggaggtttgtcatatgatactgtaggaagaagaccttgcttaacagtgatgcatgggaaaagcactgctgtgctagaaatggactattcaattgttgattttctaacgctgtgtgaaacaccatacccaaatgattttcaagaaccatatgctgtggttgttcttctagaaaaggatttagtacttatagaccttgcacaaaatggatatcctatatttgaaaatccctaccctttgagtatacatgagtcccctgttacatgttgcgaatattttgcggattgtcctgtggaccttattcctgcactttattctgttggagctagacagaaacgtcaaggttacagcaaaaaggaatggcccatcaacggaggtaattggggcttgggtgctcaaagttacccagaaataattattacagggcatgctgatgggtcagttaagttctgggatgcttctgcaataactctacaagtattatataagctaaagacatctaaagtatttgaaaagtcaagaaataaagatgacaggccaaacacagacattgtagatgaagatccatatgccattcagatcatctcctggtgtccagaaagtagaatgctgtgcatcgctggagtttcagctcatgtcattatttatagattcagcaagcaggaagtaatcacagaagtcattccgatgcttgaagttcgattattatatgagataaatgatgtggaaactccggagggtgagcagccaccacctttgccaacacccgtgggagggtccaaccctcagcccatccctcctcagtctcatccatctaccagtagcagttcatctgatgggcttcgtgataatgtaccttgtttaaaagttaaaaactcaccacttaaacagtctccaggttatcaaacagaactagttattcagttggtttgggtgggtggagaaccaccacaacaaataaccagcctggcagtcaattcttcctatggactggtggtttttggcaattgcaatggcattgctatggttgactacctccagaaagcagtgctgctcaacctgggcactattgaattatatggctctaatgatccttatcggagagaaccccgatctcctcgtaaatctcgacagccttcaggagccggtctgtgtgatattagtgaagggactgttgttccagaggatcgctgcaaatctccaacctctgcaaagatgtcaaggaagttaagcttacctactgacctaaagcctgatttagatgtaaaggataactcctttagccgatcacggagttcaagtgtaacaagcattgacaaagaatcccgagaagcgatctccgctcttcatttctgtgaaacgtttactcgaaagacggactcgtccccttccccttgtctatgggttggaacaacgctaggaacagtgcttgtcattgcactgaaccttcccccagggggagagcaaagacttcttcagccagtaattgtgtctccaagtggtactatattgaggttaaaaggtgcaatcttgagaatggcatttctggataccacaggctgcttaataccacctgcgtatgaaccctggagagagcacaatgttcctgaagaaaaagacgaaaaggagaaattgaaaaaacggcggcctgtctcagtatccccctcctcttctcaggaaattagtgaaaaccagtatgcagtgatatgttctgaaaagcaagcaaaagtaatctcactgccaacccagaactgtgcttataagcaaaatattacagagacctcgtttgtgcttcgtggagatattgtagcattgagtaacagtatctgccttgcctgtttctgtgccaatggacatataatgacttttagtttgccaagtttaagacctctgttggatgtgtattacttgccccttaccaatatgcggatagccagaacgttctgctttaccaacaatggacaagcattataccttgtttcacctacagaaatccagagacttacttatagtcaagagacctgtgaaaatcttcaggaaatgttgggtgaactcttcactcctgtagaaacacctgaagcaccaaacaggggattctttaaaggcttatttggaggtggtgcacaatctcttgacagagaagaactatttggagaatcgtcctcaggaaaggcttcaaggagccttgcacagcatattcctggccctggtggcattgaaggcgtaaaaggggcagcatctggagttgttggtgaattagcacgagccaggctggcactagatgaaagagggcagaaacttggcgatctggaagaaagaactgcggccatgttatcaagtgcagagtcattttctaaacatgctcatgagattatgttgaaatacaaagataagaagtggtaccagttctgacaaccagaatccaataagtccaacttcagccagaaggaaaaaagttttccatttttattacattctttaggaaagttaacgttaaagggatgttcgtcactgaatactgttctttcctagcacagtcatgcactgttttacctcagtcatgtggctttaactgaggagtgttcacacgcactcgaaatggagtatatggtgtgtgccagttatgagttgaccatttgggaattaaacaggtcacacgtgacagatgaagaaaccaagggggctgctgaggagacctggtgcagggactaatcctggatcattcctgtattaaactttcatatgccaaaagggtttgtgccgttttatctgccatcagtgtttgacctgtttagggcagaggcaataagtcagaagtcttgaagttgaaatagttatatgtgtgtcattggactggattataaacagctgtcttggactttccctctcttaacactgactggtcatcagtatcattagtgaaaaagaaacaaattgtttgttatcatctctttagacagataagctgaatggtgggctttaaataataaaaacatacacatagttgacttgtgtatgagctactcttggattcttgttattatagacttgtatttagttcatattttgtcaaaagcaaaacaagaagatacatcacttttcattgaaaagaaaagtgtagagcatgactgaattgctcatcattctgggagtttccatgtagtggctatgcagtgtggaaagtgagaaaaacctccattgtggtgaggagaatacttcaatgtcccttgtccttgttctcattaattcagctaaaggtggatttgaccaaaataatgctggttaaatttgtagaaatgttgaaattggctgtgttttaaattttgcttgaatttttataaaatgtttaaccaaatgtacctttgcattctttaattaaaattgcttaaaaaaaaactttcattatttcagtaaaatgctcagctcccttttcaaaatgccctttatttgctaactgttccaatacactcaggtgatgagccaattaaatgttagtgcacatgctatcgcatggaaaattacaagcatctgttgtcaataattatataagagtttagtctgatgacctacaaaatattttgtgtagaaatatactataaatctgtacatatcctttcaaggttttaaaaaaccaaaaagaaaggaaaatatgtacactgtgataactaaattatttctgtattggaatataatacaatttgagaccagcaatggacaatgaatgattgtttcatagaatagcattacgggcaggaaagaaaccacctagtagatctagaagtaagcaatctcagaatacagactaatctgagattattattgattgttgttaaagcaacccagcaaaagcaaaatggaagcattaaaattaatgttaatgaaatttaaatattgtcttctataaaaaattcctttaaatgattttgttttttcattaagagataatcagagcacaaattgatagtaaacaggatggttgtttttctattctatatgatcattaaaggaatatgtaggacatcttaactttttcatacagtctgttatgcatattttcctctacttttcattaataaagcttttatgtttacattttataacatgcactactagatgcaaaagtttacatcaaagtttactttaaatatcatttggtagggactaaatgtgtgtgatagagataattgatcaagccaaaagaaatattttttaaataagcccttttcaaaagtttttgaatttatagaaagcaccaatgaataacatatttctgtttcgttaatgtcagctgcctgaacattcagcagtttataaattgcttaatttgtgttatctattatccagtaaacccatagttccatgatatgtcacaggaattgttaggtcctattttaaaggtacagttttgtgaatgtcatcaataaaatcaacagttatggatttgaagaagttgggaaagcattatgtagattaatatactggttggttccctatctatgtggaaggtcatattagctgcaattatttaatttgctgtgttattttgtgttatataacacaaatatatttgtatattaacttcatttttactgtcatttttcctgttgtatacaaaatgaactaatcttgtaattattttcaaatatagaagtatatacattagatggatttccaagattttgtaagaaaatcttaaatcagtgttttgagttatttaatttttaaattaatctacaaattatgcacaacaaactagagactcagttaggattagaaagcttaaagtatgtttgagtgtaggaaataagcttctcagagttatacttgattctgtctgtagataagagacagtctacagtaataactaacccagggaatttactgtaatttgagaggtaacatctctatttttttctttttaaatacagaaagtaatagtcaccagcaagccacgatttcaggaaaactgactaaaaaaaaaagtcaaaatagaaaatatcagaaaaatgaaagatttttgtgtgccctctccatatcctcattgtttttgttgcatttgtccttgactctaaaatcactgaagtattcatgattagtagtttgtaagtaggaagtggtttttctgtatgtaccatatatccagttcatttcagttttcaaactaaaatccatatgtatttgctgagaaagttatttgaaatcttatattctgacaaattctgtacatt

SEQ ID NO: 6138 - DNA, 4445 bp, Homo Sapiens
  NM_139246
agtgggctacgaacgtctggcacacatgcaaccgccccctcgggctgcctccgcctgccggctacttctttctcccgccttccgctctatgtccttccggggccacgcagaaagtgccgccgctttggccactcagagcccccgggccgcggtcgtcgtacgcctgaaggcgggtcgtgccggcggccgctctagtctccgcctccgctcaggccggtcctccggggcttctcaatggtttcccggtggcctctcaatggttttcccggcggcccttgcgccgacgccaggagacttccggagcttggtgacgtcacgagcgagcttttctacccaaatacgcggcgggggaataggctcgagggcggtgagcagtgacaattgctaggcggagacagtgcagggaagagagaccttagaaaggatcaggactggcgggaggtatttaactgaaaggaatatctgcttcactgttgcaaccaaaccagatgccttcttccacttcaccagaccaaggagatgacctggagaactgcattttaagattttctgacctggatttaaaagatatgagtcttattaatcccagcagcagtcttaaagcagaattagatggcagtacaaaaaagaaatactcgtttgcaaagaaaaaggcctttgccctttttgtcaaaaccaaagaagttccaacaaaaaggagttttgaatgtaaagaaaaattgtggaaatgctgtcggcagctattcacagaccaaaccagcatccatagacatgtggcaacacaacatgctgatgaaatttatcaccagacagcttctattttaaagcaactggctgtgacattgagcacctcaaagagtctttcgtctgcagatgaaaagaaccctttaaaagagtgccttccacatagccatgacgtgtctgcttggctccctgatataagctgctttaaccctgatgagctgataagtggccagggcagtgaagaaggggaggtgctcctttattactgctaccatgacctggaggatccccaatggatctgtgcctggcagacagctctgtgtcagcacctgcacctcacaggcaagattcgaattgctgcagaaggaatcaatgggacagttggtggaagcaaattggctaccagactttatgtggaagtcatgctttccttcccattgtttaaggatgacctgtgtaaagatgattttaagaccagcaaaggaggagctcactgttttccagaattgcgtgttggtgtatttgaagaaatcgtgcccatggggatcagccccaaaaagatctcctacaagaagcctggaatccatttatccccaggtgaatttcataaagaagtagaaaagtttttatctcaggcaaatcaagaacaaagtgatactatccttcttgattgcagaaacttctatgaaagcaaaataggacgattccaaggctgcttagccccagacatcaggaaattcagttacttccctagctacgttgacaaaaatctagaacttttcagagagaagagagtgctgatgtactgtaccgggggcatccgctgtgagcggggttcagcctacctcaaagccaagggagtgtgcaaggaggtgttccagctcaagggtggcatccacaagtacctggaagagtttcctgatggcttttacaaagggaagttgtttgtttttgatgaacgctatgctctgtcctacaacagtgatgtggtgtcagagtgttcatactgtggagcccgctgggaccagtataaactctgctctactccccagtgccgccagctcgttttgacctgccctgcctgtcaaggacaaggattcacagcctgttgtgtcacatgtcaagacaaggggagcaggaaagtttcaggccctatgcaagacagctttaaagaggaatgcgagtgcacagcccgacggccacgcatacctagggaactcttgcagcatgtgcgacagcctgtgagcccagagccagggcctgatgctgatgaggatgggccagtgcttatgtgagcagcacctttggcattttcccaggccctcggtaaaagtaggtttggggtgactatacagagaaagcatggcaagactgcagaaacagagaaatcgggaacttcagttctggccgctgccaccgtggcagccgtctacacttcacagcgggaggggaggagtcacgttgtctaccacttacctgagacattctgatttggatgatgctagagcacagaaaataggtgagctgcatgggatcccaaagctgctgagggatagagcctgagcctggtggccacagcatatgccctttctgttccatgcagctggggctgttagtagtcattgcccttgtcagcagaccttctaccctggtggcaaacacatgaaagctgtggccctgggagtggcctcctaaaacaagccacttaggtcatctgccatctacccttaacctctgtctctcgcctgaggggaatctgcaagctgtgcattgggcttacctcctgcttttgtagaaataaccatcctttggtatacatggaggatagttccagaacgcctgagtatacaaaaacccaatgcatactcaagtcccacagtgggccctacagaacccacgtatgtgataaatcagccctccatgtacgcaggtttcgccccctgccaatactgtattttcaacctgtatggttgaaaaaaatccatatataagtgcagccatgcagttcaaacccatattgttcaagggtcaactgtatagtttattgaacagccacacccattcctttacacatgatctatggcagagttgaatagttgcaacagacactatgtggcctgcaaaatcggaaatttttactgtctggccttttacagaaaagtttgccagcccctgatctagaccagcagctcatctgatagaggcagaggtggccttaaagatgtggccttcttcattttctgttggtttggtttcgtttctatgagagatttcctctgatagctctgctttccccagcacttactctctgagcttttaaatgttctctctgggagcttcatataagctcggtgacatttgagccacagtttttagatcagcacctggaatacatgacacattcttactgaggtcatccagcactgccatggtggctgcccagtcttctggccagtgtgccaggcacatgtccctgtcacacaggttccaagaaacacatacgcagccatgcatagaccaacagatttaatattatattgcagttttcagcgatgcagaatgcagctgcaattgtgttttaaggagaagccaaatggggatggttgtccctgcaacatggtgccactcctgggccatgtgcagcctcagtggacactcttccatagcgctgaggccctggccccgcctccagttaccctgtactgcccactgccttacagttcagtgcgcaggccttcaccttttcatcaccagcctctctgctcagtgctctggagttcttgaccttgtcctttatcatgagatttgctgaaatcactaatgaaaataactcccaaaagcaacaaacaaaaatattagtttaactggcactgtggtatattaaaaggcacaagggcattgtggcttaacacttttgctggatcccaagagacgcacatgatgttaaaaagagatctggcagcagtactaatactacatttcagtgtaatcatcttggggtggtttggccaggatttcccaattccttgatatctggagtttcttcaccattgtccggcatcctgcggaggcttaatatacaggcgtaaggtcagcagcaatttgtctaataagtgatgagatcagtagctgaagtctctaagctgggccattactaaataccatagccatgttgatctggaaatttatccctctagtgtcttacctcacataagccatttgcccactgtgcaatatagaaaggtgttttcaaaagtatttggccgtagattttcacatccatcataaggttggcattcaataaggaaaaagttctaactccagtattaaattgtacataaatcccaaatgttcttaaagaacactcagggacatgtttgttgcctgggattggtaatgaaaggttggtttttgaaacttgaaatttcaccattggtttttttcctatcatttctgcatatccagcaaaaggaatctcatgttgactcctggcagagttcagtggcttcagtctgtctatctgttctgaggggaaaattgtgttctggatccagtaatcaatttggcaactttaatcgaggttttcaaaattccaaggagggttaataaagaatgataatcagttttatttgctaatagctaagacaaatttgtaataaagtgttttataatacttcaaaagcaaaaaaaaaaaaaaaaaa

SEQ ID NO: 6139 - DNA, 2904 bp, Homo Sapiens
  NM_139265
agtgcgagccggggagagtcgaacccggagcagggtcccatccgagcgtggactggcggcaggatgttcagctggatggggcggcaggcgggcgggcgcgaacgcgctggcggcgcggacgcggtgcagacggtgacgggcgggctgcgctcgctctacctgcgcaaggtgctgccgctggaggaggcgtaccgcttccacgagttccactcgcctgcgctggaggacgccgacttcgagaacaagcccatgatcctgctggtgggccagtacagcaccggcaagaccaccttcatcagatacctactggagcaggatttcccaggcatgaggattggtccggagcccaccacagactccttcatcgccgtgatgtatggagagactgagggcagcaccccagggaatgctttagtcgtggaccccaaaaagccgtttagaaagctcagtcgctttggaaacgctttcctgaatcgattcatgtgctcacagctccccaatcaggtcctgaagagcatcagcgtcatcgacagccccggcatcctttctggggagaagcagcgcatcagccgaggctatgacttctgccaggtcctgcagtggtttgccgagagggtggacaggatcatcctgctctttgacgctcacaagctggacatctcagatgaattctcagaggccatcaaggccttccggggccaggacgacaagatccgtgtcgtgctgaacaaggccgaccaagtggacacgcagcagctgatgcgggtctacggggccctcatgtggtccctaggcaaggtcatcaacacgcccgaggtactgcgcgtctacattggctccttctgggcgcagcccctgcagaacacggacaaccgccggctcttcgaggctgaggcccaggacctctttagagacatccagagcctcccccagaaggcagcggtgcgcaagctcaacgacctcatcaagcgagcgaggctggccaaggtgcatgcctacatcatcagctacctgaagaaggagatgccaagtgtatttggaaaggaaaacaagaagagagagcttatcagcaggctaccggaaatctacattcagctacagcgagaataccagatttctgcaggggacttccctgaggtcaaggctatgcaggaacagcttgagaactatgacttcaccaaattccactcgctgaagcccaagctgatcgaggcagtggacaacatgctgagcaacaagatctcgcccctcatgaacctcatcagccaggaggagacgagcacgcccacgcagctggtgcagggcggcgccttcgatggcaccaccgagggccccttcaaccagggctacggggagggtgccaaggagggcgccgacgaggaggagtgggtcgtggccaaagacaagcccgtctacgacgagctcttctacactctgtcgcccatcaatggcaagatatcaggtgtcaacgccaagaaggagatggtgacctccaagctgcccaacagcgtcctgggcaagatctggaagctggccgactgcgactgcgacggcatgcttgatgaggaggagttcgcgctggccaagcacctcatcaagatcaagctcgacggctacgagctgcccagcagcctgcccccccacctcgtgcccccctcgcacaggaagtccctgcccaaggccgactgaggggtgggctgcagaacggggtgggaactgggggacctgggcctcaggcctgctccaccactgactcaccgaatgaccttgggcaaggcactgccctctctgtgccttggtttccccatctgtagaatggggagggtggacactggaaactagatgacttctttcacctccaaaattcccttagtttctatgaaaatattgggggtaggggggtggattaggagattgaagggttgagaagaaagagaaattgtccaaagagtcctcagaacctgcctggagaaatgcgcatgggggtgggcctggtaagtcccaggaaccacaggaagtgagctaaggctcacccagagcagctgggtctccaggctgcctgggctttttgtcctcatgaacaactctggagcagctgtctgtccctcagagggcacctggaggcagcaaagattatcttatttattttattttgttttctgctatatttagagtggcaaaaaaatagagcagagggtttctgctgtctccagactgtctaccaaagagaaggcgacagatgcctcctgggtttggaagggggatgcactgtggatctgccatccattctgcagtctccagcagagcaggcagtcaggccccagcgtgcctccatcccagtgccccgatgaccatctggtcagccctcccaacctcccttccagggggcttaccagcaaagccatattcggctaggaatttggaattcacaacctttattaacccctggcaaaacttcccgtttgcatgtcaaatcacattgaagcctgaaaattagcttttcttactggtttttccaataagtaatagcaaagcccacttatcatacttaaactacagtaaagaaaagaggtggttctctgcagtgatcgtttagtgtggccctcaaacattaaatatcccgaggtctccttggtgggtggcaggatttaaattcaatcaaatcctgtcctagtgtgtgcagtgtcttcggccctgtggacacaggtgaatgagggaccagccctgccctgggctgttgagaagagatcagtccacccagagttagacattgtttttgtagaaaacaggcatttattatgtctagggttttgtgttttttttttttccttacaggataaaagcctttatacagaaacaaaatggaacctttcatataaaaccttttctttaaaaaaaaaaaaa

SEQ ID NO: 6140 - DNA, 3175 bp, Homo Sapiens
  NM_139267
ggcagtcgcggaaggcgcgggagcttgcgtgctgctgggcctgagctgtctgtctcgtttctgtccgcgcgccctgcatcccggccccgggcgcccgctggaggtcgccgaggagccacagggctgactggttccttgggccccggaagctcgcggcgggccctgcgggaggcggcatgctcccgcggaggctgctggccgcctggctggcggggacgcggggcgggggcctgctggcgcttctggccaatcagtgccgcttcgtcacgggcctgcgcgtgcggcgcgcgcagcagatcgcgcagctctacggccgcctctactccgagagctcacgccgcgttctcctcggccgcctctggcgccggctgcacggccgtcctggccatgcctctgccttgatggcggcgttagccggcgtcttcgtttgggacgaggagaggatccaggaggaggagttgcagagatctattaatgagatgaagcggttggaagaaatgtcaaatatgtttcagagctctggagtccagcaccaccctccagaaccaaaagcccaaacagaagggaatgaagattcagagggcaaagagcaacgttgggaaatggtgatggataagaaacactttaagctgtggcggcgcccaattacaggcacccacctttaccagtaccgagtttttggaacctacacagatgtgacacctcggcagttcttcaatgttcagctggacacagagtatagaaaaaaatgggatgccctggtaatcaagctggaggtgattgagagggatgtggttagtggttccgaggttcttcactgggtaacccattttccttatccaatgtactcacgggattatgtttatgttcggcggtatagtgtggatcaggaaaacaacatgatggtgttggtgtcgcgtgctgtggagcatccgagtgtgccagagtctccagaattcgtcagggtcagatcatatgaatcccaaatggttatccgtccccacaagtcatttgatgagaatggctttgactacttactaacatacagtgacaatccccaaacggtgtttcctcgctactgtgttagttggatggtttccagtggcatgccagatttcctggagaagctgcacatggccactctgaaagccaagaatatggagattaaagtaaaggactacatctcagctaagcctctggaaatgagtagtgaagccaaggccaccagccagtcctctgagcgaaagaacgagggcagctgtggccctgctcggattgagtatgcttgacaggctttgggataagaagggacaaggtgcttctagccctgtctcagtccgttatcactctgctgtagaagggggacatgccacatgtattagaaggcatctgctgtaacttccagtgcaagataattcaataactgatgtcccatttcattcagagcccttattgctcttatcaaaacagaagaaggctacatttgtgggagtgttgtcatattctcaggccaactgttttgaaattcggtatctcactgagctaatctggaacaaacctctcacctcaggccagaaggggatgacctccatttgcttctctgagtagtttcctctgctgacattccaaatcccaccatcgattgtgcagcgctttggatttccttcagttctccaggtccacctggaaagtatagttggccagttgagtctctcaaatgaggggctactgggagtgctcttggtaacaatcatgatgtgaatgggtgtgaacgatacttggctatgttaagtgccttgtccgcaccttgcttttatctctagagacatgaagttattattaattttttttttttttaagtagagatggagtttcactctgtttcccaggctggtcttgaactcctgggccatgcctggccagggacatgaatttgtacaaagaaatttccctccctgcctgcacaatatcacccattgactcaccttatccaaagcaagtttcctgtgaatcggccagttcttctatattcattggatcattgcctccttcctaaccttccccatttaccaagaacactgggagactaatccttttagatagtagctttttgatgctcaaaacatcacatttaaatttagtttaaaaattttttaacttttgtgtcaaataggagttgaggaattgagcaggattctaccctagtccgattgtatagaaaacaccattttgattcaggtattatttttcatatttcaggtttgacttgttcttttcagaaggctaaagtcagaggaatgggggctgggccactcccttggagctctcagatctacagacaagctgtgtgaatgcatagatgtaatcttgtctcaaatactaatacagtggagatttggtttatgttaccattaagttcctctaaaaagtttttcttcctctcttcagagccaaaataaaagtgaactacactgttcagataaggtcacaatctgatgctgtcagtttgaccgagctggttttgcttatggtcatgctgcaatttgttagaataatagggatcaagttttaaatcctcctccttcccttttttctggagtcttgagggccagagtttttgtttttgtttttgtttttgttttcctgcttgctactgttttgtggtgttgaaaagtggtttaaacctgagactaacttaaacacttccttgaccttcttgttgcctgttcatttttgtgccaaggaagtagctgccccagtgtatgtcttgccttctccgcgtcattgttggaagaggagagatgcatcgagcagtcccagctgcttttcatttattacttcttctttccaggacctgacagaagtcagggaagagtccctgggttatgtccaaacttagcacctgcaattgttgggatgtggatggatgtgtgcataagagagagagagaatatgtgtgtgtgtgtgtgcgtctgcgagcgcacacacatgcacaagtgcgaaggagttgcggttgctccatgttctgacttagggcaatttgattctgcacttggggtctgtctgtacagttactcatgtcattgtaatgatttcactcctaactgtgacatttttatcaaatgtgtgaataaatacataaagattggtacaaaaaaaaaaaaaaaaaaaaaaa

SEQ ID NO: 6141 - DNA, 6611 bp, Homo Sapiens
  NM_139281
taacgagcttccttccaccgcaaaagagctggagaacaatgctaggcaacgtgctggagaccttggccctcggaacccaagtcacgcctcccatgtgagctctggagggagaactttatgtgttgcactgagggcagtctccggaaacgcgattcgcagcgggcgccggaagcggtgttgtgtctgcagctctggcagaggactgttccactagacacgctgaagggactgggtacgtgttttccttcaggaccagagctgagaggagctgggatcgcggcggcaatggaacgggcctcagaaaggcgcacggccagcgcgctttttgcggggttccgggccttgggacttttcagcaacgacattccacacgtggtgcggttcagcgcgctcaagcgccggttctatgtaacaacctgcgtgggcaagagtttccacacctatgacgttcagaaacttagtctggttgcagtaagtaattctgttccacaggatatctgctgtatggcagctgatggcagattagtctttgctgcttatggaaatgttttctctgcatttgcccgtaataaagagatagtacatacctttaagggtcataaggcagaaatccatttcttgcaaccctttggagaccacattatctctgttgatactgatggcattcttattatttggcacatatattcagaagaagaatacctgcagttgacttttgataaatcagtatttaaaatttctgcaattttgcatccaagtacctacttgaataaaatacttctgggcagtgaacaaggaagcctgcagttgtggaatgtaaaatccaataaacttctatatacatttccaggatggaaagttggagtgacagctcttcagcaggcaccagccgtggatgttgttgctattggtcttatgtcaggtcaagttatcattcacaacattaaatttaatgaaacattaatgaagtttcgtcaagactggggacccattacttcaatttcatttcgcacagatggtcatccagtaatggcagctggaagcccatgtggccatattggactctgggatctagaagacaaaaaattaatcaaccaaatgagaaatgcacactctacagcaattgccggactgacatttctccatagagagccacttcttgtcacaaatggcgctgacaatgctcttaggatatggatatttgatggtcctacaggtgaaggccgacttttgagattcagaatgggtcatagtgctcctcttaccaatatcagatattatggacagaatggacagcagattctaagtgcaagtcaagatggaactcttcagtcattttccacggtacatgaaaaattcaataagagcttgggacatggattaataaataaaaagagagttaaacgtaaaggacttcagaataccatgtcagtgagacttccacccatcacaaagtttgcagcagaggaagctcgtgaaagtgactgggatggtatcattgcttgccatcaaggtaagctatcttgctcaacctggaattatcagaaatctacaataggcgcttactttctcaagccaaaagagttgaagaaagatgacataactgcaacagcagtggatataacttcttgtggaaactttgctgtaattggcctctcatcaggaactgtagatgtatataacatgcagtctggcatacatcgaggaagttttggcaaggatcaagctcacaagggatctgttagaggtgtcgcagtggatggattaaaccagttgacagttacaactggtagtgaaggattactcaaattctggaactttaaaaacaaaattttaatccattctgtgagcctcagttcatctccaaatatcatgttgctacatagggacagtggcattctgggactcgccttggatgacttctccattagtgttctggacatagaaactaggaagattgtcagagagttttctggacaccaaggccaaataaatgacatggcttttagtcctgatggtcgttggttaataagtgctgcgatggattgctctattaggacttgggaccttccttctgggtgccttatagactgctttttgttggactcggctcctctcaatgtttctatgtctcctactggagactttctggcaacttcccatgtggaccaccttggaatttatctatggtccaatatttccctgtattcagttgtttcattacggccacttcctgcagattatgtcccttcaatagtcatgcttcctggtacttgtcaaacccaagatgtagaagtatcagaagaaacagtagaaccaagtgatgaattgatagaatatgattcgccagaacagttgaatgagcaattggtgactctttcacttcttcctgaatcacgatggaaaaaccttcttaaccttgatgttattaagaaaaagaataaaccaaaggaaccacccaaagtacccaaatcagcaccatttttcattccaacaattcctggccttgtacccagatatgctgcacctgaacaaaataatgatccccagcagtctaaagtggtaaatcttggagttttggctcaaaaatcagatttctgcttgaaacttgaagaaggactggtaaataataagtatgacactgctctcaaccttctgaaagaatcaggcccatcaggaattgaaacagagctgcgaagcttgtctcctgattgtggtgggtccatagaagttatgcagagcttcttgaaaatgattgggatgatgctggacagaaagcgtgattttgagttagcccaggcataccttgcattgtttctaaagttacaccttaaaatgcttccttcagagccagtactcctagaagaaataacaaatttgtcatcccaggtggaagaaaactggacccatttgcaatcactcttcaatcaaagcatgtgtattttaaattatctcaaaagtgctttgttgtaaaaataaatttgtgactaaacaaagactttcatattaaatgggttcaattgaactcatttcttattttccaagtgtcaatgtgaaaagaaaataaatgctagcactactgactagtcagtatatctccactttaaatgctaaatactttcttgaaataaaatcgcacctcccggccaggcatgatggataatgcctgtaattccagcactttcagaggccaaagcgggaggattgcttgaagccaggaatttgagcccagcctgggcaacatagcaagcaagatcccatctctacaaaaagttaaaaaaataaattacacctgccttttgttttgaagacttaaagaatctgctcaaatgatttattttctgagtctcttcacattaacttttatatgatttttaaaaaattattacctgcttatattttttgagtatctgtttcatataaagagatgctgcatgttcactgtgaagtattgctgaattaaattgaaaatgtcagataaaactgatacatgatgtagttataaaaatgctgttatgaagaaaaaaggaatgcttttttcctcggtggcctttgataaaaatatgaatgattgactctcagagttggaggataaactaatcatcttctagcacagccctgttgtgttgcaggagaggaatcaggctaaagtctgctggtatttcagtgacagattaaaactttctaacagtggcctagtgctttctccattgtaatgtactgaaaggaagttgttcatggatcagaaatgtgggaggcccttccttgcccaaggcaagtcgctgtagatggttaaactgataccaaggataggtaagggaaattccaaattccattggaagatggccttttactgacactgcagacatgtagataacaatagtttaatgtcctctgaaaaggtaaaaattccataaatccttgcaaacaatttttagcaatattgtttattgctaccacagccaagaatgggtatttcaaagccagggttttttttattttgttttgttttgtttttttttttttttttttggctacacttttttgggggggaccttttaatttgggaagaaaatgctgagtatacttttctttcacaaccattgcaaacccaggtagccctggagttttctttttttctcatcatcattgttttgttttttttatggttcaagacttttgcaatacatgaattaaaaataagcagttctttaaagcatagcgctctaaaaactattcttagtttataccctcaaaagttgggtctttcatgaaacacagtggtttgaatatgaacaccagtagcattctcgttcgttgttagggtaagagagttttgtagaatgatctccaaaagaagcagtcctcaaaaggcatttaccagtgatatcttttaatattcatgtttttatttaatgatgtaagatagaattaataaactactaaggaaataagccaatgtggttattgtactcaatttcgtttttcttttagaaatgtgtattgacttattaaagccactgacagaaatgttaatcatgacttaagttctaatttaaaaaactattttcctctttcctaaatactatattctaaattggaatatggcaaaatcccaatatataattctatacctagtaaagattgtaaataactaaaacaaaatgataagagctgtgaactgaaattgtattgcttacagaaatcatgaaccgaattttcttctctttttaaagtgagcataaagacttaagtgtattgttaccagagatatatttagatagaatacatcattttggcaggtaatcttctagaacctttcatgtactgtttccatcaagggagggaaagaaatagaaaatataattttatctatattttccttaaaatatatcaatctgtgcacactctttcagttttttaattactcatgtaatatatgactacattttgcttgtgtgctttttgaaaaccatcttcagtcccaatatcctctgtagaagtaatagttttaactctcctagatcttcttttagagtgtttttatgagtgtttaatgtaggaatgtgtatatattatctacagccacaggaaatgtatagttacgatttttacatacgtgtatgtatattattgtacaacttgctatttctacttgggagttttttattttggtacattcacatttacctaatctcttgtgcactgtccaacagtactttgcctataatagacacttaaggaagttttccttctttttattcctttataattacaaacaatgctgaaaggaacatcatcctacatgagccctttttgtacatataaggctctctctgtggtatatgcttaggatttgaatttcaggccagagtataaccatttttaatttgaagagatacttccatttgggttccagaatggctgtatcaagttacagttcccctgagcaagatatgagcatctgcttccccatgtaattaatgacacttgctattggatttttgtaatttaattactctgaaaaaattattttggttttaaatcagaaatttctcactagtgaagatggacatatttttgtatgtttattttagaacatataaacatttgttaattttctttttcctctcatttttctattgaatgatttgtccttttatctcatggatttgttaggagttctcttgtattttctgtattttatgtctgttgccaatgttttctcctacttagccatttggctttaattttacatggtgtctgtttaaataaatgttttatatttgtatacaatcaaattgattaattttcatgacttatttcaggatataaagcaaattattttctaagacatttacagtgtatgttttcctatgtttacatgtgctcatttcacgtcatgtattttcctctacgacatgtttctgtgtgagtagttaacatgtagatctttagaattgatttttctgaagagtgaaacagcgctgcttccaatatctgttcaaaattcatttattgaaaagtccactcatatgtctgatttgaaatgctgtttcattatgtgttaaattctttcactgagctcttccatattcctagtaaatgatgcattactttggtatgttctcagatttgggtaaagccttcctcatgttctataaaaattggttaactgctggtgagcacatctcttgaagttttgatatgggttgcacaacatttataggactgatttggagagaccgacaataccgagtgcagtcctcccttggtatctagttccaggacccctgtggataccaaaatccaagcaatgccctgcagatcatgggacctatgcatatgaaaagtcggtccttgtatttgagggttttgcatccctcaaataccatatgttttatttgtgtttggttgaaaaaagtttgcatataagtgaaacttagcatttcaaacctgtgttgttcaaagatcatttgtatttctcttcaagaacaatgaatgtcttcattaaatcatcttttgtgggagagcttttggtttcatagattttcatatatatatatgatataataaacactttttgacattcaaaaaaaaaaaaaaaaaaa

SEQ ID NO: 6142 - DNA, 3748 bp, Homo Sapiens
  NM_139283
ggctgaggcggaggagccgccgcttctgacctcgctctggctccggtgcgcgcggctgagcgcgtgcgaggccccgcgcgtcgggcaggggcggcggcggccactgcgcgccgccctgaggagcgccccagcggcggcgcgactgcggctgaggagagagccggctccgggcctccgcgtcctcctgctcccccggccccccgcctcctcgggggggcggcggcggcgatgttctcggtcctctcgtacgggcggctggtggcccgcgccgtgctcggcggcctctcgcagaccgaccccagggccggcggcggcggcggcggcgactacggactggtgacggccggctgcggcttcgggaaggacttccgtaagggcctcctcaagaagggcgcgtgctacggggacgacgcgtgcttcgtggcccggcaccgttccgcggacgtgctcggggttgcagatggtgtaggaggctggagagactatggagttgatccatctcaattctcagggactttaatgcggacgtgtgaacgtttagtaaaagaaggacggttcgtacctagtaatcccattggaattctcaccacaagctactgtgagttgctgcaaaataaagtccctttgctcggtagcagcaccgcctgcattgtggtgctggacagaaccagccaccgcttacacacagcaaacctgggcgattcaggcttcctggttgtcaggggtggtgaagtcgtgcaccgatcagatgagcagcagcattacttcaacactccattccagctctcaatcgctccccctgaagccgagggagtcgtcttgagcgacagtccggatgctgctgatagcacgtctttcgatgtccagctaggagacattatcctgacggcaacagatggactctttgacaacatgcctgattatatgattcttcaggagctaaaaaagttaaagaattcaaattatgagagtatacaacagactgccagaagcattgctgagcaagctcatgagctggcctatgacccaaattatatgtcaccttttgcacagtttgcatgtgacaatggattgaatgtgagaggtggaaagccagatgacatcaccgtccttctttcaatagtggctgagtatacagactagctgaggtgtcaagtcctgcctttcctttcatcatcccaaatttcccctgccatgtgtgctgatcctgctggcaggaccacatttctttgccactgatctcaatggccagtgatgtaagtcttttgcctgtcttcttgagactcgttgagatctttgttgagaaccactactatcattcactagctcatatctgccggcagcaattgaagagatccaatatttgaagattggccttcatttctcgatgttctttccatgatggggatggaggtgttcagtgccaccgtggctgttacttttcaaagtagttgaagtattgaaaatgagtaatgttggtaaagtgaattcaaaatcctagtatgctaaagggatggtacaagtctaacacaaattgtacgtaatgatacatctactagaaacatacattattcatcaaaagaaatgttacatgtgtactccacaggcatagtctttgttatgatgattggtgtggctttatgtctttgttataaactcctatttttcaggggcttatgattctgctctaaaacattgctctgggttatacagttttgatcccaaaagcttttttgttacaaatcgggagaaaaatccattttagttctatggatggaaatatttcatgcttttaaaaagatgtttgtgttcctgtggttaaagttttggcagtttattgattagtccaaatcacaggctaaggcctgatctccaggaggggtaggggagacactttaccagtatttttttatggaaataatactcaaggttgtaaaacccctcaaagcctagaaatttaattgttatggctgaaattcctcctagttgtctgatagaatgcccctgaatgggaactctaggtcccaaggcctgaagggttgagaacagacagctgtaactttgaattttgttggctttcagtggtcatgctacctacccatactcgtactctcagaccttttattagtagccttgctttctatagagcatgcaccaaatccagtgagtccatgtggagagagcactgtgtgcgcagcggcagcagcacagacgtccatgaggaaaactcccagtgatgatctgacatttacaattaccccacatggaaatttaggggtttctgaatcaagcttaatgtttacagtttccaaatagccattttgcagtgtatagtttccttacaaaactaccccgcattcagttttcacattatctgcaagctgaaacttatttttaagttttgtgtacaagttgactgctgtaaagatatatatttttgggtcagtttttttccttcattaacttggtggtagaaaaaaatatatacttagaaatccttaaattaaagccatgttttatatataagtcaggtaacattggtgtatagatgagaatgcaattaaacctgatgagaatctacttgagaatatagaaagtctttctctaaaggagatactgactccctggtttattgcattaaaatttatgtttgaggttacctcaacttgttttaaaagattttgttttgtgaatttgtactgtatatttgagtaactgtcaggcttttatttaaaattgtttaacatgtaccatgtacatgtcattactatatttcaatgcatcatgcttgtaacaggcatttcatttataataagaatgagttattcatttgtaagccgttcagtaatttatctactattcctaaattggcataatgttagataatctattttgaatcacctttaattacatgtcagaatgccttaactaccctaacttgacaaaacagaattctttggtagacgcggtgggggcggggtggggggtctggacggagtctctatttaaggagaaatcatcatgctatgataaaacacagaagcatgagtggcaagtggcggggtatttattttgcacaaactatttgcagtctctgtgtatttaaaaagtaaagaaagttgcatccagaagggttttgttagaatgaatacatttatattaggactgacaacttcagctcttttgtttaggttttcaattatttttggtaagagtatgtagccttatgatctggatatattttgcattcattttccaacgcctacatttaattcctggtaagagcagtgctcgtcaagtttctggtttttctctgctctcatttaacccgtcaaacacaatctttgtaaagctagattggtggtgttttatacaacttatttactcagcttacctttttgagaaacgattgttagaaattgacgatgtgtttgttccagtgatactgaaagtagtgggggcaagaattgagtttcacagtggaattggctttggatctggcctatagattagtgacataaaatattttctctattttcccctgttctttttgtgttatgcacttaattttatgactgccgggggggtcagctggagtgctgcttaacaagtatctctcctactctcagtggtcagaggctgtgttggacccatagtagaattttccaggtcacagacccaagcttccatgggttgttactgtgctgtaccacttggtgggtctgattctgaacctgatgtgtgtgtt

SEQ ID NO: 6143 - DNA, 3025 bp, Homo Sapiens
  NM_139285
ccacctcctgccctgctggggtccagccatgtcccagcctgcgggaggcaggaggaagcccaggaccctagggccgcctgtgtgcagtatccggcctttcaagtcgagtgagcagtacctggaggccatgaaggaagacctggctgagtggcttcgcgacctctatgggctggacatcgacgcagccaacttcctgcaggtgctggaaacgggcctggtgctgtgccaacacgccaacgttgtcactgacgctgccctggccttcctggctgaggcacctgcccaagcccagaagattcccatgccccgggtcggggtctcctgcaatggggccgcccagccaggtaccttccaggccagggacaatgtctctaacttcatccagtggtgtcgaaaggagatgggcatccaagaggtgctgatgttcgagacggaggacttggtgctgcgcaagaacgtgaagaacgtggtgctgtgtttgctggagctgggccgccgggcgtggcgctttggtgttgcggcgcccacactcgtgcagctggaggaggagatcgaggaggaggtgcggcgggagctggccctgcccccgcccgacccctcgccgccagcgccccccaggcgccagccctgccacttccgcaacctggaccagatggtgcagagccttgtgagccactgcacgtgcccagtgcagttctccatggtcaaagtgtctgaggggaagtaccgtgtgggtgactccaacaccctcatcttcatccggatcctccggaaccatgtgatggtacgtgtagggggcggctgggacacactgggccattacctggacaaacatgacccctgccgctgcacatccctctcacacaagccaggcagcttcctgaagcccccggccccaccagtgcagcatgaagtaagggtacaggatggaccctcacagacccagcctacaatgaccatcagccgctcacagagcccaccaccccctgtggactggaagacatatacctcttcagaccgaaggctgaggccccccaccccatcctcccccagaccccgcagggaacggggagcagggacgggggcctccagagagatggcaccattcctgaggtgccaggagaggtctctcatcccatcttggaggcagccgacagctggggacagcccacccagcccccagtcctcatctacccaaaaaggccgagacccacagtgtacctcgtcaggaaagagggaggagagatacccccctgaactccccaggggaaggattcccacatcttgggttcatgaagaaacagacagctggggaaccgacgccgggaaccccaccccacaaagactccgagccattgaggccaccaccaaagggatatcagcaagaggaccatctcccctgcctcgttcctttggcccagccgagtgcctgggcctcaggctgccactccgggatgaggccaagggtgcgttcttccagttcagggagccagagtctgtccgttctccaacccctgtccaaggcctaaccaagatccccatccggctgccccctgctcgccccccaacaccaggaaggagctttcctggtgctacaagtggaagtcccaggacagaacttgggagagaccccatcccactaagggccgtcactgtggacctggctgggtccacgcatggggactgctctgtggaagtgaggcaggaggaccagcagctggacatccaggtcatggcagaggccagagagtcctgggacctgggcctacaggagcaggaggggcggtacacacctctgcccttgggcgggaacaaggagcaagccatctactgtagccttgaagaggagattttgggcaacatgaagctgctagaagtcaggagtgcctgtccgcagggcacaaggtctggggtcatccctcgcagtggggtctacatccccaggctggctgggcagtggcctgagcctgggggtccttatgacaaagccatccaagaactggctcaggggtccccatccctccttaaagtggacctggaagcctggaaggcagccccgactggctcccctaagccagctgttaccccaggaccgggaagcctcaaagggaagttgggagccagacagagtgggcccaggacaaaggcaagcctgagtgccaagggcacccacatgaggaaggtcccacctcagggagggcaggactgctcggcttctactgtgtctgccagcccggaggcccccacaccttcgcccttggaccccaactctgacaaagccaaggcatgtctgagcaagggcaggagaactctccggaagcccaagagggtcccgtccatctacaagctgaagctgagacccaggattcggccccggagagaccacaggcctgagaagcagccttcacgaatccccaggccactggcctatgtcttcctgggtccagccaggcagccccccaaggacaggctgttgagagctgtgctgggcagcaagggaggggaggcatcccgggtggatggagcttcagtaggtgaggaggaggaggaaggaaaggaggagaaagagccagccgctccattggagagcagcccccaacctccagagggcctgcaacctcactggcttaatcaagctccacttccacctgaggaggagtcctgggtctgaggcacatgagcgtgttgggtaggagggaagcaaaaaggatggccatgtatacactggattcacagctgcgggaacagaagggatgttccctcacctccacacagggccttgggcaggagtgggtcagaagacaaatatagactccatctgctcatctgagcaaaggggcaacccactgctctcactccaactccagaggtaggccaggggcagtaggaccatcctgtatctcattactctcccctagaacggctcaccacactcctggcctctggcccctggccatgcccacctgtttccataactcccataagttattaaatgcatgtgattctgaaaaaaaaaaaaaaaaaa

SEQ ID NO: 6144 - DNA, 4036 bp, Homo Sapiens
  NM_139312
ggcggattgtctgtcgttgcagtagctgtaggaaggggaggccattttccgtttctgggaggagtgaggggcaacgggtcggagaaaaaggaaaaaagaagggctcagcgcctccccgccgggccgtggacagaggggcacagtttcggcaggcgggtgaggtcgctgagggcccgccggagatgttttccttgtcgagcacggtgcaaccccaggttacagttcctctgagtcatctcatcaatgccttccatacaccaaaaaacacttctgtttctctcagtggagtgtcagtttctcaaaaccagcatcgagatgtagttcctgagcatgaggctcccagcagtgagtgtatgttcagtgacttcctgacgaagcttaacattgtttcaattggcaaaggaaaaatattcgaagggtacagatccatgttcatggagccagcaaaaaggatgaagaagagcttggacacaaccgataactggcacatccgtccagaacccttctccctctcaatccctccttcacttaacttaagggaccttggattatctgaactaaaaattggacagattgatcagctggtagaaaatctacttcctggattttgtaaaggcaaaaacatttcttcccattggcatacatcccatgtctctgcacaatccttctttgaaaataaatatggtaacttagatatatttagtacattacgttcctcttgcttgtatcgacatcattcaagagctcttcaaagcatttgttcagatcttcagtactggccagttttcatacagtctcggggttttaaaactttgaaatcaaggacacgacgtctccagtctacctccgagagattagctgaaacacagaatatagcgccatcattcgtgaaggggtttcttttgcgggacagaggatcagatgttgagagtttggacaaactcatgaaaaccaaaaatatacctgaagctcaccaagatgcatttaaaactggttttgcggaaggttttctgaaagctcaagcactcacacaaaaaaccaatgattccctaaggcgaacccgtctgattctcttcgttctgctgctattcggcatttatggacttctaaaaaacccatttttatctgtccgcttccggacaacaacagggcttgattctgcagtagatcctgtccagatgaaaaatgtcacctttgaacatgttaaaggggtggaggaagctaaacaagaattacaggaagttgttgaattcttgaaaaatccacaaaaatttactattcttggaggtaaacttccaaaaggaattcttttagttggacccccagggactggaaagacacttcttgcccgagctgtggcgggagaagctgatgttcctttttattatgcttctggatccgaatttgatgagatgtttgtgggtgtgggagccagccgtatcagaaatctttttagggaagcaaaggcgaatgctccttgtgttatatttattgatgaattagattctgttggtgggaagagaattgaatctccaatgcatccatattcaaggcagaccataaatcaacttcttgctgaaatggatggttttaaacccaatgaaggagttatcataataggagccacaaacttcccagaggcattagataatgccttaatacgtcctggtcgttttgacatgcaagttacagttccaaggccagatgtaaaaggtcgaacagaaattttgaaatggtatctcaataaaataaagtttgatcaatccgttgatccagaaattatagctcgaggtactgttggcttttccggagcagagttggagaatcttgtgaaccaggctgcattaaaagcagctgttgatggaaaagaaatggttaccatgaaggagctggagttttccaaagacaaaattctaatggggcctgaaagaagaagtgtggaaattgataacaaaaacaaaaccatcacagcatatcatgaatctggtcatgccattattgcatattacacaaaagatgcaatgcctatcaacaaagctacaatcatgccacgggggccaacacttggacatgtgtccctgttacctgagaatgacagatggaatgaaactagagcccagctgcttgcacaaatggatgttagtatgggaggaagagtggcagaggagcttatatttggaaccgaccatattacaacaggtgcttccagtgattttgataatgccactaaaatagcaaagcggatggttaccaaatttggaatgagtgaaaagcttggagttatgacctacagtgatacagggaaactaagtccagaaacccaatctgccatcgaacaagaaataagaatccttctaagggactcatatgaacgagcaaaacatatcttgaaaactcatgcaaaggagcataagaatctcgcagaagctttattgacctatgagactttggatgccaaagagattcaaattgttcttgaggggaaaaagttggaagtgagatgataactctcttgatatggatgcttgctggttttattgcaagaatataagtagcattgcagtagtctacttttacaacgctttcccctcattcttgatgtggtgtaattgaagggtgtgaaatgctttgtcaatcatttgtcacatttatccagtttgggttattctcattatgacacctattgcaaattagcatcccatggcaaatatattttgaaaaaataaagaactatcaggattgaaaacagctcttttgaggaatgtcaattagttattaagttgaaagtaattaatgattttatgtttggttactctactagatttgataaaaattgtgcctttagccttctatatacatcagtggaaacttaagatgcagtaattatgttccagattgaccatgaataaaatattttttaatctaaatgtagagaagttgggattaaaagcagtctcggaaacacagagccaggaatatagccttttggcatggtgccatggctcacatctgtaatcccagcacttttggaggctgaggcgggtggattgcttgaggccaggagttcgagaccagcctggccaacgtggtgaaacgctgtctctactaaaatacaaaaaaatagggctgggcgcggttgctcacgcctgtaatcccagcacttttcagaggccaaggcgggcaaatcacctgaggtcaagagtttgagaccagcctggccaacatggtgaaaccccatctctactaaacatgcaaaaattacctgggcatggtggcaggtgcttataatcccagctactctgggggccaaggcaggagaattgcttgagcctgggagatggaggttgcagtgagctgagatcatgccactgcactccagcctgggcaacagagcaagactctgcctcaaaaaaaaattaaaataaatttaaatacaaaaaaaaatagccaggtgtggggtgcatgcctggaatcccagctacttgagaggctgaggcacgagaattgcttgaacccaggaggtggaggttgcagtgagccaagatcacaggagccactgcactccagcctgggtgacagagtgagactctgtctcaaaaaaaaattaaataaattattataacctttcagaaatgctgtgtgcattttcatgttcttttttttagcattactgtcactctccctaatgaaatgtacttcagagaagcagtattttgttaaataaatacataacctcattctgaataatgtccctcattttgactataactgtgcttggtttcaaaagcaaaattaaacaaaaatctcagtcccctccgaagtgaactttgtgttaccctgcgtcagaaatgccaagttgtgtttacttttcattcagattttgtgaatatgaacatgctgttataggatctacagatgaatatttaactcaatagaaaaattattttagaacacattgtattggtattacaaccagattatattcttgacgttgacttcattaaaattatctacaatttcctaataaaaaaaaaaa

SEQ ID NO: 6145 - DNA, 2584 bp, Homo Sapiens
  NM_139313
ggcggattgtctgtcgttgcagtagctgtaggaaggggaggccattttccgtttctgggaggagtgaggggcaacgggtcggagaaaaaggaaaaaagaagggctcagcgcctccccgccgggccgtggacagaggggcacagtttcggcaggcgggtgaggtcgctgagggcccgccggagatgttttccttgtcgagcacggtgcaaccccaggttacagttcctctgagtcatctcatcaatgccttccatacaccaaaaaacacttctgtttctctcagtggagtgtcagtttctcaaaaccagcatcgagatgtagttcctgagcatgaggctcccagcagtgagtgtatgttcagtgacttcctgacgaagcttaacattgtttcaattggcaaaggaaaaatattcgaagggtacagatccatgttcatggagccagcaaaaaggatgaagaagagcttggacacaaccgataactggcacatccgtccagaacccttctccctctcaatccctccttcacttaacttaagggaccttggattatctgaactaaaaattggacagattgatcagctggtagaaaatctacttcctggattttgtaaaggcaaaaacatttcttcccattggcatacatcccatgtctctgcacaatccttctttgaaaataaatatggtaacttagatatatttagtacattacgttcctcttgcttgtatcgacatcattcaagagctcttcaaagcatttgttcagatcttcagtactggccagttttcatacagtctcggggttttaaaactttgaaatcaaggacacgacgtctccagtctacctccgagagattagctgaaacacagaatatagcgccatcattcgtgaaggggtttcttttgcgggacagaggatcagatgttgagagtttggacaaactcatgaaaaccaaaaatatacctgaagctcaccaagatgcatttaaaactggttttgcggaaggttttctgaaagctcaagcactcacacaaaaaaccaatgattccctaaggcgaacccgtctgattctcttcgttctgctgctattcggcatttatggacttctaaaaaacccatttttatctgtccgcttccggacaacaacagggcttgattctgcagtagatcctgtccagatgaaaaatgtcacctttgaacatgttaaaggggtggaggaagctaaacaagaattacaggaagttgttgaattcttgaaaaatccacaaaaatttactattcttggaggtaaacttccaaaaggaattcttttagttggacccccagggactggaaagacacttcttgcccgagctgtggcgggagaagctgatgttcctttttattatgcttctggatccgaatttgatgagatgtttgtgggtgtgggagccagccgtatcagaaatctttttagggaagcaaaggcgaatgctccttgtgttatatttattgatgaattagattctgttggtgggaagagaattgaatctccaatgcatccatattcaaggcagaccataaatcaacttcttgctgaaatggatggttttaaacccaatgaaggagttatcataataggagccacaaacttcccagaggcattagataatgccttaatacgtcctggtcgttttgacatgcaagttacagttccaaggccagatgtaaaaggtcgaacagaaattttgaaatggtatctcaataaaataaagtttgatcaatccgttgatccagaaattatagctcgaggtactgttggcttttccggagcagagttggagaatcttgtgaaccaggctgcattaaaagcagctgttgatggaaaagaaatggttaccatgaaggagctggagttttccaaagacaaaattctaatggggcctgaaagaagaagtgtggaaattgataacaaaaacaaaaccatcacagcatatcatgaatctggtcatgccattattgcatattacacaaaagatgcaatgcctatcaacaaagctacaatcatgccacgggggccaacacttggacatgtgtccctgttacctgagaatgacagatggaatgaaactagagcccagctgcttgcacaaatggatgttagtatgggaggaagagtggcagaggagcttatatttggaaccgaccatattacaacaggtgcttccagtgattttgataatgccactaaaatagcaaagcggatggttaccaaatttggaatgagtgaaaagcttggagttatgacctacagtgatacagggaaactaagtccagaaacccaatctgccatcgaacaagaaataagaatccttctaagggactcatatgaacgagcaaaacatatcttgaaaactcattcttgatgtggtgtaattgaagggtgtgaaatgctttgtcaatcatttgtcacatttatccagtttgggttattctcattatgacacctattgcaaattagcatcccatggcaaatatattttgaaaaaataaagaactatcaggattgaaaacaaaaaaaaaaaaaaaaaaaaaaaaaaaaaaa

SEQ ID NO: 6146 - DNA, 2489 bp, Homo Sapiens
  NM_139315
gacttgctcttaggctctgccaggacctgctcccacgagggggcggggccaagatggcgccgagcgccgggtgagcagcgtctcggctgccgctagagttttcctgctccccgcgctcgggtggcgggggcgggtctgagtggtaccccggaggagaccctttgaaggtcccttgtggggactggaaagaggacgggtctccgtctctccaccgggggcttcatccttccagggaggagaagagggactccagaatggctgaggagaagaagctgaagcttagcaacactgtgctgccctcggagtccatgaaggtggtggctgaatccatgggcatcgcccagattcaggaggagacctgccagctgctaacggatgaggtcagctaccgcatcaaagagatcgcacaggatgccttgaagttcatgcacatggggaagcggcagaagctcaccaccagtgacattgactacgccttgaagctaaagaatgtcgagccactctatggcttccacgcccaggagttcattcctttccgcttcgcctctggtgggggccgggagctttacttctatgaggagaaggaggttgatctgagcgacatcatcaatacccctctgccccgggtgcccctggacgtctgcctcaaagctcattggctgagcatcgagggctgccagccagctatccccgagaacccgcccccagctcccaaagagcaacagaaggctgaagccacagaacccctgaagtcagccaagccaggccaggaggaagacggacccctgaagggcaaaggtcaaggggccaccacagccgacggcaaagggaaagagaagaaggcgccgcccttgctggagggggcccccttgcgactgaagccccggagcatccacgagttgtctgtggagcagcagctctactacaaggagatcaccgaggcctgcgtgggctcctgcgaggccaagagggcggaagccctgcaaagcattgccacggaccctggactgtatcagatgctgccacggttcagtacctttatctcggagggggtccgtgtgaacgtggttcagaacaacctggccctactcatctacctgatgcgtatggtgaaagcgctgatggacaaccccacgctctatctagaaaaatacgtccatgagctgattccagctgtgatgacctgcatcgtgagcagacagttgtgcctgcgaccagatgtggacaatcactgggcactccgagactttgctgcccgcctggtggcccagatctgcaagcattttagcacaaccactaacaacatccagtcccggatcaccaagaccttcaccaagagctgggtggacgagaagacgccctggacgactcgttatggctccatcgcaggcttggctgagctgggacacgatgttatcaagactctgattctgccccggctgcagcaggaaggggagcggatccgcagtgtgctggacggccctgtgctgagcaacattgaccggattggagcagaccatgtgcagagcctcctgctgaaacactgtgctcctgttctggcaaagctgcgcccaccgcctgacaatcaggacgcctatcgggcagaattcgggtcccttgggcccctcctctgctcccaggtggtcaaggctcgggcccaggctgctctgcaggctcagcaggtcaacaggaccactctgaccatcacgcagccccggcccacgctgaccctctcgcaggccccacagcctggccctcgcacccctggcttgctgaaggttcctggctccatcgcacttcctgtccagacactggtgtctgcacgagcggctgccccaccacagccttcccctcctccaaccaagtttattgtaatgtcatcgtcctccagcgccccatccacccagcaggtcctgtccctcagcacctcggcccccggctcaggttccaccaccacttcgcccgtcaccaccaccgtccccagcgtgcagcccatcgtcaagttggtctccaccgccaccaccgcaccccccagcactgctccctctggtcctgggagtgtccagaagtacatcgtggtctcacttcccccaacaggggagggcaaaggaggccccacctcccatccttctccagttcctcccccggcatcgtccccgtccccactcagcggcagtgccctttgtggggggaagcaggaggctggggacagtccccctccagctccagggactccaaaagccaatggctcccagcccaactccggctcccctcagcctgctccgtgatgctccacctgccagcccccggattcccacacatgcagacatgtacacacgtgcacgtacacacatgcatgctcgctaagcggaaggaagttgtagattgcttccttcatgtcactttctttttagatattgtacagccagtttctcagaataaaagtttggtttgtaagttctgaaaaaaaaaaaaaaaaaaaaaaaaaa

SEQ ID NO: 6147 - DNA, 2858 bp, Homo Sapiens
  NM_139320
agccctttcccaggcggtagcgggggcagtggtgctgttgcccttttaaactgcggcttgacgggagccgcgcctcctgtcggtggagtcggttataaagggagcagccccgcaggccgccacatagctcccgccaagtcctcggtgccccttgccattttccagccgcgctcccacgagggtcacggcggcggggagaggtggagccgcgagagctcggccgggggccccgcctggtggtcgcggccatgacagcggctcgggacaggctccttttccgcgcccctcccgccggaggtgaggggaagatgtccatgtccgggttcaaggccaaaccgaagttactggcctctatcttccaggagaaccaggagccacagccgcggctcacgccccaccgcaacattaagattacaagtggacacctgagtcagcaggacctggaatcccagatgagagagcttatctacacgactcagatcttgttgtcacccccattattgacaatccaaaggtgcagaaagcactctgacaaataatgaaacaaccaccatcggttaaatttgatgcaaaaatattgcatctaccagcattttcagttccaattgctaatccagcatttgtggatagctgcaaactgcgatattgctgatgagcgctttgacgccacattccacactaacgtgttggtgaattcttctgggcattgccagtacctgcctccaggcatattcaagagttcctgctacatcgatgtacgctggtttccctttgatgtgcagcactgcaaactgaagtttgggtcctggtcttacggaggctggtccttggatctgcagatgcaggaggcagatatcagtggctatatccccaatggagaatgggacctagtgggaatccccggcaagaggagtgaaaggttctatgagtgctgcaaagagccctaccctgatgtcaccttcacagtgaccatgcgccgcaggacgctctactatggcctcaacctgctgatcccctgtgtgctcatctccgccctcgccctgctggtgttcctgcttcctgcagattccggggagaagatttccctggggataacagtcttactctctcttaccgtcttcatgctgctcgtggctgagatcatgcccgcaacatccgattcggtaccattgatagcccagtacttcgccagcaccatgatcatcgtgggcctctcggtggtggtgacggtgatcgtgctgcagtaccaccaccacgaccccgacgggggcaagatgcccaagtggaccagagtcatccttctgaactggtgcgcgtggttcctgcgaatgaagaggcccggggaggacaaggtgcgcccggcctgccagcacaagcagcggcgctgcagcctggccagtgtggagatgagtgccgtggcgccgccgcccgccagcaacgggaacctgctgtacatcggcttccgcggcctggacggcgtgcactgtgtcccgacccccgactctggggtagtgtgtggccgcatggcctgctcccccacgcacgatgagcacctcctgcacggcgggcaaccccccgagggggacccggacttggccaagatcctggaggaggtccgctacattgccaaccgcttccgctgccaggacgaaagcgaggcggtctgcagcgagtggaagttcgccgcctgtgtggtggaccgcctgtgcctcatggccttctcggtcttcaccatcatctgcaccatcggcatcctgatgtcggctcccaacttcgtggaggccgtgtccaaagactttgcgtaaccacgcctggttctgtacatgtggaaaactcacagatgggcaaggcctttggcttggcgagatttgggggtgctaatccaggacagcattacacgccacaactccagtgttcccttctggctgtcagtcgtgttgcttacggtttctttgttactttaggtagtagaatctcagcactttgtttcatattctcagatgggctgatagatatccttggcacatccgtaccatcggtcagcagggccactgagtagtcattttgcccattagcccactgcctggaaagcccttcggagagctccccatggctcctcaccaccgagacagttggttttgcatgtctgcatgaaggtctacctgaaaattcaacatttgctttttgcttgtgtacaaacccagattgaagctaaaataaaccagactcactaaatcctttccaataattgactggtggaaggaaaacaaaaaacaaaaactaaaaacctcttagcttttctgcaattcaactttttatttttatttttatttctatcaaagacggtagagagaaacagcttgatgctgtttctacatcaaaaaaaaaaaaaaaaaagacagactgttggtcttactaaggatgtttttaccagcctgcctgacttctgcaaacctaccctgtcaaggagatcaaagggacgcaggtttctgtttattctgaacaagggccaggccccgcggagtgtctttggtggatcccagataactcctaggtgctgctctcagacactgaggagttgagcaaatctgttctattctgcagaacccataggacaaataagagttctactagaattaacagcccaaaagaatagctacagctaagtgaagccacttacgtgggctttaaaaaaataatgtgttagctgattcacatgcactggagttaattagtcttagaaatgtgtgcatccatacaaatgcacaacataaagtgaacatattcctaggccctttctgcctgtgtcagggccaggaagtagaggctgggaactcttctggtccccagtatggcag

SEQ ID NO: 6148 - DNA, 8658 bp, Homo Sapiens
  NM_139321
acagccccgccccgcacggccaggcgaagcggagccggccgtgcggtgtgtgtgtatgtgttcgcggggcgccgtctcagccccgggaagatggtggctgcagcggcggcaactgaggcaaggctgaggaggaggacggcggcgacggcagcgctcgcgggcaggagcggcgggccgcactgggactgggacgtgaccagggctgggaggccggggctgggggccgggctgcgcctcccgcggctgctgtctccaccgctgcggccacggctgctgctgctgctgttgttgctctcgccgccgctgctgctgctgctgctgccctgtgaggccgaggccgcggcggcggcggcggcggtgtcgggctcagccgcagccgaggccaaggaatgtgaccggccctgtgtcaacggcggtcgctgcaaccctggcaccggccagtgcgtctgccccgccggctgggtgggcgagcaatgccagcactgcgggggccgcttcagactaactggatcttctgggtttgtgacagatggacctggaaattataaatacaaaacgaagtgcacgtggctcattgaaggacagccaaatagaataatgagacttcgtttcaatcattttgctacagagtgtagttgggaccatttatatgtttatgatggggactcaatttatgcaccgctagttgctgcatttagtggcctcattgttcctgagagagatggcaatgagactgtccctgaggttgttgccacatcaggttatgccttgctgcatttttttagtgatgctgcttataatttgactggatttaatattacttacagttttgatatgtgtccaaataactgctcaggccgaggagagtgtaagatcagtaatagcagcgatactgttgaatgtgaatgttctgaaaactggaaaggtgaagcatgtgacattcctcactgtacagacaactgtggttttcctcatcgaggcatctgcaattcaagtgatgtcagaggatgctcctgcttctcagactggcagggtcctggatgttcagttcctgtaccagctaaccagtcattttggactcgagaggaatattctaacttaaagctccccagagcatctcataaagctgtggtcaatggaaacattatgtgggttgttggaggatatatgttcaaccactcagattataacatggttctagcgtatgaccttgcttctagggagtggcttccactaaaccgttctgtgaacaatgtggttgttagatatggtcattctttggcattatacaaggataaaatttacatgtatggaggaaaaattgattcaactgggaatgtgaccaatgagttgagagtttttcacattcataatgagtcatgggtgttgttgacccctaaggcaaaggagcagtatgcagtggttgggcactctgcacacattgttacactgaagaatggccgagtggtcatgctggtcatctttggtcactgccctctctatggatatataagcaatgtgcaggaatatgatttggataagaacacatggagtatattacacacccagggtgcccttgtgcaagggggttacggccatagcagtgtttacgaccataggaccagggccctatacgttcatggtggctacaaggctttcagtgccaataagtaccggcttgcagatgatctctaccgatatgatgtggatacccagatgtggaccattcttaaggacagccgatttttccgttacttgcacacagctgtgatagtgagtggaaccatgctggtgtttggaggaaacacacacaatgacacatctatgagccatggcgccaaatgcttctcttcagatttcatggcctatgacattgcctgtgaccgctggtcagtgcttcccagacctgatctccaccatgatgtcaacagatttggccattcagcagtcttacacaacagcaccatgtatgtgttcggtggtttcaatagtctcctcctcagcgacatcctggtattcacctcggaacagtgtgatgcgcatcggagtgaagccgcttgtttagcagcaggacctggtattcggtgtgtgtggaacacagggtcgtctcagtgtatctcgtgggcgctggcaactgatgaacaagaagaaaagttaaaatcagaatgtttttccaaaagaactcttgaccatgacagatgtgaccagcacacagattgttacagctgcacagccaacaccaatgactgccactggtgcaatgaccattgtgtccccaggaaccacagctgctcagaaggccagatctccatttttaggtatgagaattgccccaaggataaccccatgtactactgtaacaagaagaccagctgcaggagctgtgccctggaccagaactgccagtgggagccccggaatcaggagtgcattgccctgcccgaaaatatctgtggcattggctggcatttggttggaaactcatgtttgaaaattactactgccaaggagaattatgacaatgctaaattgttctgtaggaaccacaatgcccttttggcttctcttacaacccagaagaaggtagaatttgtccttaagcagctgcgaataatgcagtcatctcagagcatgtccaagctcaccttaaccccatgggtcggccttcggaagatcaatgtgtcctactggtgctgggaagatatgtccccatttacaaatagtttactacagtggatgccgtctgagcccagtgatgctggattctgtggaattttatcagaacccagtactcggggactgaaggctgcaacctgcatcaacccactcaatggtagtgtctgtgaaaggcctgcaaaccacagtgctaagcagtgccggacaccatgtgccttgaggacagcatgtggagattgcaccagcggcagctctgagtgcatgtggtgcagcaacatgaagcagtgtgtggactccaatgcctacgtggcctccttcccttttggccagtgtatggaatggtatacgatgagcacctgcccccctgaaaattgttcaggctactgtacctgtagtcattgcttggagcaaccaggctgtggctggtgtactgatcccagcaatactggcaaagggaaatgcatagagggttcctataaaggaccagtgaagatgccttcgcaagcccctacaggaaatttctatccacagcccctgctcaattccagcatgtgtctagaggacagcagatacaactggtctttcattcactgtccagcttgccaatgcaacggccacagtaaatgcatcaatcagagcatctgtgagaagtgtgagaacctgaccacaggcaagcactgcgagacctgcatatctggcttctacggtgatcccaccaatggagggaaatgtcagccatgcaagtgcaatgggcacgcgtctctgtgcaacaccaacacgggcaagtgcttctgcaccaccaagggcgtcaagggggacgagtgccagctatgtgaggtagaaaatcgataccaaggaaaccctctcagaggaacatgttattatactcttcttattgactatcagttcacctttagtctatcccaggaagatgatcgctattacacagctatcaattttgtggctactcctgacgaacaaaacagggatttggacatgttcatcaatgcctccaagaatttcaacctcaacatcacctgggctgccagtttctcagctggaacccaggctggagaagagatgcctgttgtttcaaaaaccaacattaaggagtacaaagatagtttctctaatgagaagtttgattttcgcaaccacccaaatatcactttctttgtttatgtcagtaatttcacctggcccatcaaaattcagattgccttctctcagcacagcaattttatggacctggtacagttcttcgtgactttcttcagttgtttcctctctttgctcctggtggctgctgtggtttggaagatcaaacaaagttgttgggcctccagacgtagagagcaacttcttcgagagatgcaacagatggccagccgtccctttgcctctgtaaatgtcgccttggaaacagatgaggagcctcctgatcttattggggggagtataaagactgttcccaaacccattgcactggagccgtgttttggcaacaaagccgctgtcctctctgtgtttgtgaggctccctcgaggcctgggtggcatccctcctcctgggcagtcaggtcttgctgtggccagcgccctggtggacatttctcagcagatgccgatagtgtacaaggagaagtcaggagccgtgagaaaccggaagcagcagccccctgcacagcctgggacctgcatctgatgctggggccagggactctcccacgcacgagctagtgagtggcacaccagagccatctgcagggaagggcgtggcggggaaatggctgtgcggtgcgggacggaagactggaaaccctcaaagcatctgactcacctgcatgatcacaagctttctttgacggtttctcccatccgtgttccagcatctaaccttttacttttgcataggaaatacttgatttaattacaggtccagggatgagctgatggttgctggaggaggccagtgtagagccagtgagagaactaggaatgacactcaggttcactgtggaaaactgttcttgggactgtctcaactgtgcaaaaaacaaaagatggagtgtttacaagtagacattcgtcatcagttgttcttgaacatggtcttttaaaaactagtcagatgaattgttttcatctgaagcctgctatcttttttaaaagatgtgctatttattcttgcacgatttaggcaattatctctcttccagggagtacctttttttctagttgagaattaataatggtccatctcttttgatcatatcaagctaggatagaaggggggctattttaaatgtcaaggtcagcagtgttactttgaatgtaaactggtataataggtagttttctatagtaacttgattaatttagtcttaatccatttgaaactctctcttcctttctctctgcctgtccctctccttctccatctcaccctccctctctcacacatacacacacaaacacatacacacaacactaagtgcctagactttaaatagatctagcaattggaaagttagtaagcctaagtttttacataattgcattcctacattcttgtaaaatttaaatagctaccattggcaatctgctttttttctaaaatctgatttgcagccaggaaagaattttctcacccaaggaacatttgatctagcagcagggatgagaggaaagcagaaatgaatgaactgtgaaagctcctgtttttattatcaaaaaggacactgtcaagaaggcgccccctgcccccacccccgtgtcaccctaggcctgataagcgatcagaggaaaggactcattcatgtcacgcttccttgagcagaaaagagcactgagagcacttgggacccctggatcagagagcatctgtgtgtcctgcagcctcctctgaacttgtggttcattctcaggctggggtggactcagatgccaggaaagggacagcctcccattgtcaggcagaagctgcccaaagcctggagaaggacttgtttgccctctttcccccaggaggggctcgacccacccaccctccctctcagaccaaggtggtggctgtgaggagggcagcaaatgctgacaaggatgaaaagcacatggaaaaaaatggatgaggagggaaaactctgccaaatggaaaatgaccaaatttaagagggtgggacagtcccctgctcctctcccagagggcactgcttggaaattgtgttttccccatttatggtgctctgtattctggcattatgcagcagcctcccagaagctctcttctgcttcaaaacctgggatctctggcattaccctattgggatggaccgctggacagcaatgctcgagtttgtgaatttggagagatactcaaaagagctaaaactgcagcattttacctttaaatgcagtgcctagagagagagtattgtctcttccccaacactaaccccactcccatgaagaattgcctggaaagatgttttcaaggaatttgaaccataaaacactatctgatgcacagaacacctctactttgagactcacctctcataaagcttctttttcacattactgttaaagaccagacgttctagaaaagacccctcctctcatgagctcccccatccctgctacagaacacagcacccatggcgcctgcagtggactggccccttaattcccacaggcccccccagcaaggccaaagggaggcccctgggtattgtcctcctacaaggaagatcctctttgtttgttcaaaggaccagttttcctaggccaaagaagtctcttccccatgttagtcctatgccttgaaatatcatgcaccatgacccacagccatctggttatgtcttatttttttcctaaaagataatgtttatttttaaaaaggaaggaaggagcaagtgaagtttcattctgctccagcggtggggaagccgctgaatccacctgcttctcctttgcaaccgacagcaaacagctttctccggcctcagggcagaaaaagggaatggcagggagtaagaggcgctgggctcggagcctgtttccaagaaggaattggttgtcatctggcagtgttgcgcgtcacaagagagcctgtatataaattaaaatagtcaagacaacactgaccttgcacttgtacataactatacagtagtgtccagaatgttcagacattcggagtgtacataaaacagaaaaaatcttcatgtatttttattaaatataacaatgtctgagtttcacctaagatgtttttgtgccatatgctggatatccaggttctcgccaggccccgatacatgaataacaaacccaagaaacgcatccccattgtgtgatgtgttcagatgcatctggcaccaattaggtatttcttaaaacaggactcatctgtcagagtgcacatgaaaaatcaggcagggaatcgaaacgacagtgctggaggagactcaggaagcagaggcgtccctgccgctgcccttggccctgcaagcacatcatgaccctttctggcagcctcttggtgctctgggtagtgagggatgaccagtcttgtcctgagaaatgtttctcttagtctttaagttcaaagactaacctgtagcaatcagactttccaaaagggggttctccattttttgtagttttgtctaaatttttaatgaccatttcctggaatcagtttattatactgaaaactgggggtgggagtagggagctagtttgttgataaatagttcccatttccccatggagaatttgacataccctggactcctgtgtgcctcctgccatccctgcacacagcctggggagaagcctgtgcctccccgtgtggagagaaggcaaccccagatcccctgagctaacccggaggaaaggcagtcctggacagaagactgtcagcagaaggaaagtactggactacccgtgggtaagtcctgccattcaagactggagacacctgggaaataaaaagagcagggcactgctggtgggaagaggcattttaccttccagtgcaaatcctgctcctttgatttaatggggtgtactggggccaggggctgattcacttccttgggagatggtggtgttttcatgaacatctttgatccttccatttcatttattcatccatccattcaacaagtatttgctaaacactaacttaagctaatgctagggtagtgactgagatgtaaaaatagattttagaattaaaacaaaatccaagtcctcacacccctgtcatcccaggagatctttccttgtggtggtttctgtgagaattggccatcctgaggacacagccaggacggcagaggcctcctggcctcagggcatgccctgcctaccttctgaaatgtttaccccattgaccaaacttggctccagccattgcggtggtttctagatagccaggcccaccaagagatattgccccttgatgagagtcaaacaccctgcctacaaggagatgttttgaaatggagaggaaaattggcacctcatcttttaaaggcagtaatggaattgattttcagtaactgaatttgtgcacaaaacattctaaacactagtgaagcctgtttcgttgaactaattctggctctggaaatgtttttgttttatagttatttacgatttcgtttgtttggattcaagcttagtttgttaatatgtataatttagcatctattacactcatgtaaatatggagtaagtattgtaaactatttcatcgcggggattgtgggtgttatacatacatttaggactgcaattttttggtattttttgtattgtaaaataacagctaatttaagcaggaacaagagaactaagggaggtctgtgcattttaaacacaaatgtgaagaacttgtatataaacaaaagtaaatactataatacaaacttccttctgaaataaaagtagatctggtaaaaatgtgaaa

SEQ ID NO: 6149 - DNA, 3967 bp, Homo Sapiens
  NM_139322
acagccccgccccgcacggccaggcgaagcggagccggccgtgcggtgtgtgtgtatgtgttcgcggggcgccgtctcagccccgggaagatggtggctgcagcggcggcaactgaggcaaggctgaggaggaggacggcggcgacggcagcgctcgcgggcaggagcggcgggccgcactgggactgggacgtgaccagggctgggaggccggggctgggggccgggctgcgcctcccgcggctgctgtctccaccgctgcggccacggctgctgctgctgctgttgttgctctcgccgccgctgctgctgctgctgctgccctgtgaggccgaggccgcggcggcggcggcggcggtgtcgggctcagccgcagccgaggccaaggaatgtgaccggccctgtgtcaacggcggtcgctgcaaccctggcaccggccagtgcgtctgccccgccggctgggtgggcgagcaatgccagcactgcgggggccgcttcagactaactggatcttctgggtttgtgacagatggacctggaaattataaatacaaaacgaagtgcacgtggctcattgaaggacagccaaatagaataatgagacttcgtttcaatcattttgctacagagtgtagttgggaccatttatatgtttatgatggggactcaatttatgcaccgctagttgctgcatttagtggcctcattgttcctgagagagatggcaatgagactgtccctgaggttgttgccacatcaggttatgccttgctgcatttttttagtgatgctgcttataatttgactggatttaatattacttacagttttgatatgtgtccaaataactgctcaggccgaggagagtgtaagatcagtaatagcagcgatactgttgaatgtgaatgttctgaaaactggaaaggtgaagcatgtgacattcctcactgtacagacaactgtggttttcctcatcgaggcatctgcaattcaagtgatgtcagaggatgctcctgcttctcagactggcagggtcctggatgttcagttcctgtaccagctaaccagtcattttggactcgagaggaatattctaacttaaagctccccagagcatctcataaagctgtggtcaatggaaacattatgtgggttgttggaggatatatgttcaaccactcagattataacatggttctagcgtatgaccttgcttctagggagtggcttccactaaaccgttctgtgaacaatgtggttgttagatatggtcattctttggcattatacaaggataaaatttacatgtatggaggaaaaattgattcaactgggaatgtgaccaatgagttgagagtttttcacattcataatgagtcatgggtgttgttgacccctaaggcaaaggagcagtatgcagtggttgggcactctgcacacattgttacactgaagaatggccgagtggtcatgctggtcatctttggtcactgccctctctatggatatataagcaatgtgcaggaatatgatttggataagaacacatggagtatattacacacccagggtgcccttgtgcaagggggttacggccatagcagtgtttacgaccataggaccagggccctatacgttcatggtggctacaaggctttcagtgccaataagtaccggcttgcagatgatctctaccgatatgatgtggatacccagatgtggaccattcttaaggacagccgatttttccgttacttgcacacagctgtgatagtgagtggaaccatgctggtgtttggaggaaacacacacaatgacacatctatgagccatggcgccaaatgcttctcttcagatttcatggcctatgacattgcctgtgaccgctggtcagtgcttcccagacctgatctccaccatgatgtcaacagatttggccattcagcagtcttacacaacagcaccatgtatgtgttcggtggtttcaatagtctcctcctcagcgacatcctggtattcacctcggaacagtgtgatgcgcatcggagtgaagccgcttgtttagcagcaggacctggtattcggtgtgtgtggaacacagggtcgtctcagtgtatctcgtgggcgctggcaactgatgaacaagaagaaaagttaaaatcagaatgtttttccaaaagaactcttgaccatgacagatgtgaccagcacacagattgttacagctgcacagccaacaccaatgactgccactggtgcaatgaccattgtgtccccaggaaccacagctgctcagaaggccagatctccatttttaggtatgagaattgccccaaggataaccccatgtactactgtaacaagaagaccagctgcaggagctgtgccctggaccagaactgccagtgggagccccggaatcaggagtgcattgccctgcccgaaaatatctgtggcattggctggcatttggttggaaactcatgtttgaaaattactactgccaaggagaattatgacaatgctaaattgttctgtaggaaccacaatgcccttttggcttctcttacaacccagaagaaggtagaatttgtccttaagcagctgcgaataatgcagtcatctcagagcatgtccaagctcaccttaaccccatgggtcggccttcggaagatcaatgtgtcctactggtgctgggaagatatgtccccatttacaaatagtttactacagtggatgccgtctgagcccagtgatgctggattctgtggaattttatcagaacccagtactcggggactgaaggctgcaacctgcatcaacccactcaatggtagtgtctgtgaaaggcctgcaaaccacagtgctaagcagtgccggacaccatgtgccttgaggacagcatgtggagattgcaccagcggcagctctgagtgcatgtggtgcagcaacatgaagcagtgtgtggactccaatgcctacgtggcctccttcccttttggccagtgtatggaatggtatacgatgagcacctgcccccctgaaaattgttcaggctactgtacctgtagtcattgcttggagcaaccaggctgtggctggtgtactgatcccagcaatactggcaaagggaaatgcatagagggttcctataaaggaccagtgaagatgccttcgcaagcccctacaggaaatttctatccacagcccctgctcaattccagcatgtgtctagaggacagcagatacaactggtctttcattcactgtccagcttgccaatgcaacggccacagtaaatgcatcaatcagagcatctgtgagaagtgtgagaacctgaccacaggcaagcactgcgagacctgcatatctggcttctacggtgatcccaccaatggagggaaatgtcagccatgcaagtgcaatgggcacgcgtctctgtgcaacaccaacacgggcaagtgcttctgcaccaccaagggcgtcaagggggacgagtgccagctatgtgaggtagaaaatcgataccaaggaaaccctctcagaggaacatgttattatactcttcttattgactatcagttcacctttagtctatcccaggaagatgatcgctattacacagctatcaattttgtggctactcctgacgaacaaaacagggatttggacatgttcatcaatgcctccaagaatttcaacctcaacatcacctgggctgccagtttctcagctggaacccaggctggagaagagatgcctgttgtttcaaaaaccaacattaaggagtacaaagatagtttctctaatgagaagtttgattttcgcaaccacccaaatatcactttctttgtttatgtcagtaatttcacctggcccatcaaaattcaggtgcaaactgaacaatgaggacgcatggacacaggaaggggaacatcacacaccagggcctgttgtggggtggggg

SEQ ID NO: 6150 - DNA, 3015 bp, Homo Sapiens
  NM_139323
gcggaagtggagctaccgccaccgccgccgccgattccggagccggggtagtcgccgccgccgccgccgctgcagccactgcaggcaccgctgccgccgcctgagtagtgggcttaggaaggaagaggtcatctcgctcggagcttcgctcggaagggtctttgttccctgcagccctcccacgggaatgacaatggataaaagtgagctggtacagaaagccaaactcgctgagcaggctgagcgatatgatgatatggctgcagccatgaaggcagtcacagaacaggggcatgaactctccaacgaagagagaaatctgctctctgttgcctacaagaatgtggtaggcgcccgccgctcttcctggcgtgtcatctccagcattgagcagaaaacagagaggaatgagaagaagcagcagatgggcaaagagtaccgtgagaagatagaggcagaactgcaggacatctgcaatgatgttctggagctgttggacaaatatcttattcccaatgctacacaaccagaaagtaaggtgttctacttgaaaatgaaaggagattattttaggtatctttctgaagtggcatctggagacaacaaacaaaccactgtgtcgaactcccagcaggcttaccaggaagcatttgaaattagtaagaaagaaatgcagcctacacacccaattcgtcttggtctggcactaaatttctcagtcttttactatgagattctaaactctcctgaaaaggcctgtagcctggcaaaaacggcatttgatgaagcaattgctgaattggatacgctgaatgaagagtcttataaagacagcactctgatcatgcagttacttagggacaatctcactctgtggacatcggaaaaccagggagacgaaggagacgctggggagggagagaactaatgtttctcgtgctttgtgatctgttcagtgtcactctgtaccctcaacatatatcccttgtgcgataaaaaaaaaaaaaaaaaaaaaaagagaatcgtacgtcgactttcgatttttcacagcctcagcctaggaaaaatggttcatgggataaacagctggtatttgtatctaaaactcagattggtcacataaatgccacggcattccgaagttttgattttgattaacattgacaggattactgtgtgtttaattttttaaaaactgaacactgtgattatggggttttgtaatttagcagaactcttactggtagaaaaaatagacctgaattatgtgtaactttttggaaggtttaatctgatatcaaaataatcattgaaatacaattccattgtaaagttgtacagaaagttatagagattatattgtgatgctggaacttggagtgagacacacatcatttggcatttgagttgaatggtaattcacagtaatgctgccgttgttcgggacttaaagacacttgacctgtttgggctgttgccacttaaaagttcatgaccacaaatgtccacagtgtcttcctctgaggaaactcgaatcctgaaatggaaattctttgtggcagataactggcttatgacaccttgaaaagttcaagtgctcatataacacaccacactgaaccccctttcctacagcaatatgttcactatgttaccaatttgcaacttgtgcttcaatagtggaatctactttcattgttaacactgagctaaagaaaaaaagccgtgtgttttatgaatgaccttatctgtttcctggataatacctttaagaataatgtcctgagtcaggcgtggtggtgcgtgcatctagtcccaactatttgggaggctgaggcaggaggatcgcttgagcccaggagtttaaagctgcagtgccctgtggttgcacctgtgaataactgcactccagcctgggcaacatagcgagacctcatctccaaaaaagaaaacaaaaaacaaaaaaaggaatgatgttctgtagagatggcctttcacttgaggagtactcagttttcaggttcttcctagctcggggcttttaaattttgaaatctaaacattctttcccaccatcctttttgactgttgaccttggttttctcttctaagtttctgtccctctgcttccttactttttttcctttttgaattctatctttatctgtcttttgttcactttttaatgctatatatgggcaggggtgagagacattactgagcaccttggtgagcaagcctggctttaaagattggagaagagcttctggcaccagaaccctgtcttcctccagttctcaacacggtgttgctcttcagtcataccggaatctgaatcaaaaaagtatttttaaatatccatgatttctccctgtattgaggctagccctgatcatgctttttgtgcctgtcaccaggtctcccaagtgcactcatccaggtcagtgctcagatgtgtttaaggagaccctatattcagggaagttgcgtgaacactgcagtggggagaattgagaatagtcaggcctatcagtctcacagaatcacccctctacctttgatattccacttagctgtagagtccatctgtttgtccatctgctgaaatgagaaaagaaaaatttatgcactgatttaaaacaaaccaaaaaaaaagaaaaaaacaaaaaaaaaaatccctcctttctagctgaacaaaaatgtgcagttaatacttggcgcttgaaaatgcagtagtgaatgtggaaccaagcctgtctgtatatctggtagctcttttcttgctttgttttttcttaccagtattctgcctaacgtttgcttctgtgatggttatattgcctagcaagcacacccgtggttgtgaaaatagtatagcaaaaaagaaaaatccccggttattgatgtactagatttgtgtatgtcttttaaacagttctagtttcaccttacacagaataatcaggaaaagtgtaaaaattcaaaagtgaaataaaaattttatcagttaaaaaa

SEQ ID NO: 6151 - DNA, 2637 bp, Homo Sapiens
  NM_139343
cgcgcccctccctcctcgcggacctggcggtgccggcgcccggagtggccctttaaaaggcagcttattgtccggagggggcgggcggggggcgccgaccgcggcctgaggcccggcccctcccctctccctccctctgtccccgcgtcgctcgctggctagctcgctggctcgctcgcccgtccggcgcacgctccgcctccgtcagttggctccgctgtcgggtgcgcggcgtggagcggcagccggtctggacgcgcggccggggctgggggctgggagcgcggcgcgcaagatctccccgcgcgagagcggcccctgccaccgggcgaggcctgcgccgcgatggcagagatgggcagtaaaggggtgacggcgggaaagatcgccagcaacgtgcagaagaagctcacccgcgcgcaggagaaggttctccagaagctggggaaggcagatgagaccaaggatgagcagtttgagcagtgcgtccagaatttcaacaagcagctgacggagggcacccggctgcagaaggatctccggacctacctggcctccgtcaaagccatgcacgaggcttccaagaagctgaatgagtgtctgcaggaggtgtatgagcccgattggcccggcagggatgaggcaaacaagatcgcagagaacaacgacctgctgtggatggattaccaccagaagctggtggaccaggcgctgctgaccatggacacgtacctgggccagttccccgacatcaagtcacgcattgccaagcgggggcgcaagctggtggactacgacagtgcccggcaccactacgagtcccttcaaactgccaaaaagaaggatgaagccaaaattgccaagcctgtctcgctgcttgagaaagccgccccccagtggtgccaaggcaaactgcaggctcatctcgtagctcaaactaacctgctccgaaatcaggccgaggaggagctcatcaaagcccagaaggtgtttgaggagatgaatgtggatctgcaggaggagctgccgtccctgtggaacagccgcgtaggtttctacgtcaacacgttccagagcatcgcgggcctggaggaaaacttccacaaggagatgagcaagctcaaccagaacctcaatgatgtgctggtcggcctggagaagcaacacgggagcaacaccttcacggtcaaggcccagcccagtgacaacgcgcctgcaaaagggaacaagagcccttcgcctccagatggctcccctgccgccacccccgagatcagagtcaaccacgagccagagccggccggcggggccacgcccggggccaccctccccaagtccccatctcagctccggaaaggcccaccagtccctccgcctcccaaacacaccccgtccaaggaagtcaagcaggagcagatcctcagcctgtttgaggacacgtttgtccctgagatcagcgtgaccaccccctcccagtttgaggccccggggcctttctcggagcaggccagtctgctggacctggactttgaccccctcccgcccgtgacgagccctgtgaaggcacccacgccctctggtcagtcaattccatgggacctctgggagcccacagagagtccagccggcagcctgccttccggggagcccagcgctgccgagggcacctttgctgtgtcctggcccagccagacggccgagccggggcctgcccaaccagcagaggcctcggaggtggcgggtgggacccaacctgcggctggagcccaggagccaggggagacggcggcaagtgaagcagcctccagctctcttcctgctgtcgtggtggagaccttcccagcaactgtgaatggcaccgtggagggcggcagtggggccgggcgcttggacctgcccccaggtttcatgttcaaggtacaggcccagcacgactacacggccactgacacagacgagctgcagctcaaggctggtgatgtggtgctggtgatccccttccagaaccctgaagagcaggatgaaggctggctcatgggcgtgaaggagagcgactggaaccagcacaaggagctggagaagtgccgtggcgtcttccccgagaacttcactgagagggtcccatgacggcggggcccaggcagcctccgggcgtgtgaagaacacctcctcccgaaaaatgtgtggttcttttttttgttttgttttcgtttttcatcttttgaagagcaaagggaaatcaagaggagacccccaggcagaggggcgttctcccaaagattaggtcgttttccaaagagccgcgtcccggcaagtccggcggaattcaccagtgttcctgaagctgctgtgtcctctagttgagtttctggcgcccctgcctgtgcccgcatgtgtgcctggccgcagggcggggctgggggctgccgagccaccatgcttgcctgaagcttcggccgcgccacccgggcaagggtcctcttttcctggcagctgctgtgggtggggcccagacaccagcctagcctggctctgccccgcagacggtctgtgtgctgtttgaaaataaatcttagtgttcaaaacaaaatgaaacaaaaaaaaaatgataaaaactctcaaaaaaaaaaaaaaaaa

SEQ ID NO: 6152 - DNA, 2333 bp, Homo Sapiens
  NM_139346
cgcgcccctccctcctcgcggacctggcggtgccggcgcccggagtggccctttaaaaggcagcttattgtccggagggggcgggcggggggcgccgaccgcggcctgaggcccggcccctcccctctccctccctctgtccccgcgtcgctcgctggctagctcgctggctcgctcgcccgtccggcgcacgctccgcctccgtcagttggctccgctgtcgggtgcgcggcgtggagcggcagccggtctggacgcgcggccggggctgggggctgggagcgcggcgcgcaagatctccccgcgcgagagcggcccctgccaccgggcgaggcctgcgccgcgatggcagagatgggcagtaaaggggtgacggcgggaaagatcgccagcaacgtgcagaagaagctcacccgcgcgcaggagaaggttctccagaagctggggaaggcagatgagaccaaggatgagcagtttgagcagtgcgtccagaatttcaacaagcagctgacggagggcacccggctgcagaaggatctccggacctacctggcctccgtcaaagccatgcacgaggcttccaagaagctgaatgagtgtctgcaggaggtgtatgagcccgattggcccggcagggatgaggcaaacaagatcgcagagaacaacgacctgctgtggatggattaccaccagaagctggtggaccaggcgctgctgaccatggacacgtacctgggccagttccccgacatcaagtcacgcattgccaagcgggggcgcaagctggtggactacgacagtgcccggcaccactacgagtcccttcaaactgccaaaaagaaggatgaagccaaaattgccaaggccgaggaggagctcatcaaagcccagaaggtgtttgaggagatgaatgtggatctgcaggaggagctgccgtccctgtggaacagccgcgtaggtttctacgtcaacacgttccagagcatcgcgggcctggaggaaaacttccacaaggagatgagcaagctcaaccagaacctcaatgatgtgctggtcggcctggagaagcaacacgggagcaacaccttcacggtcaaggcccagcccagaaagaaaagtaaactgttttcgcggctgcgcagaaagaagaacagtgacaacgcgcctgcaaaagggaacaagagcccttcgcctccagatggctcccctgccgccacccccgagatcagagtcaaccacgagccagagccggccggcggggccacgcccggggccaccctccccaagtccccatctcagctccggaaaggcccaccagtccctccgcctcccaaacacaccccgtccaaggaagtcaagcaggagcagatcctcagcctgtttgaggacacgtttgtccctgagatcagcgtgaccaccccctcccagccagcagaggcctcggaggtggcgggtgggacccaacctgcggctggagcccaggagccaggggagacggcggcaagtgaagcagcctccagctctcttcctgctgtcgtggtggagaccttcccagcaactgtgaatggcaccgtggagggcggcagtggggccgggcgcttggacctgcccccaggtttcatgttcaaggtacaggcccagcacgactacacggccactgacacagacgagctgcagctcaaggctggtgatgtggtgctggtgatccccttccagaaccctgaagagcaggatgaaggctggctcatgggcgtgaaggagagcgactggaaccagcacaaggagctggagaagtgccgtggcgtcttccccgagaacttcactgagagggtcccatgacggcggggcccaggcagcctccgggcgtgtgaagaacacctcctcccgaaaaatgtgtggttcttttttttgttttgttttcgtttttcatcttttgaagagcaaagggaaatcaagaggagacccccaggcagaggggcgttctcccaaagattaggtcgttttccaaagagccgcgtcccggcaagtccggcggaattcaccagtgttcctgaagctgctgtgtcctctagttgagtttctggcgcccctgcctgtgcccgcatgtgtgcctggccgcagggcggggctgggggctgccgagccaccatgcttgcctgaagcttcggccgcgccacccgggcaagggtcctcttttcctggcagctgctgtgggtggggcccagacaccagcctagcctggctctgccccgcagacggtctgtgtgctgtttgaaaataaatcttagtgttcaaaacaaaatgaaacaaaaaaaaaatgataaaaactctca

SEQ ID NO: 6153 - DNA, 3741 bp, Homo Sapiens
  NM_139353
gtccaaaccggaagaccgtgggtagctgcggcggggctgacccgtcccgagtgccaaagctggggttctacttgagatttccctcgtggtgccagggtccggcgagcatcacgccgaggcccattttccagacgaccacgacgaggccggggtcacctggcgagacgcactgactctgccagaggcccagccccagaactcagagaatggggcactgcatgtgaccaaggacctgctgtgggagccggcaacccctgggcctctccccatgctgcctcccctcatcgatccctgggaccctggcctgactgcccgggacctgcttttccgcggagggtgccggtatcggaagcggccccgagtcgtgctggatgtgactgagcagatcagccggttcctcttggatcatggagacgtagcctttgcgcccctggggaagctgatgctggagaatttcaagctggagggagcggggagccgcactaagaagaagacagtggtcagtgtgaagaagctgctccaggacctcggtggacaccagccctgggggtgtccctgggcttacctcagcaaccgacagcgccgcttctctatcctcgggggccccatcctgggcacgtcggtggcgagccacttggcagagctgctgcacgaggagctggtgctgcggtgggagcagctgcttctggatgaggcctgcactgggggcgcgctggcctgggttcctggaaggacaccccagttcgggcagctggtctaccctgctggaggcgcccaggacaggctgcatttccaagaggtcgttctgaccccaggtgacaatccccaattccttgggaaacctggacgcatccagctccagggacctgtccggcaagtggtgacatgcaccgtccagggagaaactctgctggccgtccgctctgactaccactgtgccgtgtggaagtttggtaaacagtggcagccaacccttctgcaggcaatgcaggtggagaaaggggccacggggatcagcctcagccctcacctgcccggggagctggccatctgcagccgctcgggagccgtctgcctgtggagccctgaggatgggctgcggcaaatctacagggaccctgagaccctcgtgttccgggactcctcttcgtggcgttgggcagacttcactgcgcaccctcgggtgctgaccgtgggtgaccgcaccggagtgaagatgctggacactcagggcccgccgggctgtggtctgttgctttttcgtttgggggcagaggcttcgtgccagaaaggggaacgtgtcctgcttacccagtacctggggcactccagccccaaatgcctcccccctactcttcatctcgtctgtacccagttctctctctacctagtggacgagcgccttcccctggtgccgatgctgaagtggaaccatggcctcccctccccgctcctgctggcccgactgctgcctccgccccggcccagctgcgtgcagcccctgctcctcggaggccagggtgggcagctgcagctgctgcacctggcagaaggggcgtcggtgccccgcctggcaggccccccccagtctcttccttccaggatcgactccctccctgcatttcctctgctggagcctaagatccagtggcggctgcaggagcgcctgaaagcaccgaccataggtctggctgccgtcgtcccgcccttgccctcagcgcccacaccaggcctggtgctcttccagctctcggcggcgggagatgtcttctaccagcagctccgcccccaggtggactccagcctccgcagagatgctgggcctcctggcgacacccaacctgactgccatgcccccacagcttcctggacctcccaggacactgccggctgcagccagtggctgaaggccctgctaaaagtgcccctggctcctcctgtgtggacagcacccaccttcacccaccgccagatgctgggcagcacagagctgcggagggaggaagaggaagggcagcggctgggtgtgctccgcaaggccatggcccgagggcagctcctgctgcagagagacctgggctccctccctgcggcagagccaccccctgcacccgagtcaggcctagaggacaagctcagtgagcgcctgggggaagcctgggcaggccgaggggctgcctggtgggagaggcagcagggcaggacctcggagcccgggagacagaccaggcggcccaagcgccggacccagctgtccagcagcttttcgctcagtggccatgtggatccctcagaggacaccagctcccctcatagccctgagtggccacctgctgatgctctgcccctgccccccacgaccccgccctcccaggagttgactccggatgcatgcgcccagggcgtcccatcagagcagcggcagatgctccgtgactacatggccaagctaccaccccagagggacaccccaggctgtgccaccacacctccccactcccaggcctccagcgtccgggccactcgctcccagcagcacacacccgtcctctctagctctcagcccctccggaagaagcctcgaatgggcttctgaggacacaaggtgggctgccctcaagccccagagagcccctcatccttcctctgggaccagatgtgccttccacagttgaaacttgagaagcagagctcgccaccttctggaggccactgtgatgatgagccaagcaatttggagccaagttgaagggacagggcaacaaaatacagtagtagtttcttttgtattttgtatattcgcctgaagatcatcccgcaaggcaggctggaggtgccggtgggcctgtgttgctgggattttagtctgtgctgggaggcagggctccgctgcgcctcagctgtgggggcctcaggcaggtccctcagttctcacgccttcctgtccagtggaatgggggccaggagtgctggctcctcgtgtttggtgagggtggagtgaggcccctgcagagctgctgatgaggtgggcacagcggccgttggcagctgctgttgtgggttgctttgtcaatctctgccccggtctgatgtttcctacagggagatgccttggatccaggttcagggactaaatacacttggcagctgaagatgaattggaatggtcacgttttttaggctggacagcgtcccgccacagctactacctgacactgagctcatgcagagagatgatggctgatgttccttctcccttgggacatgggtctggcacctgtgggctgtcgatagtgccctctgagcagagggtcacggtcatgtcagtttgggggaattctctgttgtgcctcacagactcccccctttctttcctccctccccttctcattttgatgtctaaagcatcaagtccctcttcctcggagtttctctagctgcagtggaagattctgttttcctgtggggaaaatgctcacttgagattttgcagggacccgggtctgtctggtttctgatgacatagtaagagaaaggtcttttttcaggttggctggtgaaaggaattgcatgtgactcacacaaacaggagctagcccaatcatacactgactcgcgtgggtgttaaaatgtttatcatgcctaagggagacatttatgattaaaccatttatgctacataaaaaaaaaaaaaaaaaaaaaaaaaaaaaaaaaaaaaaaaaaaaaaaaaaaaaaaaaaaa

SEQ ID NO: 6154 - DNA, 1940 bp, Homo Sapiens
  NM_139354
gggccggcggcggcggcggcgcgcggaggagaccgcagtgcggccggcgctaggacccgcgggggcctcccaggccgcggcgcctcccgctttcccccactccccgacccttcttcgcccccaaaatgaggaaacggagcaactcgctccaagttgtgcagccgggaccgcctcggggtgtgcagccggctcgcggaggccctcctgggggcgggcgcggggcgcggctcgggggcgccccctgagcaggtgagcccccgcttcctccgagcctggcacccccctcccgtctcagccaggatgccaacgaggcgctgggccccgggcacccagtgtatcaccaaatgcgagcacacccgccccaagccaggggagctggccttccgcaagggcgacgtggtcaccatcctggaggcctgcgagaacaagagctggtaccgcgtcaagcaccacaccagtggacaggaggggctgctggcagctggggcgctgcgggagcgggaggccctctccgcagaccccaagctcagcctcatgccgtggttccacgggaagatctcgggccaggaggctgtccagcagctgcagcctcccgaggatgggctgttcctggtgcgggagtccgcgcgccaccccggcgactacgtcctgtgcgtgagctttggccgcgacgtcatccactaccgcgtgctgcaccgcgacggccacctcacaatcgatgaggccgtgttcttctgcaacctcatggacatggtggagcattacagcaaggacaagggcgctatctgcaccaagctggtgagaccaaagcggaaacacgggaccaagtcggccgaggaggagctggccagggcgggctggttactgaacctgcagcatttgacattgggagcacagatcggagagggagagtttggagctgtcctgcagggtgagtacctggggcaaaaggtggccgtgaagaatatcaagtgtgatgtgacagcccaggccttcctggacgagacggccgtcatgacgaagatgcaacacgagaacctggtgcgtctcctgggcgtgatcctgcaccaggggctgtacattgtcatggagcacgtgagcaagggcaacctggtgaactttctgcggacccggggtcgagccctcgtgaacaccgctcagctcctgcagttttctctgcacgtggccgagggcatggagtacctggagagcaagaagcttgtgcaccgcgacctggccgcccgcaacatcctggtctcagaggacctggtggccaaggtcagcgactttggcctggccaaagccgagcggaaggggctagactcaagccggctgcccgtcaagtggacggcgcccgaggctctcaaacacgggaagttcaccagcaagtcggatgtctggagttttggggtgctgctctgggaggtcttctcatatggacgggctccgtaccctaaaatgtcactgaaagaggtgtcggaggccgtggagaaggggtaccgcatggaaccccccgagggctgtccaggccccgtgcacgtcctcatgagcagctgctgggaggcagagcccgcccgccggccacccttccgcaaactggccgagaagctggcccgggagctacgcagtgcaggtgccccagcctccgtctcagggcaggacgccgacggctccacctcgccccgaagccaggagccctgaccccacccggtggggcccttggccccagaggaccgagagagtggagagtgcggcgtgggggcactgaccaggcccaaggagggtccaggcgggcaagtcatcctcctggtgcccacagcaggggctggcccacgtagggggctctgggcggcccgtggacaccccagacctgcgaaggatgatcgcccgataaagacggattctaaggactctaaaaaaaaaaaaaaaaaaaaaaaaaa

SEQ ID NO: 6155 - DNA, 2163 bp, Homo Sapiens
  NM_139355
gggccggcggcggcggcggcgcgcggaggagaccgcagtgcggccggcgctaggacccgcgggggcctcccaggccgcggcgcctcccgctttcccccactccccgacccttcttcgcccccaaaatgaggaaacggagcaactcgctccaagttgtgcagccgggaccgcctcggggtgtgcagccggctcgcggaggccctcctgggggcgggcgcggggcgcggctcgggggcgccccctgagcagaaaacaggaagaaccaggctcggtccagtggcacccagctccctacctcctgtgccagccgactggcctgtggcaggccattcccagcgtccccgactgtgaccacttgctcagtgtgcctctcacctgcctcagtttccctctgggggcgatggcggggcgaggctctctggtttcctggcgggcatttcacggctgtgattctgctgaggaacttccccgggtgagcccccgcttcctccgagcctggcacccccctcccgtctcagccaggatgccaacgaggcgctgggccccgggcacccagtgtatcaccaaatgcgagcacacccgccccaagccaggggagctggccttccgcaagggcgacgtggtcaccatcctggaggcctgcgagaacaagagctggtaccgcgtcaagcaccacaccagtggacaggaggggctgctggcagctggggcgctgcgggagcgggaggccctctccgcagaccccaagctcagcctcatgccgtggttccacgggaagatctcgggccaggaggctgtccagcagctgcagcctcccgaggatgggctgttcctggtgcgggagtccgcgcgccaccccggcgactacgtcctgtgcgtgagctttggccgcgacgtcatccactaccgcgtgctgcaccgcgacggccacctcacaatcgatgaggccgtgttcttctgcaacctcatggacatggtggagcattacagcaaggacaagggcgctatctgcaccaagctggtgagaccaaagcggaaacacgggaccaagtcggccgaggaggagctggccagggcgggctggttactgaacctgcagcatttgacattgggagcacagatcggagagggagagtttggagctgtcctgcagggtgagtacctggggcaaaaggtggccgtgaagaatatcaagtgtgatgtgacagcccaggccttcctggacgagacggccgtcatgacgaagatgcaacacgagaacctggtgcgtctcctgggcgtgatcctgcaccaggggctgtacattgtcatggagcacgtgagcaagggcaacctggtgaactttctgcggacccggggtcgagccctcgtgaacaccgctcagctcctgcagttttctctgcacgtggccgagggcatggagtacctggagagcaagaagcttgtgcaccgcgacctggccgcccgcaacatcctggtctcagaggacctggtggccaaggtcagcgactttggcctggccaaagccgagcggaaggggctagactcaagccggctgcccgtcaagtggacggcgcccgaggctctcaaacacgggaagttcaccagcaagtcggatgtctggagttttggggtgctgctctgggaggtcttctcatatggacgggctccgtaccctaaaatgtcactgaaagaggtgtcggaggccgtggagaaggggtaccgcatggaaccccccgagggctgtccaggccccgtgcacgtcctcatgagcagctgctgggaggcagagcccgcccgccggccacccttccgcaaactggccgagaagctggcccgggagctacgcagtgcaggtgccccagcctccgtctcagggcaggacgccgacggctccacctcgccccgaagccaggagccctgaccccacccggtggggcccttggccccagaggaccgagagagtggagagtgcggcgtgggggcactgaccaggcccaaggagggtccaggcgggcaagtcatcctcctggtgcccacagcaggggctggcccacgtagggggctctgggcggcccgtggacaccccagacctgcgaaggatgatcgcccgataaagacggattctaaggactctaaaaaaaaaaaaaaaaaaaaaaaaaa

SEQ ID NO: 6156 - DNA, 5947 bp, Homo Sapiens
  NM_144490
gcttgcttgcccggctcgctcacgggtcgttgaggccggtgacatgtctgtgagctgcggaggctgcggcccccagatctttctctttgacactttgcaataaaaaagggcagtgagattgaataggtgttttgtggattaactcttcattgattatatacaacaaaaaatagttatggcgactttcagaaacaatcacatgaagactaaagcatctgtcagaaaaagcttcagtgaagatgtgttccagtctgtaaagtctttattgcagagtcagaaggaactatgcagtgtaacagcagaggactgtttacagcaggatgagcatgccaatttaactgaggtcacatttctgggttttaatgaagagacagatgctgctcatatacaggatttagctgcagtttctttggaacttccagatattctgaattcactccacttctgcagtctaaatgaaaatgaaattatttgtatgaagaatataaataaaccattagatataagcagtgatcctctaaatcagagtcatccttctggaatgctttgtgtcatgagagtgtcacctacatcaccaagacttaggattgattttatctttagtctcctaagtaaatatgctactggtataaggtacaccttggacacattcttgcatcagaagcaccaacttgagaccactgatgaagatgatgatgatactaaccagtctgtgtcatccatagaggatgactttgtcactgcttttgagcacttagaagaggaagagacttcaaagccatacaatgatggaatgaacattactgtgctaaggagccagtgtgatgctgcttcccagacggttactggtcatcatttagaaacccatgatttaaagattctcattagctctggacagcagaagtcattggctaaaccctcaacttcctcagtgaatgtcctgggacataaagaactaccttctgtgaaaacttcagtcacaacatcaatttcagagccttggacccaaaggagtttctataggtcatctaatgcttcagataaagatagtgatttacagaaaacatttttttcgtcttctcctgcctactcatctgaatcagaatgttcaagtccaagtcctgttattttcttggatgaagagggatatcaaaaaagcttaaaagcaaaacttgagctgcctaaaattcctgtgatgaaagatgatatagaggattcagactcagaagtaagtgaattttttgatagttttgatcagtttgatgaactagaacaaactttagagacttgcctgtttaacaaagatcccgtcatagggaagtcatcgcagaggaaagggcacaaacatggaaagtcatgtatgaatcctcaaaaattcaagtttgatcgtccagctctcccagctaatgttagaaagccaactcctcgtaaaccagaatctccatatggtaacctgtgtgatgctccggattctcctcgcccagtgaaggcatcaagggaagatagtggtttatttagtcctattcgatcctctgcttttagtcctcttggaggctgtactccagctgaatgtttttgccaaacagatattggtggagataggattcatgaaaatcatgattctgtttattacacctatgaagactatgcaaaaagcatttcatgtgaagtactaggctcagttcttcgtacccaccatactaataccctatcaaatattaacagtattaaacatggagaaaataaaactgtaacttttaagcatggaaaccttgatcaaaaaaataaatctaaaaataaatccttaatgattaaagatagcattcaaaaatttgcagcagatcttgtggaaaaaagttttggcagtgcatttaaagacttacagaaaggagtctcttcatgtaccaatgctttgtaccacttagccatcaaattgacatcatctgttttgcagatggcatttgatgagctgagaaggcagcgtgcattttcactaaaagaacgtgccattagtggcctggctaactttttggtgagtgaagctttatcaaatgccttaaaagatttacagtatgtaaagaagcagatattcacaaacacagttgctaggtttgctgcagatcttgctgaagagcttgtttttgaaggcatcatggaggtgtgtcagttttcatatcctcaaacgcctgcatctccacagtgtgggtcgtttgactttgaagacaaagtagtgaagttgtatgcaaaagatttgtctgaatctgtaatacaggaagcattcattgagctatcacaagttgatgtgacctttacaacaaaggcagcagttagtgtctctacggataatatcaagtatgtgagtgcagaaagtgtagtgccatcgacacaggctgtcacgttttccccttcttttcacaatcaagcaattatggtgacaaaaccagtgcaggaatataaaaaggaatacacagtgcagcaggccttgttttgtacttctggaattgttacttctataccggtgcccttggcaggaagtgcccttctcccatatcatatttcatctactgcatgtcaggccaaggctcatctgtcatctgatgatagtaattcaaatggtgattctgcccaagtgcatattgccacaaaaaacagagaagaaaaagcagcttgtctcagaaatatttgtttaccttcagaacacaatccaggtaatcagaatgattttaaaccaactaatgacgatattgaaatgcagagttcctcaaaattaccaaatgatcctgcaattattagcaacttttctgcagcagtggtgcatacgatagtaaatgaaactttagagtcaatgacatcattggaagttacaaaaatggttgatgaacgtacagattatttaactaaatctttaaaggagaaaacccctccattttcccactgtgatcaggcagtgctgcaatgcagtgaagctagtagcaataaggacatgtttgctgaccggttatctaaatctattattaaacattccatagataagagcaaatcagtgatcccaaatatagataaaaatgcagtatacaaggaaagcttgcctgtttctggagaagaatcacagttgacaccagaaaagtctcccaaatttcctgactctcagaatcagttaactcactgctcactttcagctgcaaaggattgtgttccagaatgtaaagtttctatggttcatggatcctccctagagacactgccatcttgtccagctgtgacaggtcagaaatctgacttgaaggaatctgctaaggatcaaccactgaaaaagcataacttgaatagtacatcacttgaggccttgtcttttggacaggaaaacccctttcctcattcacatactttctcatctacagcacttacctgtgtagatggtttgcatgtggaagataaacagaaagtcagagacagaaatgtaatacctgatactcctccatcaactcctctagtaccatcccgggctagttctgaatgggatatcaagaagttaactaaaaagctcaagggagaattagccaaagagtttgcacctgctacaccaccttctactccacacaactcatctgttggtagtttgtctgagaatgaacaaaatactatagaaaaagaagagttcatgttgaaactcatgcgatctctttctgaagaagttgagagtagtgaaagtggagagctcccagaagtggatgtgaagtcggagcactcagggaagaaggttcagtttgcagaagcattagctacacacatcctttctcttgcaactgaaatggcagcttcccatttagataacaaaataattcaagaacccaaggttaaaaacccttgcttaaatgtgcaaagtcaaagaagtgtgtcgcctacttttttaaacccctcagacgaaaatttgaaaacattatgcaattttgcgggtgatctggcagcagaagtcattacagaagctgagaaaatagcaaaagtccgaaattgtatgcttttcaagcaaaagaagaacagttgttatgctgatggtgacgaagattataaagtagaagagaagttggatatagaggctgtagtgcacccaagagaagtggatccgtttattctttcattaccaccaagttcttgtatgtcaggtctgatgtataagtatcccagctgtgaaagtgtgacagatgaatatgcaggtcaccttattcagatactaaaacaggaaggtggtaatagtgagttgataatggatcagtatgccaataggcttgcctaccgatctgttaaatcaggattacaggaagcagctaagacaaccaaagtgcagtgcaactcaagaatgttccctgtgccaagttcacaagtgaaaacaaacaaggaactgttaatgttttcaaacaaagagcaccaccaagaagcagacaaaaagagacaaagtaaaagaaatgaaggttacttttgtaaaaatcaaacttgtgaaaggacctgtggaccatcagttgaacttagcccctggaaatggcaaactaggtgtgggagggaaggcaactcttggaaaagggaatgaggtagcataaggaaaggaaatggcttttcacctgatagaacacttcatctcgaagagttttgttcgatgcttggattaacctggaaatattaatatttttgtaaagtatattttgtcatagtttattatggtgctatataaaccaccaatatttcttaaaatctaggtccaaaaagacagtgtttaaaactggtagaagcaagtgggggcaatgtcacaaatcatgatttggcccttttctataactttatctagaaaaggatactaacatttagtttcttctctcattttgagaaacacaggcttctatgatttcagtggggttgacagtgttgcctaggaaatcctggcgttaaaatgggagattgaggtgtgggtagaggctttaagcattaagaggacttgtagtcagttgaacaactctgtgctgaatattatctaatttgatgagaaaaaggagtcgtcttaccggtttctgtccttggttctgtcctccttagcattatttattaatgatgtggaatactcatttgtggatgattcaacacaggctgaaaaaagaatctcattaacagaacaaaggttaaaaagaccaaatcaagctgaggttaaaataattatgtttaacatggataaatgcatttaggctcagaaaattaatgattaatatttgaacttaagtggggagcaaacctggcttgatggcattttgtcagaaaaagacctgtgtttccattgaccaaagttgtaatgtgacttaatgtaatgctgcgtggcattaaggttctggcacagagaaaaagcggggctcatccaggattggtggtgtgctcgttgcatatacagtgtccagggtctcacctccagagatgaagatttatgaagtcagtgaagggtcctgagaatctgcatgcttgataagcatcacagatgatttcagtgcaggtgattcagagacctcacttgaaaatatattgatttacaagatatgttgcatctgttgatgacaattgatatctatactgttcttttctgctacagagatcaaggtaggagataaagacttcggcgatttgggctgggcgcggtgattcacgcctgtaatcccagaactctgggaagccaatgggggtgggggtggatcacttgaggtcaggagttcaagaccagcctgggcaacatggtgaaaccccgtctctaccaaaaatacaaaaattagccaggcgtggtggcaggcacctgtaatcccagctacttgggaggctaaggcaggagaattgcttgaacctgggaggcagagattgcagtgagctgagattgtgccactgtactccatcctgggcgacagagacagactccgtc

SEQ ID NO: 6157 - DNA, 4668 bp, Homo Sapiens
  NM_144567
cggcgagactgcacctcccagcatgccttgcagccaggactggagtcggtacttaagagtgatggggttccctagatactttaggccgtcgcatcgattatagagattgaggtggaacccggggcctgggaactggacgcacgcggagggcgaagatggaagcctggcgctgtgtgaggaagggctacggccactgtgtggtgggaagaggccgataccccatgtttccccatcactcgaggagtctgggcagagactggactacaccgtgggagaatctgcaaaggtgttgctggaacagacatatttctagttgtatgaggtggcctggacattactctcgagctccttacccatacttcagtagtaggcatttttcactaaattggagaccaccctgtttgtttgagtctagaactcagttccagtactgtaactggagacctgacaacctgagccagacatctttgattcatctctctagttacgtcatgaacgctgagggagatgagccttcatcaaaacgaagaaaacaccaaggtgtgataaagcggaattgggaatatatatgtagccatgataaagaaaaaacgaagatcctaggagacaaaaatgttgatcccaaatgtgaagacagtgagaacaagtttgacttttcagtgatgtcctataatatactttcacaagatttactggaagataactctcacctttatagacattgccggcggccagtattacactggagttttaggtttcccaatattctgaaagaaattaaacattttgatgcagacgtactttgtttgcaagaagttcaagaagatcattatggagcagagatcaggccaagtttggaatcactgggttatcactgtgaatataagatgcggacaggaaggaaacctgatggctgtgctatttgcttcaaacattccaaattttcactcttgtcagtgaacccagtggaattcttccgccctgatatttctctgttggacagagacaatgttggattagttttactcttacagcccaaaattccatatgctgcctgccctgcaatctgcgtagcaaatacgcatctgttgtataatccaaggcgaggtgatattaagctgacgcaattggcaatgctactggcagagatttccagtgttgcccaccagaaagatggcagcttctgccctattgttatgtgtggtgactttaattctgttcctggttctccactatatagtttcataaaggaaggaaaattgaattatgaaggacttcccataggaaaggtatctggccaggaacagtcttcacggggacaaagaattttatctattccaatttggcccccaaacctaggtatctcacagaactgtgtgtatgaggtacagcaggtaccaaaagtagaaaagacagacagtgatctgacacaaacacagctgaagcaaacagaggtcctagtgacagctgaaaaattgtcttcaaatttacagcaccatttcagtttgtcatctgtttattcacattactttcctgacactggaattccagaagtgaccacctgtcattcccgaagtgccataactgtggattatattttctactctgcagaaaaggaagatgttgctgggcacccaggagctgaagttgctttggttggtggcttgaaacttctagctagactgtcacttcttacagaacaagacttatggactgttaatggacttccaaacgaaaataactcttcagatcatctgcctttattggcaaagttcagacttgagctctgactctctttgatcacatactaattttctttccaatttgtattgtttttcaaagaatgtaaagttcttaagtgtatgcatgttgtttatttttgcactgtggagattctgaagcggttatgttagatgctttgaaactccatatcagaagaaataactttataacaattttttttaataatgaaaaatattttcgtgacaagtgagctctaaattctctttattgtaaaagagatgtaaaggttttatattctaaatcctagtaaaattgacagtgatttttaaatataatgcatcttcctttgtctgcttagtaaaaaatttcatttcataattttggcaagctctgtagtggatccaaagtatctttgagttcttgcaaactacaagttgtttcctttccagaaggcttgatttcattaggagacccctctattgagttctaaatagtttatcttagaaagccttgggtcattcacaggtatccaaccagccattgtttagtttgtttttgaaggggtttgataatgctttttaagttgtacagaatgcttaatccatcttattactgtcctgagccatgtaatatgcctgcatcgtgttggggaaatgtttgggaaatataagccagcataacgtgtaaagctcactctttcaccctggaacagacaagaggtgggcttaatagaggcagagactggggatatacctttgtttccctagcatttttatttatttatttttattttattttattttttgagatggagtttcactcttgttgcccaggctgggggtgcaatggcgcaatctttgctcactgcaacccctgcctcccgggctcaagcgattctcctgcctcagcctctcgagtagctgggattacaggcatgcgtcaccactcccagctaattttgtattttcagtagagacagggtttccccatgttggttaggctggtctcgaactcccaacctcaggtgatccgcccacctcagctctcaaagtgctgggattacaggcgggagccactgcacatggcagcattttttaaaaattcagttttaagatctctggtttaggggagagattttattttactgaaccagttctatagaaatttattttattaggaaatttgtctttggaacaaagtggcagctataaaattatttttgttaagcctcagaaatatgaggaagcctgtaaaactctagtggggagatattaacttggagacctaatgctctgtaaatagtcatttaaactgttggttttagtggttttgtttctaaaatgttttcttttaccgtgatgcaccagtatgagatggtgctgacactttctatgaagtggttatgagcaggtttaataaatcctctatacaagtgtttgaatcaattttaaaacataaaaagtggaaatttccttttttgtagacagtaggaacaaggaattatatgcatttttactaagtagtaattttacactgaattgtaaatgtttttacagtgagttttattaatagaatgcttcaccttaaattggaaaacaataatagtcttggactaagtctttgtactaaagcatttgctataattatttttaaaaaaacaaacagatgaaaacctcagagaaggcatgtggattataagatttgtctagtaaaaattgtaattgaatatgtttaaatatttaatttctcattttggggggtttttatttttttattttttagatggtgtctcacgctatcgcccaggctggagtgcagtggcgcgaactcggctcactgcaacctccgcctcctgggttcaagcaattctccttcctcagcctcccaagtagctgggattacaggcatgcaccaccatgcccagctaatttttgtatttttagtagagatggaattttgccatgttggccaggctggtcttgaactcctgacctcaggggtgatccacccgcctcgggctcccaaagtgctgtgattacaggcatgagccaccatgcctggcctttggggggattttaattacagtattaattatagttctaggatttcccacattttatagtagtagtttgcaggatattatgtgccctaattagcagatatagacattatcaaattataatgatagtataattatccctttttaatattggggaaagaaaaatgaaaattcattagttaattactgctttgtgttgtgtgaatttattaacaaataacattattacatataggtcattgttaacaaacaaacatccctgaaaacctctgtgaaaatttaattttttatatcctgattaatatattgtgactttaggcccatttttcatgtgcttcactttgatagagttaatccataaaattgctctttactttagcttatcaaatgaagtattattttgtggactggaggccaaaaagtcaatgtgagcttctcacaggtttttaaagctccactaaaaataattatccacttgtctttacttttgttgaccagaatagttggtaactctgccagagcctgtacttacctgccaaaaacaattaaatctggttaatgcctgaaaccaaatctctcagtctcaagtgttatactatccaagttttaaatggaaaggtaaactgtggagtaatgaaattttggttttactgtaccttttgctatcaagataatattcatgtttgaaatcttgtctttatttggaatttagttactgtctgcttttaacctttgctttcctaaagaaagtttgagatccagagagttcaagggattggggaaagagaggcgtcaagtcatttgcactttgtacctgtaagttaggtaataaactattatactcgtaaaaaaaaaaaaaaaaaaaa

SEQ ID NO: 6158 - DNA, 1709 bp, Homo Sapiens
  NM_144568
cactggttgcggagtgagctgggcgcgcggcgcgcaggcgccctggggacccggtagcggcggtggcggtggcggcggtggcggtggctgcggcgacggcagaggcgaagggagccggatcgccgacctgagcgggaggcggcggtggcggccatggcggcagatggagagcgttccccgctgctgtctgagcccatcgacggtggcgcgggcggcaacggtttagtggggcccggcgggagtggggctgggcccgggggaggcctgaccccctccgcaccaccgtacggagccgcatttcccccgtttcccgaggggcatccagccgtgttgcctggggaggacccacccccctattcacccttaactagcccggacagtgggagtgcccctatgatcacctgccgagtctgccaatctctcatcaacgtggaaggcaagatgcatcagcatgtagtcaaatgtggtgtctgcaatgaagccaccccaatcaagaatgcacccccagggaaaaaatatgttcgatgcccctgtaactgtctccttatctgcaaagtgacatcccaacggattgcatgccctcggccctactgcaaaagaatcatcaacctggggcctgtgcatcccggacctctgagtccagaaccccaacccatgggtgtcagggttatctgtggacattgcaagaatacttttctgtggacagagttcacagaccgcactttggcacgttgtcctcactgcaggaaagtgtcatctattgggcgcagatacccacgtaagagatgtatctgctgcttcttgcttggcttgcttttggcagtcactgccactggccttgcctttggcacatggaagcatgcacggcgatatggaggcatctatgcagcctgggcatttgtcatcctgttggctgtgctgtgtttgggccgggctctttattgggcctgtatgaaggtcagccaccctgtccagaacttctcctgagcctgatgacccacagactgtgcctggcccctccctggtggggacagtgacactacgaagggagctggggtagttaaaggctcccggggcttctagaaggaagccaagcagctgccttccttttccctggggagaggtaggaaggaaccaggccctcacttaggtttggaggggcagataagagcactgctgaccatctgctttcctccaagggttgctgtgtctagggtgaagtaggcaaaacgttgcccttaaaactgggccctgaagacggttccagccttgtccttcctgtgtgctccctgagagccattcctgtcccttacacattccagggcagggtgggggtgggtagccctgggggttcccctccctcttgtgcaccattaggactttgctgctgctattgcacttcaccagaggttggctctggcctcagtaccctcagtctcctctccccacattgtgtcctgtgggggtggggtcagccgctgctctgtacagaaccacaggaactgatgtgtatataactatttaatgtgggatatgttcccctattcctgtatttcccttaattcctcctcccgaccttttttacccccccagttgcagtatttaactgggctgggtagggttgctcagtctttgggggaggttagggacttatcctgtgcttgtaaataaataaggtcatgactctacgcttaaaaaaaaaaaaaaaa

SEQ ID NO: 6159 - DNA, 3888 bp, Homo Sapiens
  NM_144569
aaaactcagggaagcccagggcccgtgttgtgcttttggcccaggtaggtggacagacatgtcccaggcgggggacgtagaaggccccagcacaggagaccctgtgctcagtccccaacacaactgtgagcttttacagaacatggaaggagccagctccatgccaggcctgtcaccagatgggccgggagcaagctctgggcccggagtcagggctggcagcagaaggaagatccccaggaaggaggcccttcgaggtggcagctcccgggctgcaggtgctgctgaggtccggccaggggtcttggagctgctagctgtggtacagagccggggctcgatgctggctcctgggctccacatgcagctgccctcggtgcctactcaggggagagctctgacctccaagaggctccaggtttctctgtgtgacatcttagatgacagttgccccaggaaactttgtagcaggtctgctggcctcccagagagagctctggcctgcagggagaggcttgcaggagtggaggaggtgagctgcctcaggcccagggaggccagagacggtggaatgagttctccagggtgtgacagaagaagccccacactcagcaaagaggagccccctggaaggcccctgacatcctcaccagacccagtccctgtgagggtaagaaagaaatggaggaggcaaggggctcattcagagtgtgaggaaggggctggtgacttcctgtggcttgatcagagccctcgtggggacaacctcctgtctgtgggagaccctccccaagttgctgacctggagtccttgggaggcccttgcagacctccctctccaaaagacactgggtctgggcctggagagccaggtggaagtggggcaggatgtgcctcagggactgagaaatttggatatttgcccgctacaggggatgggccccagccaggcagcccctgtggccctgtcgggttcccagtgcccagtggaggggagtccctcagttcagctgcacaggctcctccacagagcgcagcactgtgcctgggggcgtcagcacaggcctctgcagagcagcaagaagctgtgtgtgtcgtgcggactggcagcgatgaaggccaggctccagcacaggaccaggaggagctggaggccaaggctcagccagcttccaggggaaggctggagcaaggactcgctgcccccgctgacacctgtgccagctcccgggagcccttgggcggcctcagctcctccctggatactgaagccagcagggcctgctcaggcccattcatggagcagagaagatccaagggcactaagaacctgaagaaaggtccagtgccctgtgcccaagaccggggcacagacagaagctcagacaactcccaccaggacaggccagaggaacccagcccaggaggctgccccagactggaggaagtgaaaataccccatggagtgaagcttgtgtgctacctgggttccgggccagtgatccagctcctgggggccatcagccacggccaggcaggggggcagctgccaccaaagctggaggttctagaggacttgatggaggtcagctcaccctcacctgcccagaggctcagaaggaagaaaaggcccatggtgcagggccctgctgggtgccaggttttccagccttctccttcaggaggcacagcaggggaccctggtggcctctctgaccccttctaccctccaagaagcggttccctggcccttggcgaccccagctcggaccctgcatgttcccagagtggcccaatggaggctgaagaggattctcttccggagcagccagaggactcagctcagctccaacaggagaagccatccctgtatattggggtgcggggcactgttgtccgttccatgcaggaggtactatggactcgccttcgggagctcccagacccagtgctgagtgaggaggtggtggagggcattgctgctggcattgaggcagccctctgggacctgacacaaggcaccaatggccggtacaagaccaagtatcgcagcctgctgttcaacctgcgggaccccaggaacctggacttgtttctcaaagtggttcatggagatgtcaccccctacgacctggtgcggatgagctcgatgcagctggccccccaggagctggcccgctggcgggaccaggaggagaaaaggggcctgaatatcattgagcagcaacagaaggagccgtgcagacttccagcctccaaaatgacccacaagggcgaagtggagattcagcgggacatggaccagacactgaccctggaggatctggtgggaccgcagatgttcatggactgcagcccacaggccctgcccatcgcatcagaggacaccacggggcagcatgaccaccacttcttagaccccaactgccacatctgcaaggactgggagccctcgaatgagctgctaggctccttcgaagccgccaagagctgcggggacaatatcttccagaaagccctaagccaaactcctatgcctgctccagagatgcccaaaaccagggagttgtctcccacggaaccacaggacagggtccctccatctgggctccatgtgcctgctgcacccacaaaggccctgccctgcctgccaccctgggaaggtgttctggacatgttctccatcaagcggttccgggccagggcccagctggtctcgggacacagctgtcggcttgtccaggctctgcccaccgtgatccgctcggcaggctgcatcccctccaacattgtctgggaccttctggccagcatctgcccagccaaggccaaggacgtctgcgtggtcagactgtgcccacatggggcccgggacacccagaactgccgcctgctctactcatacctcaatgataggcagcgccacgggctggcctctgtggagcacatggggatggtcctgctgcccctgcctgccttccagcccctgcccaccaggctgcgccctttggggggcccaggcctttgggctcttcctgtctcccctctcctttccccaggtctggaggtcactcactcaagtctgttgctggctgtgctgctccccaaggaagggcttccagacacagcagggtccagcccctggttggggaaggttcaaaagatggtctccttcaacagtaaggtggagaagagatactatcagccagatgacaggaggccgaatgtgcccctgaagggcacccctcccccaggaggtgcctggcagcagagccagggcaggggcagtatagctccaaggggaatctctgcttggcagaggccccccagaggcagggggaggctctggccagagcctgaaaactggcagcatcctgggcgagggcagtggcccccagagccaggcttgcgccagtcccagcatccctattcagtagcaccagctggtcatggctttggccgtggccagcacttccacagggactcctgtccccaccaagccctgctccggcacctcgaatccctggcgaccatgagtcaccagctccaagccttactgtgcccccagaccaagagctccatcccccgccctctgcagcgtttgtctagcgcccttgcagctccagagccccctggcccagcccgtgactcctctttggggcctacagatgaagctggctctgagtgtcccttccctagaaaggcctgaccctccttacccaccagaacaggggttttgatgccctcactagtgttgaagcctgttccagagagaggtgggactgcaaggagaggatggtcagccctacccacctgccctgtttgagcttcctgtttgacaatgtttgctgttgattttttgttcaataaagaatttggtaaaattgg

SEQ ID NO: 6160 - DNA, 8794 bp, Homo Sapiens
  NM_144571
gcgcgcgcgcgcgcgtgtttgtgtgtgtgtttcccctgccgcggggaaatggctgctgttgcttctgggccagaggaagagaatgagactaatagggatgccaaaggaaaaatatgatcctccagatcctcgcagaatttataccatcatgtcagcagaggaggtagccaatgggaaaaaatctcactgggcagaattagaaatctcgggtagagtgcggagcctaagtacatcactttggtcattgacacacttgacagcgctgcacctaaatgacaattaccttagtcgcattccacctgatattgccaagcttcataatctggtttacctggatctgtcatccaataaactcagaagtttaccagcagaactaggaaacatggtgtctctcagggaattgcttttaaataacaatctgttacgggttttgccttatgaacttggtcggctcttccagctacaaactctaggtttgaaaggcaatcctttatcacaggatattctcaacttataccaggacccagatggaacccgaaagctactgaacttcatgcttgacaatctcgcagttcatccagagcagcttcctccgaggccatggattacattaaaagaacgagaccaaattctgccgtcagcatcattcacggttatgtgttacaatgtgttatgtgataaatacgctacccggcagctatatggctattgcccatcctgggcattaaactgggaatacaggaaaaagggaattatggaagaaattgttaactgtgacgcagatatcattagtcttcaggaagtggaaacagagcaatacttcactctctttctgccagcattgaaggagcgtggatatgatggatttttttctccaaagtcacgtgccaaaatcatgtctgagcaggagagaaagcatgtagatggttgtgcaatattcttcaaaacagaaaaatttacattggtgcagaagcatacagtggaatttaaccaagtggcgatggctaattcagatggatccgaagctatgctgaacagagtgatgacaaaagataacattggtgtcgctgtggtattagaggtccacaaagaactatttggagcaggtatgaagcctattcatgctgcagacaaacagctgcttatagtggcaaatgcccacatgcattgggacccagagtattctgatgtgaagctcatccagaccatgatgtttgtctcagaggttaaaaacattctggagaaagcctctagtaggcctggaagcccaactgcagatcctaattccatcccgctggtgctatgtgcagatcttaactcattgccagattcaggtgttgtggaatacttaagcaatggaggagtagctgacaaccataaagacttcaaggaactaaggtacaatgagtgtcttatgaacttcagctgcaatggaaagaatggaagctcagaagggagaatcacacatggcttccaacttaagagcgcctatgaaaataacttgatgccttacaccaattacacctttgatttcaaaggcgtgattgactacattttctattccaagactcatatgaacgtgcttggtgtcctggggcctttagatcctcaatggctggttgagaacaacatcactgggtgtccacaccctcacatcccttcagaccacttctcactgttaacacaacttgaactccaccctccactcctgcctcttgtcaatggtgttcacttgcctaatcggaggtagtggagtactgccccgccaagacggggatctgttgctatggacctgtacagttgtaaatcaaagtatgtaggagtgaagtatggccatccttaagctgcttcttcaggtttctttcattatgtgtttgctgtaagactttgtacatttttgtgcatattggtatcatttggcagtagggctggaaccaaagtattactctctttacaaaattttaatttaacatgtttttaaattggaccttctttatattgtattaacagccagcattcaaaattgataaattaccaatttgaggcccaataacagtgtatttgtttttccaaaacaaatactttcttttgaatggtttcagtgagccaaccattttataaaaggcaatttttaaaaactataaatacagtattttaaactgaatgatgatatgccttccagggaaaaccttgaatttttcctttataactgacttttggattccaaagtcatttgcacattaacagagtacttaaatttacttgttcagtccataaactatgatatagcctctatacatggtaagaaaatttgaaaaattaaagatggttgcacagtatacttttataatccagcatgtaacaccacatgacaatttgttggccaaatgctggtttggagtttttttgaggaatcactttggtttttttgtcctttatatataaccttattggaagtattaattctaagcctgtctctcaagtttatttatagagaaaaagtaagtaatctgtattgccacataccttgaaaatagaatgtggtatgtttaggatgcccacggaatgaatttttccttattccaattcaaccttctgtctggttgtgccaggaaaacagatgttatatgacctatgtcatttttgccattatagtcaaatgttaaaagaagaaaaaagtctgctgaataaaaaggccttgatcaaagtttcagatggggaaaatcatacagatattttatgtgtttccaacatagattatgtggctgttggtttcttgagatgacagtgcaaaggatttgggagagagaacaaatttggggcagtagttgaaaacgttgggtcattttcctgactctagctgccaaatggccatcatatgcttttaatctttgtttcagttgtctgtcagggttgaattaagaagctactggtttattcccaattgttgatgcctttaggtatgttggaatcttttttttgcctaggaggggccagttgaaaatctgtgactcaagaggcagtgaacagaatactgttttctggggaaaaattggttggctacttgatgttaattatggcacagtaacaggaaaaggttgtgtctgtgtttttaagtttttctttattctgcttttttgctgctataagagttttctgaaatttatattttaaacttttcatgcactttactgtttctagtctcaaaatgtgatatttttaataaacaagaaattttccattatgtgaatgaaattttaaaagacaatagcctatatttgtgtctcactaatatataaagtataggtcaaatttaaattatttaattagttttaaatatacacaatttgtctcctctttcaaacctgacatcttcggctgttttattagtcttaaatgatgcatttactttggtcattttatgctaatttcttccatagtaaattaatcaggctatataaggtaatatttccccagagggtaattttagtgggacgagggtggtgggatgatgtcatatcatacatgggattgcatcagaagggttctgtaaagcctgaactcccttttaaaagtgcctagtgatagaggcgttgtttgtcatctattataattggaatgtcattgtagttcagtgaattttgatgtaaataaaatatcttttaaaaatgttaaagtaccaggataaacaaacaaaaagaaacaacccttaagatgacagattttcctcaacatgcaggtttcccttcttatatacctcaagtatccaacatctagccatgcaaattgattacctgaagcatagtactggaaagtagaatagcatgaaaaacttaattttgtggacattacctttttttgtaatcagctactgtatgttttattttagatcttttgttttgggtgggttttctgctctggaggtatatgcactaacaaaacattttcctcctttcatatacgcatgttaattagcaatgtgagcaatatttcctaccatacttcactcccaatattttttgagatgtttgtataaaatggaatttaaagttcacttatgattgtatatgaaccacagaggagcccatttattaataaaaaacttttttaatagttaaatgtagagggaaaaaataaaaaaaaatgggaaacattgtaaacagcttaagtttattttgtgtatgatcgaggcactctgttgcaggaaggtgtgtaattgggttctctctgcttcaaatgcgctctttcaaaccattcattatcctgtgtatttttaatgtggttttagtaaatgttggtagtagctctgttgaagtaggtaattgtgttatgttttgggtggtacacacttggggcatggtaacccaaatttcatgtgcacggtttccctttagcccactgcccaaatttcacatacccttcaccctttgttccctttgtaaaaggagtggtatctgttttgagctgccaattcagatgatcagaaatgctgctttcctcagcattgtcttgttaaaccgcatgccatttggaactttggcagtgagaagccaaaaggaagaggtgaatgacatatatatatatatattcaatgaaagtaaaatatatatgctcatatactttctagttatcagaatgagttaagctttatgccattgggctgctgcatattttaatcagaagataaaagaaaatctgggcatttttagaatgtgatacatgtttttttaaaactgttaaatattatttcgatatttgtctaagaaccggaatgttcttaaaatttactaaaacagtattgtttgaggaagagaaaactgtactgtttgccattattacagtcatacaagtgcatgtcaagtcacccactctctcaggcatcagtatccacctcatagctttacacattttgatggggaatattgcagcatcctcaggcctgacatctgggaaaggctcagatccacctactgctccttgctcgttgattttgttttaaaatattgtgcctggtgtcaacttttaagcaacagcactgcctaaaagcaagcagagaacagaatcccagcaccattctataggcaactttttagaattcagatatagtaaatctgttccagatttatgatgttttatgtaaaaaaaattttgtataataacatagctgaatatttttgtttcatttctttgatgtaaggcgtgtgaacattcgtttgaatatcacatgttgaagtcaggtatggcacaatgggttctgagaccagcttttcctcccctcccatttgccttgttccaagctctttcttttcaaattacttttctgatattcataggcaggtatttaattttactaattagcatcctgtgtgaatgtattaaagaagccactgtgttttagtgtagttggcaaaaatataaaagctgtttcttatttgcccctatttttttggtgtcttaaagttatatattaaatcacagagaagcaagggagaaagttgaaagatatctaaggctcatatcacttgattctatggtagattatattagaattgaggatgtggcacattaaaactggaacatgggcaaatatagtgttccattttaaaattctaagtttatattgttaaatgggtgaaaatttaagtttatatttgcatttccaagcgtttctaaaaatcactaatgccatctatacttttagtatgaaacagcagactatagaaagcacagggaagaataggctaaatacattctttgaagaaccagaggcatataaccacatcattatgtcattcctaatacatggctagattttctaatgataaaattgactgtgtcccaatgcttatttgattctaagcttttttattctgtttctgagatattttaatagctttgcaaaatatgctgaccagtttttggaaaataatggtttttatagcaagcaaagactttatggcacattttcaaaatagcactcatacatacttacattttgacagaaatgtgaattctcacattgatgagatattctttttcccacctgccctaccctttaaaaaaggtcacttttctaatgtgtagtagattcatttacgcctttccctttgagtcataccatgtttggagaactgtgtgaattgtaggtagagaaattaactagggaagccagaagcttgaactaaagttttaaatttgtaggcagatgagaacttttatactatggttgctttgggcgattctaattttgtaatagcatcatgatcaccaaaattaattcaaacattttagtacatctttaatctgtcttatttaccaaagttctaatctgtttaagaacaggatgccaagagcatctttcattttatagaatgatatgctcacctttataagtgtcacctaaaagcttgagggtaaaaaagaagcagcccatatatctaaactacaggatgtcttgaacaagattcacagaaagaaagaaaaaaaagcagttctttccaggaaggtggtaaggaagagcatgcatatttcttgttttaaccaaataccttttttatgtaaatgtctctattaaaccccaggtcctacaccaggaaatagggtgataaccaggaaaataccaagctttaacccagttggcagttccttgtggcatacatttggttagacttgggtttttcctggaaccaaaggaaaataagcatgttgagttcttcgttcaacagacatgacattgaagtaatagaatattttttaagtaaaatagttttcactttcaaagcctatgacataaggacatttgtgcttattaattgttaatttttttttatggtacattgtataaactgagtagcattgaactgcattttagaagtatgtcatcagaaacaaatcacattatggaaaggatatacaaatgccaagtgatatgactcttttggcatggtggtagcatggtccattcagctttcagaatctttcggaggctctagtttggtgcctagtactagttatttttgttagaacaatctctcaaaatttagataattttccagttgtatgtctgtcacttttaactctaaagcgtaagaatcatggtaaccctctcagaagtggtcctttcttgctcatttcagtttcgtattaacttcaaatcactgatgtattgtctttcaagctatcaattgttatatgtaccaatttaatttagtttgtagttatctgaagtcacaaaattggttcagcattgatgtcaaacaatggctttgcttcttaccaaacagacttagtatcctgctgcttgtttcaatcttgatgcagtaagtgatgcagtatctgggtctgtatttacttagaaactgtactgtcctttctctgtgcttaacttgctaaaaatatattcccttacctgtgaaattcctgagcggtgctctgccaacttttcaaggggagggatttggatggctgtgttactgcacactggatctggaattgttcagggttatgagtgacaaatttcttaaacaccagcagcactgagatgtgcactatgggcattcgtacagttgttgtccaaatgcaaacaactttttcatcttggagaagctgagatacagagttcaatagaactacttggaatattttgagaaggttgaatgtttcatctttggctttgttgtctctggagtggggaagtatggagggctttttttttttttttttttttttttttttttttttttaaagagagtgtgtatgtactttttctctctataagggccagggtgttggtcaaattcaccatcgattaatttatatcttctgttgtgatttttttcaactatataacaagtgccaactaattgtccatgggacaatctacttttccactcaatttatcgttttgagtagggaaaggttcatttattttcattacctggcattaagttaaagaattcattattttgcatacatttgagtcattctgtgacctataaagtgtttttgtaactatctaattctaatggttgcaaagcaaagcacatgactgtaaaaccaagcaaggtgttttagtaactttttccctgaatacttggtagtttccattgatactattccaaaacaaattctgctgttttaggttgtatatttactttgcttttgttctaagaaaaagccaaggactaaatcaacttgtttttgtgtttcagtaatcagtttaaaatctaagatttttttttaaattagactatttaatgaagtgccatgtaattgtagcttgctagtgtttaatgtttaatagactggttctgtaggtgttttaaccatttaacactctctgccatccctggagaaagtggttctactcttactgaacacattctctctgacaaaatcaccagctgctttatttttctatttattacagttaaacagttgatgaggtctgaatcttgaccaaaactgctcagctgagatgtttttcacaatagacactgtacaaagtgtgcgtgcaaaaggacacggttggtagtattttttcattaatgtgaacattgactaaaaaaaagcagtcctgccttttaaatcttgtggcagctcagaagggaggtgcttaagaaccttaactactatgtcagataacaaaatatttttttccattttggagattggttactgctcacacatgatgtatagggctaaatatatgcttgtttccttgcacctgtgtacttcccctctctccctccctttccttcccctgtaggcaataaatggccattttgcaactgca

SEQ ID NO: 6161 - DNA, 2690 bp, Homo Sapiens
  NM_144575
agcagacaccagcactgctctttctccaagacggccggccatgctctcctcctctgccagtctcctccaccactctctaacctgagagcctgtggaacctgcccgtctcccctcctccatcagacacacctgcctaggaaacaggaaaggacctcggaagtcttctaaggagagtcatggcgtattaccaggagccttcagtggagacctccatcatcaagttcaaagaccaggactttaccaccttgcgggatcactgcctgagcatgggccggacgtttaaggatgagacattccctgcagcagattcttccataggccagaagctgctccaggaaaaacgcctctccaatgtgatatggaagcggccacaggatctaccagggggtcctcctcacttcatcctggatgatataagcagatttgacatccaacaaggaggcgcagctgactgctggttcctggcagcactgggatccttgactcagaacccacagtacaggcagaagatcctgatggtccaaagcttttcacaccagtatgctggcattttccgtttccggttctggcaatgtggccagtgggtggaagtggtgattgatgaccgcctacctgtccagggagataaatgcctctttgtgcgtcctcgccaccaaaaccaagagttctggccctgcctgctggagaaggcctatgccaagctgctcggatcctattccgatctgcactatggcttcctcgaggatgccctggtggacctcacaggaggcgtgatcaccaacatccatctgcactcttcccctgtggacctggtgaaggcagtgaagacagcgaccaaggcaggctccctgataacctgtgccactccaagtgggccaacagatacagcacaggcgatggagaatgggctggtgagtctccatgcctacactgtgactggggctgagcagattcaataccgaaggggctgggaagaaattatctccctgtggaacccctggggctggggcgaggccgaatggagagggcgctggagtgatgggtctcaggagtgggaggaaacctgtgatccgcggaaaagccagctacataagaaacgggaagatggcgagttttggatgtcgtgtcaagatttccaacagaaattcatcgccatgtttatatgtagcgaaattccaattaccctggaccatggaaacacactccacgaaggatggtcccaaataatgtttaggaagcaagtgattctaggaaacactgcaggaggacctcggaatgatgctcaattcaacttctctgtgcaagagccaatggaaggcaccaatgttgtcgtgtgcgtcacagttgctgtcacaccatcaaatttgaaagcagaagatgcaaaatttccactcgatttccaagtgattctggctggctcacagcggttccgggagaaatttccacccgtgtttttttcctcgttcagaaacactgtccaaagctcaaataataaattccgccgcaacttcaccatgacttaccatctgagccctgggaactatgttgtggttgcacagacacggagaaaatcagcggagttcttgctccgaatcttcctgaaaatgccagacagtgacaggcacctgagcagccatttcaacctcagaatgaagggaagcccttcagaacatggctcccaacaaagcattttcaacagatatgctcagcagaggctggacattgatgccacccagcttcagggccttctcaaccaggagcttctaacaggacctccaggggacatgttctccttagatgagtgccgcagcttggtggctctgatggaactgaaagtgaatgggcggctagaccaagaggagtttgcgcgactgtggaagcgccttgttcactaccagcatgttttccagaaggttcagacaagccctggagtcctcctgagctcggacttgtggaaggccatagagaatacagacttcctcagagggatcttcatcagccgtgagctgctgcatctggtgaccctcaggtacagcgacagcgtcggcagggtcagcttccccagcctggtctgcttcctgatgcggcttgaagccatggcaaagaccttccgcaacctctctaaggatggaaaaggactctacctgacagaaatggagtggatgagcctggtcatgtacaactgaagcaaagaggaaagcagacccatggctcaggacaagctcccagtgatcactcaagaatctggctctcattctaagaggctgtgctgcccagtatggtggttgtgataaatctaaaccagccctgcatgaaacagagtccaagctgtctcccaacagcctgggttcggtccttggctggcccaggcccagttaagcctgtggccaccaagcagctcatctgagcactttgggatgtattcagcctacgttgccctggaaaaggaagcaggagatgtctccctgtgggaaaggagaagagaagttgtctctgagtcccctgtcaccagttggattcatttcttggaagagccagaatgagccactttgaccaccctcgggtgctatgggtgacacaagagctgtccactgggtgtttgcagaataattacactatcttatgtctggatcctgatgatttcacagctaaatggcaaaaataaaacatgtttcccataaaaaaaaaaa

SEQ ID NO: 6162 - DNA, 1674 bp, Homo Sapiens
  NM_144576
ccttccttcctctcccaggcccgagccatggcaacagcgtgacgtgggggtaccgagatctgcgggagcagcggtcccggcttcagttctagcctacccggcagcctggacgggagcaaggcgagaggtgctgccgcctcccgtcgcccctgcgctcagaggtcccgaaccagcccagccgctgcctcttgccgctccgcctttggagtgaggagggcgcagcccgcgtcagaacttagagggccaggcagggtcgcgcgcatggcctgggcgggctcgcggcgggtcccagctgggacgcgcgcggcagccgagcgctgctgccggctctcgctcagcccgggcgcgcaaccggccccgcccccaggccctctgccaccgccgcgaccaatgaggtttctgacctcctgcagcctcctcttgcctcgggctgcccagatcttggcggctgaggctggcttaccttcgagccgttccttcatgggatttgctgctcccttcaccaacaagcgaaaggcttactcggagcgtagaatcatggggtactcaatgcaggagatgtatgaggtggtgtccaacgtccaggagtatcgtgagtttgtgccctggtgtaagaagtctctggtggtatccagccgtaagggtcatttgaaagcccagctggaggttggctttccacctgtcatggaacgttacacctctgcagtttccatggtcaaacctcacatggtcaaggctgtttgtactgatggcaagctcttcaaccacttagagactatttggcgattcagccctggtattcctgcctatcctcgaacctgcactgtggacttttcgatttcctttgaatttcgttctctgctgcactcccagctggccaccatgttttttgatgaggttgtcaaacagaatgttgctgcctttgagcgtcgggcagccaccaagtttggtccagaaacagccatcccccgtgaactgatgttccatgaggtgcaccagacttgaggcaagggattgctccctgacctcccttctaccccacttccctacacaattctcttatttatttggtttggctcctgttccaatttgaaaggagtctgtgttcataatactgtttctcctctcaatttcccagaaattgggttctatgctggctggaaatgttgggggaaagagaaggcaaaggatgtggaaatgagatgtgcttaggaaagggtcaggcccatcgtaggagcaccatatgcctgcagccttttcactacgaattagaataaggactatgtggttgtctctggaccttatcaagacaccttagtgtctgaccaggggacgatagtaacttttctaaggattgaataaattgagcttttcttctggcacagaggtactgagtggtaagtaacttttaccctgcctgagattcctcaggagaaaaggcaacctgcctccagcctgaaatacataaagcctcattttaagactgtaagtccatgctgcctggctactagagagcaaggggctttcttaccaccagtgctgaggagaaaagtactgaacggaaacggagttgtctttgtactcttgagttgtaccttattcttccacttggcctgagtttttataaaatttcaataaattgtgacagtgtgaaaaaaaaaaaaaaaaaaaaaa

SEQ ID NO: 6163 - DNA, 4140 bp, Homo Sapiens
  NM_144579
aactacactccccacaacgccttgcgcctcccgctcgctgcggttgattagggccaatcgggagaggcagctgtggcgggggccgaggagggacattttaaaagggccggagattgcgggcgtcagtggccatggcggatacagcgactacagcatcggcggcggcggctagtgccgctagcgcctcgagcgatgcacctcctttccaactgggcaaaccccgcttccagcagacgtccttctatggccgcttcaggcacttcttggatatcatcgaccctcgcacactctttgtcactgagagacgtctcagagaggctgtgcagctgctggaggactataagcatgggaccctgcgcccgggggtcaccaatgaacagctctggagtgcacagaaaatcaagcaggctattctacatccggacaccaatgagaagatcttcatgccatttagaatgtcaggttatattccttttgggacgccaattgtagtcggtcttctcttgcccaaccagacactggcatccactgtcttctggcagtggctgaaccagagccacaatgcctgtgtcaactatgcaaaccgcaatgcgaccaagccttcacctgcatccaagttcatccagggatacctgggagctgtcatcagcgccgtctccattgctgtgggccttaatgtcctggttcagaaagccaacaagttcaccccagccacccgccttctcatccagaggtttgtgccgttccctgctgtagccagtgccaatatctgcaatgtggtcctgatgcggtacggggagctggaggaagggattgatgtcctggacagcgatggcaacctcgtgggctcctccaagatcgcagcccgacacgccctgctggagacggcgctgacgcgagtggtcctgcccatgcccatcctggtgctacccccgatcgtcatgtccatgctggagaagacggctctcctgcaggcacgcccccggctgctcctccctgtgcaaagcctcgtgtgcctggcagccttcggcctggccctgccgctggccatcagcctcttcccgcaaatgtcagagattgaaacatcccaattagagccggagatagcccaggccacgagcagccggacagtggtgtacaacaaggggttgtgagtgtggtcagcggcctggggacggagcactgtgcagccggggagctgaggggcagggccgtagactcacggctgcacctgcagggagcagcacgccaaccccagcagtcctgggccccctgggagagtgctcaacctacagtggagggagactgacccattcacattttaacataggcaagaggagttctaacacatttcgtacaaaaaaataatcaagtgcatttctgggccttatgtggggttgtcaaaactccactcagcacaattatgtgtgaagctgaaaaattgtagagtgcccatggggtagaagtagaatccttttatactttggttccttttttatttttattttttatcagaatcaaatctgagccttagtttcagctgaccagaagtggcaggaggacaggtggaggcgagccagattaggcctggagttgggctggtttggtggccaggctggtaaatttaggatattacaatggccagcccagatggctccctgggctggcatggggaggggagagaaggtggtctgcaccccacaggatgaactagccatgactagggtcctcaggcagtggcccagggaatcagggagcactggaggcctctgcaagattctgtgggcagctggctctgaatgtagccagcccacatccattccagagctgcagaaccagtccctctgagtgaagtccagtgaccctggagctagggtcccccttcgtggagctctaactgattcagggcccctgaagtgaccccagctccaggcaggaaaccccgagaaggaatggtgcttggcaggaaccatggacctgcacttggcctcttcgggaagatcctccttccaggccccaggctggatgctgggttctggggctgagagtggggctagactgggctggctgccttctgcggagcttctccagccaccaaggctgcctgccccatcccatccctttctaagcaggaaggtctcatgcctgagaatgcctaggccagctccttagacacctatcagagaagcagcatcaacctaggagcagtgggccctggctctgtcactaaatggcagtgagatgtcagacaaattcattcccttctctcagcctccactccctgtctgaaaccagaagactggatcaaggggttcccactggctcctccagcaagacctcgtctttgcttgtcctgctcagatgctggtcatcctgggcatgtccccagtgtggactctggactgggaagggggcaggcccctttggacctgcagttggcctcagcagaaggccttgccttgtgtatgtgactccatatcccgggagcagttgacctttgccaaacactttacagttctggaggaggaggtaacatagatgcctgggcctgatggtggggccatacccatgtgtcgcctctcactctggcagcctcagaggccccttgctgctggctcccatctccctcccatttgcagaccaggaaggaagagcaagctgtacaaagggaagcagagcctggggtgggtgtgagcagggtgacccctcatctgaaaggcccaaaccagggggaagcaccagcctcagtgcagccccctcctgaccccacctagaatggaagcctccacctgcagccccaggcctccctcccccggggtctccacctcaggggagacttaggccagaggtgaacattcatgtgtaggaagaggccgctgcagggtggcatcttagggtaggggaagtgtgctgaggtgggccttccatgggcatggccgttgcctctctgccagccgctggtgcccaccagctggctctgcagcacattgccctgaggggcctgccactctcctgaggagcagcccacctgctgcccgtgaggagggggagaagggttagacaagcctggaggacaaaacagcgggagtgtgggggtgccatggtgttggaggggcaggcctttttgagccaatcccaccataatgtgaatatgccagtgactgctgcgctgtgctggtctctaggcctgaactaggtgctggcatgtctgggtcgtcttttgaaaagctcacttcaagctcaccctgctcctacctatcataaggtcttattcttgtgcactttatcttgggaccaaaactgcctacccaccccttcccgccctccccctgccagaggcctggtgccctggcccagcctgtggcctcagcatctcataactcatttgctttgtctcccggatgatttccgtcatgctcccaaatgcagcttcaggtgagccaaggggtctgctcctgtggcggtgcagtggcaaaggatccagatagcctagggtgagggtgacagagggacagtgggctatgccactaggccctggtctggctttggaaagacctgtgaggggaaaccttcacccagcacccatgccccactctgctgaggccagaggaagggaggcctgaggggcagattggttcatgcctggggtggaggctaagcctggacacagtcagggcggggctggccagctgtgcgagaacacaagccacgcctgcgatggtgctgcacccctggtgtccctgcctggccctcctctggtcacttcaaacatgccctcaggcttggggatgcccttcttccattcccagacagcagtgtgagggtgcagggaccaagatgtcaagctggccgtggagtcgagctggccgacggacccctttcacctggttatgagccgacttctttggtgttctggcctctggcctgggaaaagggcaggagcctagaggaggaaaaaggctggtggacagacccagggtggtcttcaagcctggcccagtgagagtgaggcccccgcacgcaagcctcagccactcccaggggcctttgcagcgtctttttaacctcagaaaatttctcaatctatgtgatttgtgtaatactaatgagctttgggcaataaatacgggatttaaagca

SEQ ID NO: 6164 - DNA, 3381 bp, Homo Sapiens
  NM_144582
gtcgtccgcggggcggggacgcggcggcggcggcggcggtggcggctgtgtgtcgccggagccgaagcgcgcaggcccgtcccggtggccggggagcgggcgggtgggggcgccatgtggttcatgtacctgctgagctggctgtcgctcttcatccaggtggccttcatcacgctggctgtcgcggctggactctattacctggcagaactgatagaagaatacacagtggccaccagcaggatcataaaatacatgatctggttctccaccgctgtactgattggcctctacgtctttgagcgcttccccaccagcatgattggagtgggcctattcaccaacctcgtctactttggcctcctccagaccttccccttcatcatgctgacctcgcctaacttcatcctgtcgtgtggactagtggtggtgaatcattacctagcatttcagttttttgcagaagaatattatcccttctcagaggtcctggcctatttcactttctgcctgtggataattccgtttgcgttttttgtgtcactttcggccggggagaacgtcctgccctctaccatgcagccaggagatgatgtcgtctccaattatttcaccaaaggcaagcggggcaaacgcttagggatcctggttgtcttctccttcatcaaagaggccattctacccagtcgtcagaagatatactgacccccatgcaggcaggatgtggggggcaagatcaggagagtcaggcccctgggcctctatgccaggtggggaccagaagtcgggaaggcacctaccacctgccctggctttcttcccctcaactctggagccccatccccaccctccttggggggctcagcttggctcagatctgatgcttcaagaggctgtaacctcagagggcaccaaggagggtggcagagcctgcttagccaggaggccgaggtccctcagtcctcccctgtcccttccaaggtgggtcaggaggttctggccccgctggggcaggcagggcagggtctgtgaagcttaagagcagatggtgacaagttctctgggcaggtggccatggggaggggccatggcttggcatgtccaacagaaatagtttttgctgttgaacggtgatttctgtccaagtgcagatttccgtttgaataaagcttcgcttctaggtggcactgtttgccttaataccctgacagttcatcttcctttcttcctgctaaccttctgctctggactggactcacttttctgctccagggactccttttctgggtttgggtcttgcccttcccaagggactgttcttgtggcccttaatgggaagggggcaggggtgaggagctgagcctgctcaaggagtgggaagtggggctataggcagcctctctgatgcactctcttccatctctttccccaaggctccgtgactgtcaaactgggagtaggagaggggacaatttaggactgggctagattttcagaagaacatctacaatatcctatttataaatcttcctctgggaaaaggagtggtttctggctgaatactatcttaggctcaaggagaaacaaaataaaaattagcttccaggcagcctgtttttaaagaaatgggactaatgggagaagctgtttgtcactctaagagcatccaagccctggcccgtctgtgcactcttggctcctggggagatatatctgccttctaagaaggcaggccaggtcttgggcacagacctgcatttgttgaccttgcactccaactatagtgccttgcaagtgctcaacagtacatattggaatgaagtccctatgagagccatttctggccatgttctatacctcaaagtgaggctggcaggtacagagatgaactgtacacatgtgatacatttaagccactggaaaaacccctgtgcttgaaaatatttcctctatatcatgcctggagttccatcatagcccttcatttccttggctttagcatttaccttctcttaagaataccagctttcccctttccctgagaggaagagcacatgttggtctcctcttagtgtgaacgagattgccaggcccttttctcctatgcacaccaggatagacaaggcaggggatactggcagcctgcatcatcctcccattgggctgacagctggccctactttcctccctctgctgcttggtccctcaccttgatgatgtggcttcgccccctccactctactgccagtgttctcccagggcttgctaaatccagcagacccctttcctgtcttactagatctgggcagcatttgacatggctgatcaccccttgcttcttggatggcacttccctggcacctctgtggctagttgtcctacctccctggctgttcctttcaggcttccgtgcaggcttctccacttgcccatgcacagtagggtctttcagggttctgctgtgggctccctagggaagcccatccatctggatggtttcaaggatggtgaggaatttagagttgacctccagccccaacatccttcctgatcacctgaaccacagttttgctgccctctaggtgcacagacaattcaggtccatggcccagatggtacttgctgtcttctgcaaacctgccccttctgggtacttcccttgaccccgagatcactcaggagccagacaggaaacttattctattcctgttttctctttctgcccaccacatccaatctctcaaaacggtcaggtctaccttaacatctcttgatttgagccactcccactgtcatcagctttcacctggattatcgtgacagcctcctactgcttctctatcatgtggccagagctatcttcctaaaatgcattgcatagttgatcaagtcactctctggcctaaaaccttccttggctccctgctgccctcaggataaagtctggacccctcagcatggcttgtgagactcatggtgtccttgtccctgctcacctctctggtctcatcacttgccttcttgcattctgggtcccagcctcctgtatccagagatgcagtggctctccattgccactctgattcctcctttcttttggtcacagagaaagggtactttctctgtcaaatctcaacttagacttgacttcctccaaggagctttggctatactctctcctcccgacccccaccctggcatactacacagatcactctgggctcacttgcctgcctaatggtcatctccccagtagactgtaagctccttgagggcaaggattgtgttggaatttttgtattaacagtgcctggcttggtgcctggcacctagaaagcactcaataaatgtttgtttaatgaatgaaaaaaaaaaaaaaaa

SEQ ID NO: 6165 - DNA, 1848 bp, Homo Sapiens
  NM_144587
aggaaaccaaggcaagctccccctgtcaaagcaccttggcccataagaagaaaagggggagccccagatgtgatgagcgcttccaggcttcaggctcagaaggcgcccccagctctcctgtaactcagaggccagtgtgatgggagttcctccactcagcacacttcccctgtaaacacgcctgtggtgggcaaaagggctttggaacggttgcttgtcttttctctcctgcgtaatttccactttcattcatgataatgtcgaacacgcacaaagctcggctggaacgccgggtcactggctcaaccaaccggtggcgtttgcccaaacagcctttctctggggacctgctctcactttcccagatgtgcaaggctctgagcatagactttgaggaagctttgaggaacccagacaggttatgcatttcacaaatccagaagtttttctttgagaatttcaagaacaaggacatccaaagtggggaagcagatgtgattctcgagtgcctgggcttcaaatgggagctccatcagccccagctttttcagtctgagaccttggccaagctctacctgaaagccctggcgcagggcaccacacaccccctgagggagctggaggagcttctgcgagctcaatcacctaagaagaccaaagaaaaatcccctgcaaagaggatcatcatttccttgaagatcaatgacccactggtcactaaagtcgccttcgccacggccctgaagaacctctacatgagtgaggtggagattaacttggaagacctactgggagtgctggcttccgcccacatcctccagttcagtggcctgtttcaaaggtgcgtggatgtgatgatagccagactcaagccaagcaccatcaagaaattctacgaggccggctgcaagtacaaggaagagcagctcaccaccggctgcgagaagtggctggaaatgaacttggttcctctaggggggacgcagatccacctccacaaaatcccacaggacctgctccacaaagtgctgaagtcccccaggttatttacctttagtgaattccatcttctgaaaacaatgcttttgtgggtcttcttgcaactgaactacaagattcaggcaattccgacttatgaaaccgtgatgacattttttaagagctttcctgagaactgttgctttctggaccgggacataggacggagcttgaggccgctcttcctctgcttgcgtctgcacggcatcaccaaaggcaaggatctggaggtgctgcggcaccttaacttcttcccagagtcatggctcgaccaggttacagtcaaccattaccacgcactggagaatgggggcgacatggtccacctgaaagatcttaacacccaggctgtgagatttgggctgctctttaaccaggagaatacaacttattcgaaaacgattgctctatatggattcttctttaagataaagggactcaaacatgatactacctcttatagtttttacatgcagagaataaagcacacagacctggaatctccctctgcggtctacgagcacaaccacgtcagcctgcgagcggcacgcctggtgaagtatgagatcagagcagaggccctggttgacggcaagtggcaggagttcaggacaaaccagatcaagcagaagtttgggttgaccacgtcatcctgcaaaagccataccttgaaaatccaaactgtgggcatcccaatctatgtaagttttgcattcatcttcccagcatcttgacagtttccagaagaatctatgggattttccccccactggtctgcataaaagaaaataaaatgacataaaagggagc

SEQ ID NO: 6166 - DNA, 3059 bp, Homo Sapiens
  NM_144588
gcagagcgattcgcgtcccggaagcggcggtggcggccgcggcgtaggcggaggagattttcggacctgcgacttccgaacaaccctggcaggaggagcggcgttcagccgggggaggcctgaagaaacgctccggggcccagtggctctacccctgctcctgcccgaccctgccgcctccctcacggagccagcggccgggtaggatgcagacatcagaacgtgaggggagtgggccggagctgagccccagcgtgatgcccgaggctcccctggagtctccaccttttcctaccaagtccccagcgtttgaccttttcaacttggttctctcctacaagaggctggagatctacctggaacccttgaaggatgcaggtgatggtgttcgatacttgctcaggtggcagatgcctttgtgttccttgctgacctgcctgggcctcaacgtcttgttcctcactttgaatgagggtgcatggtactcagtaggtgccctgatgatttcagtgcccgccctgctgggctaccttcaggaggtttgccgggcacggctgcctgattccgagctgatgcggaggaagtatcatagcgtgaggcaggaggacctgcagagaggtcgcctgtctcgtcccgaggccgtggctgaggtgaagagcttcttgatccagctggaggccttcctgagccgcctgtgctgcacatgtgaagccgcctaccgcgtgctgcactgggagaaccccgtcgtgtcctcacagttctatggggctcttctgggcacagtctgcatgctgtatttgctgccactctgctgggttctcacccttttaaacagcacgctctttctggggaatgtggagttcttccgagttgtgtctgagtacagggcatctctgcagcagaggatgaacccaaagcaggaagagcatgcctttgagagtcctccaccaccagatgttggggggaaggatggtctgatggacagcacgcctgccctcacacccacggaggacctcacaccgggcagcgtggaggaggctgaggaggctgagccagatgaagagtttaaagatgcgattgaggagacccacttggtggtgctggaggatgatgagggcgccccgtgcccagcagaggatgagctggccctgcaggacaacgggttcctgagcaagaatgaggtgctgcgcagcaaggtgtctcggctcacggagcggctccgcaagcgctaccccaccaacaacttcgggaactgcacgggctgctcggccaccttctcagtgctgaagaagaggcggagctgcagtaattgtggaaacagcttctgctctcgatgctgctccttcaaggtgcccaagtcctccatgggggccacagcccctgaagcccagagggagactgtgtttgtgtgtgcctcgtgtaaccagaccttgagcaagtgagaagagaggccagggtccaaccaggcacccgtccttgggaccagcagtagaccccccactctccccacccctggcccactgtggtgtgtgctgggcaaatgtggcctgaatgctaggtaggcttccccttccttcctcactctctccagctggattctggagctgttctccatccatgagagtggctggcaatggctgctctcaatcccttgagggagaagagcccctggagggcctggcatgtttgtcctgctctgcctgggactgagcgagtggacttagggctgggcaggcagtagccaccagagggcagcagcgaactaggccaggcctgactggggtctgaagatcagggtcagtgtggctgtgcctgggaattccagacctgaggttgggaaaagaggtttttctcctgcagggtactgggccaggccctcagcctcagagagcctgcagaagggcttgggagtgccacaccccatctctgctgattgaatgtccctccaggcaccaggatctcatcatttccccatcagagggtgtggccaggcctaacaagaccatgggtgcttctagaaacagggttgaagttcccagattccctgagaggagaatgtgtataggagggtttggctgagtccttcagcgttaagtggaggaaagcttggggaagccccaatagctggacagacctcggcctcccctcgaagacacctcaattcacagactctcagcccacacaatgccccagtgtccccagctccgctggagcagctgcagggcacttggatcacaacttctgcaccctctgtccagagtctagggcagtcctccactggcccagcactccagtttcctttccctgcctcttgtccaatggagtgggaggccaggtgagtggagcagaggtcctgaagcccttgacccctgggggcctgggtagtgtaggatctcgctgggctgggtcctggattccagggctattccctggaggacagtctcagttatgggataaggccccctgggggtctccatttctttccaacagtttcatgttcactactggactcttacgggctcagtatctctcccttagccatgagctggctcaggcatcccttcccttccctggagctgccctgcctttctcaagtatttatttatttattgcatggttcctgggaacatgtggcacaagtaatgggatgaggaggaattgggggtgggggtcttctacctaggactcttccctggagtcatgggctgcctgggacccaggacccatgagggggctgagaggtttctacactcgaggagcaggggtccagagaggcaggctggggaggcaagggacccatcctaggcccgctttcttgccgagccaagcagcttagctggggctgtgcagccaggggcttacccaggccagtggaggtgccacagccctggggagccagacaggctttggtatcgtatcgcctctgtgtccttttaagagaggagagttcagtaccccgtgctttctttacactggagaggaactaaaaggatctctgtgtctatggagaattgtcaataaaaaggcctcaagcttcttgtttttgtcaaaaaaaaaaa

SEQ ID NO: 6167 - DNA, 3993 bp, Homo Sapiens
  NM_144590
aatgtaagaacttttcttcctcccttaactttgcttccttctttcctgcatgttaccactggcagagcaaatatgactcagaaaccggctcctcagggttgtaacattagatgatacaggcttgggtcgttacacatgacaccagtgcctttgtttcattgggctgggctctctggaaggtgtgctgctgcctgagctgctggaaaagcactgacaggtgtttgctagaaaagcactcctggagcttgccaccagcttggacttctagggactttcctctcagccaggaaggattttgatattcatcagaaatacctccagaagattcaaggagctgtagaggtgaagtaagcctgtgaaggaccagcatgggaatcctatactctgagcccatctgccaagcagcctatcagaatgactttggacaagtgtggcggtgggtgaaagaagacagcagctatgccaacgttcaagatggctttaatggagacacgcccctgatctgtgcttgcaggcgagggcatgtgagaatcgtttccttccttttaagaagaaatgctaatgtcaacctcaaaaaccagaaagagagaacctgcttgcattatgctgtgaagaaaaaatttaccttcattgattatctactaattatcctcttaatgcctgttctgcttattgggtatttcctcatggtatcaaagacaaagcagaatgaggctcttgtacgaatgctacttgatgctggcgtcgaagttaatgctacagattgttatggctgtaccgcattacattatgcctgtgaaatgaaaaaccagtctcttatccctctgctcttggaagcccgtgcagaccccacaataaagaataagcatggtgagagctcactggatattgcacggagattaaaattttcccagattgaattaatgctaaggaaagcattgtaatccttgtgaccacaccgatggagatacagaaaaagttaacgactggattctatcttcattttagacttttggtctgtgggccatttaacctggatgccaccattttatggggataatgatgcttaccatggttaatgttttggaagagctttttatttatagcattgtttactcagtcaagttcaccatggccgtaatccttctaagggaaacactaaagttgttgtagtctccacttcagtcagaaactgatgtttcagctaggcacagtggtacatgcctgtaatcccagctacttgggaggctgaggtgggaggatcacttgaactcaggagtttgagagcagccagggcaacacagcgagaccctgtctcaaaaaaaaaaaaaaaaaaaaaagccctggtgttccaaactcagtctttcctgaagaagaggatctgagttatcttctgaaacagcgttctcccttcccagttgtatcactcttataaaaagactgtccagtctatgtcatgccctaggagacaaactgttcctcccagccccctttgagtattgagcagaagaatcaaattattaaatacgtatgtttgtacagaatggtatttgtgtatgtgtgtgggcttagagattcacaagtaaatattcctttggtgaaggaatttcaataaaaacatctatcaagtgtcagcggtgagtgtgtttacaccacagaaattggcaaattgacaaatcagagtttgtttttgtttttttgttttttactttccataaagttcgtttaccagcataccactagagatttcggtttacaaataaaagccatcttggtttgagcaagactatgcaactatgaaaatgttcgtttaaaaaaatcttcatgatccttttgtaaatacaaggtggttgccaagcttgttagttttgtttattttattgatagatgtaaaatattattgtaacttatttggataaagttcttcaaaagaaacagagctatacaatgaggtaggatctggattatttgtctaagtgagagattgcgaatatcaaaatatctgtctcacttcttctgtgaatgacacagagtagaaataaattcactttaaaaatatgactgaattttgaaaatcaagactgaatctcacatagctgcagacaggaactaagccagcctctttgtatgtggtaacaagtacagtataagaatgaaagatttaccatccttgaaagctctaatgaaaatcaaatccagcaatatatattcaactgtgtacaggatttaagaaacttattttatgaaggaagtaatagtgtgtagatatagattctgaagtctttaaacgtgtcttaataaattaagattcactggcattgagctgagctaccaggtgacccttggggacaaaaaacccacacaagtgaatttcacacaccagtataccttcaacaatatacttttgacacacacaaacctttgatttggtttcagagattttgcaaaatagtaccaatgtaatttacaactgtcatctttgaaattgtgtaaaagtggaataattttctgaagaaataaatcatggtttgtcaatgagttgcagagactgtctgacattaactttgtcaagattaaaggataaagtatatgacaatttgtttcatcatgctcatgacattatgcaattttctccctagcttttaatttttggaggcagaaaattgagccagaaatttttagtcattaggtctcctagcaacaagctgtaaaccttccaacaagcttggactagaatctagacactgaaatgcacatacatgctttatgtaatgcagaatgcatttattggagaactcataaacatcctataaaattttcttccctgagatgcaactataaaacttggccttattctgagaatgcttaacatagatttcatccatactgtaacactgattttgttgttgttgtccttaaagcagctcagcttcctgaggtagtgttatgtctctgtggcaacaaggtgaaaatgtctagcttattttgtcaaagtcaacaataatccacagactccagacctcaatatctgtcccaatttgccattttactttagtgctccaaaaatatggcttatagaaaaaacaataggtgttttaaagagatttacctgaatgatatagagaatgtctagatattttctggctatcaggtaaaacctacccttcaagatggtagaatatataatagcatacaaaacctctatttacctaataagtactttaatttacagaaaaaaaatgtaaatgtaagtgtcggatttagtgccaagtgcagggaatctgaaaaatgtatactaggtctctgctctccgtaattctgccttcatgggtcctagccccatccctcaggaggttgtcctaagatcgtcagtgtcagatgcttcacaatacggcctcacaccgtccctgggaaaggttggtctcctcctgctgcatcagatggatgatttcattgtacatacggtgaggagcatccaaaccccagatgaaatccacgtgagcccattcaggaatattcttatggtagatgaggttggtcacctcagagagcagcattttcacgtcttctggatttgaaagccagtcctgacctcctgtccacattgctgtagggaccgtcatatctctgactctgtaccttacaggagttggctagagaaaaggaatagttcttaactctaggtaacatttggactttcaggctcataatttatgtttcaaatagacataataaacatgccatctgttgtggtgaagggtacatgggtgttagagccacacaactctgttaagaatttctgttcccgcccttactttaaggtaaaattacttaacattattgaacctcagtttcttcttctgtgactggggataatatctgtaataacttgctagatcaaatgacaaaacacataaaaacatgtaatgccttgtatttcttttttcttcctattaaatattttgtaaataaattgtttttaaaaaaaaaaaa

SEQ ID NO: 6168 - DNA, 2310 bp, Homo Sapiens
  NM_144595
gtaatttgcctggcaagtgatcagactggtataaaataacatcatctgttaggcaagatagcagtcacaaagaactattggtcttttaaaatatagaatttttaatgagaaactttgaataatagagattgaacatgtgagaacagctacctagtgtgtgttgcattattaacccctagtttgtagtgtattctggagtcaagttgacctacatagaagagaaggaactggaagtgcatgtctgtgttctggctccgattgggaaaagctgcttaaccactgttacacttccaggggctccccactcagtccccagtcatctatcgacagtgagctgagtacttcagaattggaggatgattctatctccatgggatataaattacaggacctcactgatgttcagatcatggctcgtctgcaagaagaaagtctcaggcaagattatgcttctacttcagcatctgtatcaagacatagttccagtgtgtcattgagttcaggaaaaaaagggacatgtagtgatcaagaatatgaccaatacagtctggaggatgaagaggaatttgatcatttgccaccacctcagcctcgtcttccaagatgttcccctttccaaagaggaattccccattcacagactttctccagcattcgggagtgtaggaggagccccagttcccagtattttccttcaaataattaccagcagcaacagtattattcacctcaagcccaaactccagatcagcaaccaaataggaccaatggagataagctccgaagaagtatgcctaacctagcccggatgccaagtacaactgccattagtagcaacattagttctccggtcaccgtgcgaaatagtcagagttttgactcaagcttgcatggagctggaaatggaatttcaagaatacaatcttgtattccatcaccgggacagcttcaacacagggtccacagcgtggggcatttcccagtgtctatccgacagcctcttaaagccacagcctatgtgagtccaaccgttcaaggcagcagtaacatgcctttatcaaacggcttacagctgtattccaacacaggaatccccacaccgaacaaagctgcagcttctgggataatgggtcgcagtgcactcccaagaccttcgttggcaataaatgggagtaacctgcctcgaagcaaaattgcacaacctgttagaagttttcttcagcctccaaagcctctgtcttcactcagcactctgagggatggaaattggagagatggttgctactaatgcagttttatgtacccttgaaaaatgggaaagaagtaaaaatgagggttgtgttacctagctggctgggtagcagtggatgttgggatattctttcccttttgtgttttaatatatttactgcattgtttctcaatggaccagtcaccagagactaattattgcacttaaatatttgcctgagatactgcaacattctcaaacccatggttgcagtattgtgacacttagatctaggaagtttttgtagaactgctctgtacctgaatactttttgagagaattaagatgtatcaataatgctttgccatatgagttttttaaagtaacttgttcaatttactcacgtgttctaaacatctttccattacatgttctgtattttaatacattgcatattgacaactaggttctataatgtatgctttgaaatttacttttttatagtttacaggaattttattttttgtgcctatttctttttacacctatgtgaaccactatggaacaacttaaattttgtgccataaaaatatttttgtggtaaggtactatttttttagctctagggatatatcagcaaaaacacatcatgcaatttgagacacataattttgtgttgaatgagcacaacataatttgaagcattgcaaggagataaccagacagcagaattaaatggtcctgtctttttcatttttaatttattgtcatacatgggtttcatatttataacggcatcatgagctcattgcacttaatacctgcaatgtttgctactgtaccacaattgattttcaatactttattacgaaggatgaaactgtaatgttttattaacaatgcttctggaaatgaatgcattttaaagcaaataaatctttttgatagaccttttacaaaatccatttgcactaatgaatgctttcttatggcatataacttaatatttgttactgtgtacactgctgttttggaatgttcagaaataaagactctatttcagcaatatcaggtcatgc

SEQ ID NO: 6169 - DNA, 2248 bp, Homo Sapiens
  NM_144596
gacgccgccagctcttcactccacgcccacctctctcctggagcgctgggccttcgctggccgcaccggcagccatgagctcggagatggagccgctgctcctggcctggagctattttaggcgcaggaagttccagctctgcgccgatctatgcacgcagatgctggagaagtccccttatgaccaggaaccagatcctgaattgccagtgcatcaggcagcttggatcttaaaagcaagagcgctaacagaaatggtatacatagatgaaattgatgtagatcaggaaggaattgcagaaatgatgctggatgaaaatgctatagctcaagttccacgccctggaacgtctttgaaactccctggaactaatcagacaggagggcctagccaggccgttaggccaatcacacaagctggaagacccattacaggtttcctcaggcccagcacgcagagtggaaggccaggcactatggaacaggctatcagaacacccagaaccgcctacacagcccgccctatcaccagctcctccggaagatttgtcaggctgggaacggcttccatgcttacaagtcctgatggaccatttataaatttatctaggctgaatttaacaaagtattcccagaaacctaagttggcaaaggctttgtttgagtatatctttcatcatgaaaatgatgttaagactgctttggatctggctgccctctccacagaacattctcagtacaaggactggtggtggaaagtacagattggaaaatgttactacaggttgggaatgtatcgtgaagcagaaaaacagtttaaatcagccctgaagcagcaggaaatggtagatacatttctgtacttggcaaaagtttatgtctcattggatcaacctgtgactgctttaaatcttttcaaacaaggcttagataagtttccaggagaagtaaccctgctctgtggaattgcaagaatctatgaggaaatgaacaatatgtcatcagcagcagaatattacaaagaagttttgaaacaagacaatactcatgtggaagccatcgcatgcattggaagcaaccacttctattctgatcagccagaaatagctctccggttttacaggcggctgctgcagatgggcatttataacggccagctttttaacaatctggggctgtgttgcttctatgcccagcagtatgatatgactctgacctcatttgaacgtgccctttctttggctgaaaatgaagaagaggcagctgatgtctggtacaacttgggacatgtagctgtgggaataggagatacaaatttggcccatcagtgcttcaggctggctctggtcaacaacaacaaccacgccgaggcctacaacaacctggctgtgctggagatgcggaagggccacgttgaacaggcaagggcactattacaaactgcatcatcattagcaccccatatgtatgaaccgcattttaattttgcaacaatctctgataagattggagatctgcagagaagctatgttgctgcgcagaagtctgaagcagcatttccagaccatgtggacacacaacatttaattaaacaattaaggcagcattttgctatgctctgattgttccttagaccacatatgttcttatgaagcagcattatgcaaggggaaaaaagcactatgtctgtgtatgtatgtatatagtgtaatacgtatattttaacaaacctgtccttgatattagttaaggtgacacataagggtgacacagaatgtgtaatgcaaatttcatagtaatagtaactttataaaataatattataaaatacaggatttaaacctttctaaatagatcctgaaactgtctctcacattatatagtagatgtttgtttataatgtttacaaaacattttggtgaatttcctcaatgttttataaatgtacattttttaagtccttaagctgactcttagccatcatgtagcttaaggagtctgaaatctgccattaaaactgcacctttaagccaggtgtggtagcatgtgcctatagtcccagctacttgggaggtggaggtgggaggattataaatagagactttccttaagactttaaaaatgtatttaaaactattttttattaaatactttgtgatttcctattaagctttaaaataaatcattgtgtaaaacaccatcaaaaaaaaaaaaaaaaaaaaaaaaaaaaaaaaaaaaaaaaaaaaaa

SEQ ID NO: 6170 - DNA, 1700 bp, Homo Sapiens
  NM_144597
gcagagggctcttccggcgccttcccaggcggggatgctgcggctccgcagcgggctgaggcaccttcgggcaacacccaatactcggggctccgctcggcttctttgcgccgagatgcctaagaaggctggtgcgacgaccaagggtaaaagccagagcaaggaaccagagagaccacttcctcccttaggtcctgtggcagttgatcctaaaggatgcgtcaccatagccatccatgcaaaacctggctccaaacaaaatgctgtaacagatttgacagcagaggctgtaaatgtagctattgcagcacctccatcagagggagaggctaatgctgagctctgtcggtatctttccaaggtcctagaactcaggaagagtgatgtggttttggataagggtggtaaatctcgtgaaaaggtggtgaagcttttggcttctacaactccagaagagatcttggagaaattaaaaaaggaagccaaaaaaacataaaagcaagaaatgaggccgggcgcagtggctcatgcctgtaatcccagcactttgggaggccgtggtgggcggatcacctgaggtcaggagttcgagaccagcctgaccaacatggtgaaaccccatctctacgaaaaatacaaaattagccagatgtgatggcgcatgcctgtaatcccagttactcaggaggctgaggcaggagaatcacttgaacctggggggcggaggttgcagtaagccgagatcgcgccgttgcactccagcctgggcaacaagagtgaaactctctccccccgaaaaaaaagaaataaaaaatacatccttgagaaacttttttattgctaatggtgaagaggctgttaaatagaaaaatatactacatgcacagaagaacatgggggacatatatatatgtatatattcgaataagactccaaaaagtagaaatttaaaaagtgctatacattgcatcaggttctaaaatcccaaaccccaaacagcctggaacatgttactctgatttcatggcgttgtaaaataacagagctgggaagaatattcaagatgacctgatttaacacctttcattctgttggggggcctttgatttcctatatccagaagttgagagacttactcaagattgtaccatgcaagctggcaactagaacccaaatccttggactacttgttgaatgcagtttttctagattgtaaattaaaaatcatatctccacaacggttctggaattctggggattgccttctaatccagtttacaagtgacagaaaacctgttatgctgctttgtagtcttaccttagatttttaaatgcttatttaaatgtaaaaaaaattttttttttacatcttttaaagactatatttaccattttgttgaaaaagtaaagaaaaatcatgacttgtaattaaatgtgaattataatttttgagaagtcactgaattttcatcttcctctaataacttaaataatcagcaaattcagtagtttttatgaatctccaaagatccttaaaagaagaaagaggacttggaagctattttcagtatttgtaaaagcttgtcagaaattacatctatattaaagtttcaaaagctaataatatatttttacatcttcaggtcaagttatagtaatttattaaagaaaataaaattaatttcctttgctgatcagga

SEQ ID NO: 6171 - DNA, 6565 bp, Homo Sapiens
  NM_144599
ggctcggagggcgggcgcgggcggaatggggactgcagctgcggcagcggcggcggcggcggcggcggcggccggggagggggcgcgtagcccgagccccgccgccgtgtcgctcggcctgggcgtggccgtcgtgtcgagcctggtgaacgggtccacgttcgtgctacagaagaagggcatcgtgcgtgccaagcggcgaggtacttcctatttaacagacattgtgtggtgggctggcacaatcgcaatggctgttggccagattggaaacttcctggcttacacggcggtccccacggtcctggtaacccccctgggcgcccttggagtaccgttcgggtccattttagcttcctatctcctgaaggaaaagctcaacatcttgggcaagttggggtgcctgctaagctgtgcaggctccgtcgtgctgattatccactccccaaagtctgagagtgtgacaactcaggctgagctggaggaaaagctgaccaatccagtgtttgtgggctacctgtgcatcgtgctgctcatgctgctgctgctcatcttctggatcgcgccggcccatgggcccaccaacatcatggtctacatcagcatctgctccttgctgggcagtttcaccgtgccttccaccaagggcatcgggctggcggcccaagacatcttgcataacaacccgtccagtcagagagccctctgcctgtgcctggtactcctggccgtgctcggctgcagcatcatcgtccagttcaggtacatcaacaaggcgctggagtgcttcgactcctcggtgttcggggccatctactacgtcgtgtttaccacgctggtcctgctggcctcagccatcctcttccgggagtggagcaacgtgggcctggtggacttcttggggatggcctgtggattcacgaccgtctccgtggggattgtccttatacaggtgttcaaagagttcaatttcaaccttggggagatgaacaaatctaatatgaaaacagactagattgcaataggagcttggatggttcgaggaataggcattggaggtggtttctggccgtgattggatgtgaagtagaagaggtcctcgatcatggtgttagaattgactggatagtaacaggtggtctggtggatagcggggagcatggctcagcaccagagcagaggcccagccagccctctgcagcccaaacgtccccaacggttgcctggcaccatctctctctgatgagacgaatctcattttcatttccattaacctggaagctttcatgaatattctcttcttttaaaacattttaacattatttaaacagaaaaagatgggctctttctggttagttgttacatgatagcagagatatttttacttagattactttgggaatgagagattgttgtcttgaactctggcactgtacagtgaatgtgtctgtagttgtgttagtttgcattaagcatgtataacattcaagtatgtcatccaaataagaggcatatacattgaattgtttttaatcctctgacaagttgactcttcgacccccacccccacccaagacattttaatagtaaatagagagagagagaagagttaatgaacatgaggtagtgttccactggcaggatgacttttcaatagctcaaatcaatttcagtgcctttatcacttgaattattaacttaatttgactcttaatgtgtatatgttcttagattagaataatgcaacttcgagtatgctttaatatttcaatattcaagttacaaatgtataaggcagttagaaataatacagtcacatgtcacttaatgatagggaaacattctgagaaatgcattgtaaggtgactttattgtgtgaacatcatggagtgcacttatacaaacctagatgggacacctatgacccacccaggccagatggtacagcctgttgctcctgggccacacacctgtacagcatgtgaccgcactgaataccgcaggcaattgtaacacagtggtgagtatttgtgtttacaaacataggaaaggtacagtaaaactatggtattacaatgttatgggaccaccgtcatgtaagtggtatgtctttgacagaaacatggttacgtggttcatgactgtatattcactggaagatagtcaagactaaagacacattagagcaaattgacccctttaacatgtgattattgtccaattaaagacagttgatttaagtagcatgaggtattattttatttgtattcgatctgtgttacctgggatccagtatcaaatatatccacattctttatcagcaagcattcatggccattcagaagaaataaattaggtaacttgataataaggctaagtgggagagtacctgttcaatagctcatatatcgagtaccctgtcatacaggaacaagttaaaggacacaattgaggttaggctagcttctacaaattgcaatatgcagtttttgaaagattttctaacaaaaagccaataaatgtagccatctccttgttgtttgcaatggcagagcatcctagagttcctcagctaacctctcattatgtgtcttaaatgcaaaagagccattaattatgccagtatttgaatcaaagaggtcattctctgtctatagtgttcccatccatgtgttccaaatgggagcatagcatgaagtgatgcacatatttcaccacggtatcatgtacttcatggccagtgttttatctcagcagggaactacgccaagttgaaagatggggttgggtaaagtagattaggtgaagtagaacataaaattgaatagtacccaattaaagttcctcagtaagaaaaaaaatgtgtttttgtaggcaaaaagaacatttctaaagtctcaaggaatagcttcctaaagtgttgagtaaagaggctaaataaaatgagactagtttaatatagagagaaaaatacctttatggagtaaacgtgtacatgatgatcatgggttgtcagtgatttgtgaactgagagcagcaacaacattattttttaaaaatcttaaatcctctcaatggatggttaacaaatgctcaaagtccattactctttttattggctcttgcaggttttgtgttttatcatcagtgcttttagaaatgcaggccttaacttactgaactgaactttctgaaaacgtaatgtagcagtatcaatatacttttgggcataaaaatagtttcctaggtaaggggtgtgagatattcaaagaatacatgtggctaacaagtgtaatgagaaagttcatgtgtcacatgaaaatgatcatgtttgtgttgctacagcttttgtgggaaatttagtttaaaggcagctcttggtgtaccttagtatattttaatccacaattataccattgatactgagaggtgatacccgatgatcttctctataatattcttagagtaaaacaaaatctcaaaagtattaatagctcttctacccttgaaggtgactggtcctgggacagttagaatctttcaggtttacctctgttcagcagatacttcagtaggatacatagcttttcttccagtgaaacaaagttcatatcatccattgtttttcaagcacgtgacaccagcctcaaagtaaatgacatgaccagtggttgaacagtctaattttcaaatttaatatagagcatataacttctgatttgatagtatttattttaaaaaattatgttttcatcattcatttgaaaatgaaaaagccccaaagtgagaactttgggggagggcctagaacatggatagatctcttagtggtctttccaaaagtacatgtacttgaaatattttcattatcatactattctttgaaaaaaaagatgcttactgtatacttgttttcaagcatcctctaaaatcaaaggttttgatcacaatatgcagatttctcttgatagatacttaaataggctatttctctcctcttcttgggcaatgccttgttttctcctctgaatatttgcatttgaaaggattgcttcctgttctgctcattgatcaaaggtagggccaattaaggattctaaccctaacccagcaccacaaagcccccctggagcatcttcccggctggcaggaccatgccatctctgtggagaaggtgctggggagggaagtccttccagtgccacatggagtgaggccctgcccatgctggggactttggggaggaatttggtattctggtggccttgctcagctctcattgagatcttttcctatcagaatgttagtgaatatacttcgcagctctttgttcagcaataaggaatattctttcaattcctgctcttcaagccaatttactacacccagttgtctttccagaagttcatcccagcggtaatatgttggtgtttgttcttctttggatttcacatctgttttctggtagaagtgagcactgttcacttgtgcagtcgtcttattttccttcttcctagatgactcagctctttgtaaatgttgtgctcaacttctaggggccagttctagactttggagatgcagtgtctcccaggtgtgcacggacacctggtccgtggaaacaggtgtgatgggcacaggctgctgcccttctgtctggtcgggggattcctcttcttcaagctgctcagctaacccagaagaggggagagagtactccggtggttcccagagcccctcccgttgtgccgcttcgacctgacacctgctcgatgctgacttaggcttcctgccaccaagcaggaaactagaaagagaacatttcagtgtaaggtctgttcccgacagcatggattagcttccgtgttctgaagttgttcttttcatggtgtctgacaccgagggcgttgttcgtccatcaggcgggattggatggagtcttggtgttttgccttctcagggaccaaaaatgtatcattgactccttaacagtgaccttcctcccaaggacatatccgtgttcatttttcataggttttactcatattcataggtagattctgttaatgtgagttggaaagaaaagaccaatttgtacaccagtcacaccacaagacagtttatcatataaaatacctcaattttttgtattcctcatttccacctcacaattgtactggtgatgaattttaagggtctgtcctttagcttataggtgatgtttcacatctggccagattcttatacctccattgtatacttgaaaaggttcagaattacaggaacagcagtgagaatttggcccactaccacgactcatttgtttcattcacattcctcacgtgcaacaacataattatattttaagaaaatgtaactttgttacatcaaaatatgttgtctagtaaaaagttgatattcagtagaacaaggatcatgtaaataaacatctatttcacatgtacccaaaagcatttaaaaagcagaatccagggcccagagcatgagccagggaggaggatgtttttcttcttttctctatttttccctaaattgtgcaaacataggtgagtctcttaacctttctgtgcctcagtttttctacctctaaaggggtgggatggttcttcaaattgtttctaaaacaccggcactttcagcagtgttctggtggcctgagatgagagcaccgtgttcagaagtgcctgggagtggcacagtggaaactccgcttgcacggaccatggagtctgctcaggaccatgctgtaggacacacagcctcatgcgctgagaaagcaaaggaagtgctgggtgtaaagtttgcatgattccatgaagctttagttttcctttttttgttttaaaagaaagggttttatatgttctattgtaaaatatggaaattaaacagggacttcagaaagccgcacagaaagatcaccttccgatggtgtgatgtgctcctgacattcggccgaggtctgtattctgaaaaagatttaatggcctgtgaaacacgtggattctgttgcactggatttgtaataaatgacgctgaacttcctgcttccaagcagctcaaccctgatgctgaactgacaccaggcgaatgtcagggctcccaaaccactagtgccaaagggtcatgttgaaaagttcagaatatttatttgtcagaatataataattgccccccaccttagtatttttgcactttacagaaatttagatactgtttttcagtggcttgagcgttttgccttttcaaaggataactattattttcttgaaaatggaatataatcatgagaggaagaagatgtaaaaaatgtcaaatgttgattggttgtgtaaaagttttgtcatagacatgtattggggagcttccaattagcatacatagacacatgtgtcagtggccaagacctgcttatattttgctttatagatgtagtcatagcatgttgttattgcctcatgtaaataaaaaggctattaagttttccagtaatatttattaatctgtatgtgttttaaaataaaataacttatttctagctgaa

SEQ ID NO: 6172 - DNA, 1330 bp, Homo Sapiens
  NM_144608
ggtttttcgcaacccgggcggcgagatggcgctttggtgtaagcgaggaggacagtacaggacatgagtcctggtgagggacccgaggagcaggacagagaagacggcccctgaatcccatttggccccttgctggctggaggtgtgaaaaccagcggtggaggcagccttcggggcctgcatttgagaataagggtgtcactagttccaggcgtctgctgaaagatttggaacagaagatgatggccactccgaaccagaccgcctgtaatgcagagtcaccagtggccctggaggaggccaagacctctggtgccccggggagcccccaaacaccccctgagcgtcatgactctggtggttccctgcccctgacaccgcggatggagagccactcagaggatgaagatcttgctggggctgtcggtggcctgggctggaacagtaggagtccccggacccagagcccagggggctgctcagcggaggctgtgctggcccggaagaaacaccgtcggcggccatcgaagcgcaaaaggcactggcgaccctacctggagctgagctgggctgagaaacaacagcgggatgagaggcagagccagagggcctcccgggtccgcgaagagatgttcgccaaaggccagcccgtggccccctacaacaccacccagttcctgatgaatgacagggacccggaggagcccaacttggatgtgccccatgggatctcccacccaggttccagtggggagagtgaggccggggacagtgatgggcggggccgagcgcacggtgagttccagcggaaggacttctctgagacttacgaacgcttccacaccgagagcctgcagggccgcagcaagcaggagctggtgcgagactacctggagctggagaagcggctgtcgcaggcggaggaggagactaggaggctgcagcagctgcaggcgtgcaccggccagcagtcctgccgccaggtggaggagctggctgccgaggtccagaggctccggaccgaaaaccagcggcttcgtcaggagaaccagatgtggaaccgagagggctgccgctgtgatgaggagccgggtacctaggggtgcctcccagcctggtggacccaaggagaaggtcccatttcgtgcacactcaggccagctgggtctcaaggaggcaggtggcagatgaaaaccaccgtcaacaccctgtgcgccctgagaacagctaaatcggttcagactcccacctcaccgtttccatagttggctcttttgtgtcatcttaccctttacagagaaattaaatggccttggtgggaccaaatggg

SEQ ID NO: 6173 - DNA, 1953 bp, Homo Sapiens
  NM_144618
gcacttttccacctcagaagtgcctcagcagaaaggcgatgaacctcgggggtgcatcatctttctgttagaatgggagcatgagttttctgatcattttcccttcacagattcctccgccagaaatcttactcgcggcgccttcatttccgggtccgccattttgttgcctctgtttctccacgagggggggttaaaggcccccaaaacatgcacacatgaaaagggcaaaaagtaaccgtccttgacagggagtcttaactagagaaggaaacgggactaaactggcgggctccgtggaagcgtggccggcagcgtcccggacgaggagatgtctttggtggacttgggaaagaggttgctagaagcagcaagaaaaggccaagatgatgaagtgagaacgttgatggcaaatggcgccccattcaccacagactggcttggaacatcacccctccaccttgcagctcaatatggtcattattccacagcagaagtactccttcgagcaggtgttagcagggatgcccggactaaagtagacaggacccccttgcacatggctgcagccgatggacatgcgcacatcgtggaactgcttgttcggaatggtgcagatgtgaatgccaaggacatgctgaagatgacagctttgcattgggccacagagcgccaccatcgagatgtcgtagagttacttatcaaatatggagctgatgtccatgctttcagcaaatttgataaatcagcctttgacatagctctggagaaaaacaatgctgagattttggtcatcctccaggaagcaatgcagaatcaggtgaatgttaatccagagagagccaaccctgtgactgaccctgtgagtatggctgctccattcatcttcacgtcgggtgaggttgttaacctcgcaagccttatttcttcaaccaacaccaaaacaacctcaggtgacccccatgcctcaacagtacagttttcaaattctaccacctcagtgctggctacccttgcagctcttgctgaggcatcagtccccctctccaactcacacagagccacagccaatacagaggaaattatagaaggaaattccgttgactcatcaatccagcaagtaatggggagtggaggccagagggtcatcaccatagtgactgatggagtccctctgggtaatatccaaacttcaatccctactggaggcattggccagccatttattgtaactgtgcaagatggacagcaagttctaactgtacctgctggtaaggttgcagaggagactgtaattaaagaggaagaagaagagaagttgccactaacaaagaaaccaaggataggagagaagacaaacagtgtggaggaaagcaaggaaggcaatgaaagagagctactacagcaacaactccaggaggccaatcgaagagcccaggaataccgacaccagctcctaaagaaagagcaggaagcagaacagtaccgtcttaagctggaggccatagcccgacagcagcccaatggagttgatttcaccatggttgaagaggtggctgaggtagatgctgtagtagtcacagagggggagttggaagagagagagacaaaagtgactgggtcagcagggaccacagagcctcacactagagtttccatggcaactgtttcatcttaatatgcaagggccacaatttgcactgtgttcatattaatcctcttttaaaaaaggaaatatacagaagacaaacattgtataaaaactaagagtgtctttaagaagaaaactatagcagggtacaatgcttgggctcaggaagtttctctgtgcaactagaaaattcaaagccatatttagggaacattttttctgaggggccaaaagaataaaggaccaaatttcttagctcatatcattgctttaaacatagaagtaaaagaatactgcatgtt

SEQ ID NO: 6174 - DNA, 1646 bp, Homo Sapiens
  NM_144636
tagtttccggctgaggttggcctggccgcggttgcgagggcgccgaggcaggcgcgcggcgggcaggcctgggagggggcgggtccgcgcgggcttcggaggagcccgccctgccagaggagagggaggtcacggcgtaaaggtgcagctgccgccaccgccgcttctgcaaggtctcagggacgggctgcagccatgtcctattgccggcaggaaggctttgcccaggatggttccttctggaatgtctattcccctccttccctccctgaagctctttgtcagggacaaaggtaggatccctccccttccgtcttctccactggatgcctgtgtcgtattcatctgtgaccaccaggtactaccacagagctggagctgaggaagggaaggatcgaatcatatttgtaaccaaagaagatcatgaaactccaagcagtgcagaattggtggctgatgaccccaacgatccatacgaggagcatggattgatactgccaaatggaaacattaactggaactgcccatgccttgggggaatggccagcggtccctgtggagaacagtttaagtcagccttttcctgcttccactatagcacggaggagatcaaggggtcagactgtgtagaccagttccgggccatgcaggaatgcatgcagaaatacccagacctctatccccaagaggatgaggatgaggaagaggaaagagagaagaagccagcagaacaagcagaagaaacagctcccattgaggccactgcaaccaaagaagaggagggatcaagttaatgaaggccacaaggcactgggcaccagtccttttggagtggaccttttgcaaaaggccttgtcatcaccttccaagaaagtttccttctgttgtcctgtgcattataatatacaaaataacttattttgatgatcagaggtcttgaggtcttgacatcttgacatatacactgaaaaaaatgggggttgtatgtatgtgtgtcctacccaaacctgtggccgccacttttgaattctcagattgccctgaattttgccacttttaaataatgtgctgaataagctcagcaactaaaaaccattacccaagaacgtttcttgtgagtgagctgatttattctgattcattatattccttttggtagattttataccccttggggaaataatacaacaaaaacatctcttaaaaatgctgggatggggccatatctactagcagaggccagatggtcagatatgatttctgcaaacccatcttgaccttgagtatgtgaaggggtactgtactttattcctgatacattttggtttccatgtaggtgttgagctcctggttttctgtgtttggatgatgaagatttggacccttccattcataatccctttctaagtgaagggagaggctggcttggctgttccttgttattccgaaagccctggtttggggcccatgttcacactggctctcagtctagtcaggtgcaatgttcttgagaggtggggacctaattattaccagagtagcagcaagagaggaaacgttgtgaattaagtattcaattaaaaggaaacatgatttctacctgaaaaaaaaaaaaaaaaaaaaaaaaaaaaaaaaaaaaaaaaaaa

SEQ ID NO: 6175 - DNA, 981 bp, Homo Sapiens
  NM_144638
gcaggcaacatggccgagaggccggggcctccgggcggcgccgtgtccgcgaccgcgtaccctgacacccccgcggaattccctccgcacctccaggcgggtgcgatgcggcgccgcttttggggcgtattcaactgtctgtgcgccggcgcgttcggggccctggccgccgcctccgccaagctggccttcggcagcgaggtgagcatgggtttatgcgtcttaggcattattgtgatggcgagcaccaattctctgatgtggaccttctttagccggggcctcagtttctccatgtcttcagccattgcatctgtcacagtgactttttcaaatatcctcagctcggccttcctgggctatgtgctgtatggagagtgccaggaggtcttgtggtggggaggagtgttccttattctctgcggactcaccctaatccacaggaagctcccacccacctggaagccccttccacacaagcagcagtagcaccacttggctagacggaccagctggaaagatcatgatggtggcccagccttgggatgtcatgtgggactgtgtcctagggcgatccagttgtgcagccttctgaccatcagccaagggaagcaggcctctgatggagcaggctctggctctgtaaggagaggtgcagctgcagcagtgttctaccggaagtgttttgatcatctgtacagtgctttggattcttcctcccaggcctaccccagtgagccttcgcagatgctggagatcctggggttggtctgctttgtgtatggtacttgaaaccacgctgtaattattgtcctgttgccaaacaaaagccagtcatgtaactctagaagcagtgactggtggggctttctgacagttccatgctgatgtatcaggccatctgtgtcatgcttatgtattatggcaagaagaggaaaactggattaataaatacgttttttgtaagttaaaaaaaaaaaa

SEQ ID NO: 6176 - DNA, 2054 bp, Homo Sapiens
  NM_144641
cccgacccagcgttttccttgggattccgacctccccctcagagaagacaggaggtcgggaaggacctgcagcccaggggcttccaagatgaggcccagagactcggattatcaatgcagagaaatctgaattcaatgaggatcaagccgcctgtgggaagctgtgcatccggagatgtgagtttggggctgaagaagagtggctgaccctgtgcccagaggagttcctgacaggccattactgggcactgttcgatgggcacggcggtcctgcagcagccatcttggctgccaacaccctgcactcctgcttgcgccggcagctggaggccgtggtggaaggcttggtggccactcagccccccatgcacctcaatggccgctgcatctgccccagtgaccctcagtttgtggaggaaaagggcatcagggcagaagacttggtgatcggggcattggagagtgcctttcaggaatgtgatgaggtgatcgggcgggagctggaggcctcaggccagatgggcggctgcacagccctggtggctgtgtccctgcagggaaagctgtacatggccaatgctggggatagcagggccatcttggtgcggagagatgagatacggccactgagcttcgagttcaccccagagactgagcggcagcggatccagcagctggcctttgtctatcctgagcttctggctggtgagttcacccgactggagttccctcggcggctgaagggggatgacttgggacagaaggttttgttcagggatcaccacatgagtggctggagctacaaacgtgtggagaaatcggatctcaagtacccactgatccatggacagggtaggcaggctcggttactaggaacactggctgtctcccggggcctgggagaccatcagctcagagtcctggacacaaacatccagctcaagcccttcttgctctctgtgccacaggtgactgtgctggatgtggaccagctggagctacaggaggatgatgtggttgtcatggcaactgatggactctgggatgtactgtccaacgagcaggtggcatggctggtgcggagcttcctccctgggaaccaagaggacccacacaggttctcaaagctggcccagatgctgatacacagcacacagggaaaggaagacagtctcacagaggaagggcaggtgtcctacgatgacgtctctgtgttcgtgattcccttgcacagtcagggccaagagagcagtgaccactgaggattcagacactgtatcccagaactgctctagtgcccgggtgtggtctgggcatccctccagtgtgaccaagagcaaatcctgcctgccctatccctagccaccgcccagtgctctcactatccacctcaacacacatccatctcaagaggaacatttataccaggcagtcagagctggaagtgtatggagagcccagcccaccaggtcctgccttttgcggtgataaccttctctggcagagtgactttacaacttaactaggaaacccatgtgaggctcctcagacaggatcttgaacagcccaaagtatcattctcagataggggcacccaagctaagggtattagccaaagatgccaggatgggtagctagcccatgtttagatccaggtctccaattcatggttatcagggcatgtgttcaacaacccccaaagtccacgcaggtggcttgtagaaacctttgggcagcctcatgtctgctaaaacagccatcttcaagacagcccctgaaaagagaccagttcaggtcctgccctgctgttctttgctggagatgaggaacaggtgctggggctaaagtttggggtagagcacaagggacaagaggaactcttggagttggctgggtgagagggctctccatttgctacctgtagtagcctgcctcttaactggttgcttctccctagttccagccctgccctggtctgatgccccaacactgcccttgctttgttttccctgtcacctccctattattaaatgttttctacagaagaaaaaaaa

SEQ ID NO: 6177 - DNA, 1907 bp, Homo Sapiens
  NM_144650
agcgacccgaggagggaagaggactccaagcgccatggccgctgccgcccgagcccgggtcgcgtacttgctgaggcaactgcaacgcgcagcgtgccagtgcccaactcattctcatacttactcccaagcccctggactttcaccttctgggaaaacaacagattatgcctttgagatggctgtttcaaatattagatatggagcagcagttacaaaggaagtaggaatggacctaaaaaacatgggtgctaaaaatgtgtgcttgatgacagacaagaacctctccaagctccctcctgtgcaagtagctatggattccctagtgaagaatggcatcccctttacggtttatgataatgtgagagtggaaccaacggattcaagcttcatggaagctattgagtttgcccaaaagggagcttttgatgcctatgttgctgtcggtggtggctctaccatggacacctgtaaggctgctaatctgtatgcatccagccctcattctgatttcctagattatgtcagtgcccccattggcaagggaaagcctgtgtctgtgcctcttaagcctctgattgcagtgccaactacctcaggaaccgggagtgaaactactggggttgccatttttgactatgaacacttgaaagtaaaaattggcatcacttcgagagccatcaaacccacactgggactgattgatcctctgcacaccctccacatgcctgcccgagtggtcgccaacagtggctttgatgtgctttgccatgccctggagtcatacaccaccctgccctaccacctgcggagcccctgcccttcaaatcccatcacacggcctgcgtaccagggcagcaacccaatcagtgacatttgggctatccacgcgctgcggatcgtggctaagtatctgaagagggctgtcagaaatcccgatgatcttgaagcaaggtctcatatgcacttggcaagtgcttttgctggcatcggctttggaaatgctggtgttcatctgtgccatggaatgtcttacccaatttcaggtttagtgaagatgtataaagcaaaggattacaatgtggatcacccactggtgccccatggcctttctgtggtgctcacgtccccagcggtgttcactttcacggcccagatgtttccagagcgacacctggagatggcagaaatactgggagccgacacccgcactgccaggatccaagatgcagggctggtgttggcagacacgctccggaaattcttattcgatctggatgttgatgatggcctagcagctgttggttactccaaagctgatatccccgcactagtgaaaggaacgctgccccaggaaagggtcaccaagcttgcaccctgtccccagtcagaagaggatctggctgctctgtttgaagcttcaatgaaactgtattaattgtcattttaactgaaagaattaccgctggccattgtagtgctgagagcaagagctgatctagctagggctttgtcttttcatctttgcgcataacttacctgttaccagtataggtgggatatacatttatcttgcaggaaattccccaaagctcagagtccagttccttccataaaacaggctggacaaatgaccactatgttagacccccaggctcgacttcaggggtcagtgttcctgtcccaaaccccacacagaatactctgcctctgtttcatgtagcaaatgagcaaaaactcagtatctatcaaaagtgtaaattatatttcctatgcctagtaattcacttcatgtctaaaaatttatctgatagaaacactagcaccagtacatacagaagcatggcaaggatgtttctggcagcacttttctaataataaaagatttgaaacaaaaaaaaaaaaaa

SEQ ID NO: 6178 - DNA, 2103 bp, Homo Sapiens
  NM_144653
aaagtccatgggagccggagcgccgggacgccaagcacttcctgccgcgggcggcgcgccgcagctgcccaggccggaccgggccgggcgcccgcagatgagccccgctagggccgccccgcgctgagagcccagccccgccgctgcccgcccgccatgtctcagatgctgcacatcgagatccccaacttcgggaacacagtgctgggctgcctgaacgagcagcgcctgctgggcctctactgcgatgtgtccatcgtggtcaagggccaggccttcaaggcccaccgggcggtgctggccgccagcagcctctacttccgcgacctgttcagcggcaacagcaagagcgccttcgagctgcccggctccgtgccgcccgcctgcttccagcagatcctgtccttctgctacacgggcaggctcaccatgacggccagcgagcagctcgtggtcatgtacacggccggcttcctgcagatccagcacatcgtggagcgcggcaccgacctcatgttcaaggtgagctcgccccactgcgactcgcagaccgctgtgatcgaggacgccggctccgagccccagagcccctgcaaccagctgcagccggccgccgccgccgcggccccctacgtcgtgtccccctcggtgcccatcccgctgctgacccgagtaaagcatgaagccatggagctgccgccggccggcccaggcctggcccccaagcgcccgctggagacggggccccgggacggcgtggcggtggccgcgggggctgcggtggcggcgggcacagcccctctcaaactgccccgtgtctcctactacggggtgcccagcctggccaccctcatccccggcatccagcagatgccctacccccagggggagcggaccagtccaggcgccagcagcctgcccaccaccgacagccccacctcgtaccacaacgaggaggacgaggaggacgacgaggcctacgacaccatggtggaggagcagtacggccagatgtacatcaaggcctccggcagctatgcagtgcaagagaagcctgagccagtgccgctggagagccgctcctgcgtcctcatccgccgcgacctcgtggccctacctgccagcctcatcagccagatcggataccgctgccatcccaagctctactcggaaggggaccccggggagaagctggagctggtggcaggctctggggtctacatcacacgcggccagctgatgaactgccacctgtgtgcaggggtgaagcataaggtcttgctgcggaggctcctggccaccttctttgacaggaacacgctggccaacagctgcgggactggcatccgctcgtccaccagcgaccccagccggaagccgctggacagccgggtcctgaacgctgtgaaattgtactgtcagaacttcgcccccagcttcaaggagagcgagatgaacgtgatcgccgcggacatgtgcaccaacgcccgccgcgttcgcaagcgctggctgcccaagatcaagtccatgctgccggagggcgtggagatgtaccgcacggtcatgggctccgccgccgccagcgtgcccctcgaccccgagttcccgcctgccgcggcacaggtgttcgagcaacgcatctacgccgagcggcggggcgacgccgccaccatcgtggctctgagaactgacgccgtgaatgttgacctgagtgccgccgccaaccccgccttcgacgccggcgaggaggtggacggggctggctcggtcatccaggaggtggccgcccccgagccgctgcccgccgatggccagagccccccacagccctttgagcagggcgggggcggccccagcaggccccagacgccggcggccgcggcccggaggccggagggcacctatgcagggaccttgtaagcggagctgggtggctgcgcgagggaccgagtactagagctgcttgcatgcgttactaatacaaacaaatgtgatcaagccacttacctactgaactgctactgttgcctgagaaaaatgtgatttttattctgcttgtatttaaaattgatgaaggaaaaaaaaaaaaaaaaaaaaaaaaaa

SEQ ID NO: 6179 - DNA, 7009 bp, Homo Sapiens
  NM_144660
cggcgaggcggggagggccccggactccgacggcggctcggacgccgactcggaggtgggtccggggagcccgactcggaccgcggaggtgagcgggagctgaggctgaggagaggggagcttggggggcgcctgctgccaagggcagcggaggaggaaatggcaggtcctaatcaactctgcattcgccgctggactaccaagcatgtagctgtgtggctgaaggatgaaggcttttttgaatatgtggacattttatgcaataagcaccgacttgatggaatcacattgctaacattgactgaatatgatctccggtctcctcctctggaaatcaaagtcttaggggacattaaaaggttaatgctctcagtccgaaaattgcagaaaatacatattgatgttttagaagagatgggctacaacagtgacagtcccatgggttccatgacccctttcatcagtgctcttcagagtacagactggctctgtaatggggagctttcccatgactgtgacggacccataactgacttgaattctgatcagtaccagtacatgaatggtaaaaacaaacattctgttcgaagattggacccagaatactggaagactatactgagttgtatatatgtttttatagtatttggatttacatctttcattatggttatagtccatgagcgagtgcctgacatgcagacctatccaccactcccagatatattcttagacagcgttcctagaatcccatgggcctttgccatgacggaagtatgtggcatgattctgtgctatatttggctcctggttcttcttcttcacaagcacaggtcaatacttctgcgaaggctctgtagtctgatgggaactgtattcttgcttcgctgctttaccatgtttgtgacctccctctccgtgccaggacaacacctgcagtgtactggaaagatatatggcagtgtatgggagaaattacatcgagcctttgccatttggagtggctttggtatgaccctgactggcgttcacacatgtggagattacatgtttagtggccacacagtcgtcctaactatgctgaatttctttgtcaccgaatgtaagtatctttttagtgcttctatgcgtattaggtaactagctgcagtgaaggctgtgggaagggtgtcagatcctgtgaagaatggcaaaacagcctgacctgagaaacgtgactgagaagcattggaaggaatgtagctttaaaatgatctttctgtccttttcctagatacaccaagaagctggaatttcttgcacactttatcctgggttctcaacctctttggaatcttcttcatcttggctgcccatgaacattattctattgatgtgtttattgctttttatataacaacaagactctttttgtactaccatactctggccaataccagagcatatcagcagagtaggagagcaaggatttggtttcccatgttctctttttttgaatgcaatgttaatggcacagtacctaatgaatattgttggccattttcaaaaccagcaataatgaaaagactaattggatgaatactatctttctaatgaatttgtgattaaatatataatagttgttgaaaatgagtaactttgcgttctccccctaggttgttcttagatgcctggcttatgtgttgacaaagtaaagttttctgttctgagcaaagttatgattataaaaagcaagaaagaacaatcaagagtccttatgtagctatttgaacagaaagcttaagtagatgttttctgccccttctctttaggaagacttaatgttgtgattgaagtcaggctgtacccttacctgttgagtatttgcttattgaactttaaacaagtcaacttgagcagtttgctggttgaggaattttcattgatttccagtagggctctagtcaagaaataatatgttttgaagctccttattacctttagaagaagaaaccctaacaagtgacagtacttgttctttggactaatctttgtttcattttaaaaaatgcaaccctgggacatgatctgttttactgacaaagagtttttgccttctgaaccatctttaaatatactgagcataccaggatgcctgaaataagaagagaatgaaagaggccatagatgacgtgacagagtactggctaggatgccattggtctcctcattaatgcaaatgtagggctggcatatttcaccaaagatgcaacaaaagatgcagtgccagtgtgaccctcagtgagtattcatgagggaaaaatggctgcatccataaaaataaatgggcttaatgttagtggtataggtacccagaataacttctttgtgctatagttgttagatgacagttcaattttatgcttttttaatggtgttattaaatgagccaaataggagtgttttaccagatgttagataaagttcttaatgccgttaagtagggaggtatgcatgcaaagaattgttttctcctgaaaagaaacttacagcacgcaaaatataactttttggtttttgaaatttatcattcttggctgttggaagtaaacagtctcagacatacttggatatgaaaaagtttcgttgttttttacttttaaatataatggtgtatatacattctttctatttagtcttaatttggcagtcaggaagtgatataacttagctgctatttacaacactagaaatttagtactttaagtaatttcacatctatgataacatttgttactttatttttaatgatttttttacagtagttatgacagtaggatggttatggaattggaatttaaactcccaactaatgagcttaagctgcttggaatattaattatgtagtttttacattccattttaaaacaaaaacttagaaaaggtgctggcattctgaggcctgcaattaggccacatagcagaagcttgctccttccttatctgggtgaaatattttatttttgcactttgagtcatattcccacccctgtataagctacataggagcctgaatgaattgggtaggaaaggaaattatgcaaacaagtctcagctagtgctgaatgaccccaatttgggtctgctgtgaacatcatttttgtatttctcacttgagaaatgctgcaaggcaattcaacttttatgcttttaaatctcacaactcagaatctgatatcttaaatcactgattctgttacatgctaggaacaaaatgccaacatctcatgtaaagaagttgcataatcatgaaaaataaaggatgtttcctatgccagttagagtggtttgacccttcaggtaaaaagatatgttactgttatttttctacgtgacagaacagactgaatttagctagggaggcagtgatgttggcttttgggaaagggttcaaaaaactgtatggcaacattaatgctaaaatgttaagccgagtgcagtggtgcaaggctatagtcccaggttctgaggaggctgaggcaggaggattgcttgaggccaggagttagaaactagagtgtgttataacgcctatgaataaccactgcattccagcccgggcaaggtagcaagacccattctcttaaaaacatggctgggtgcaatggctcacgcctgtaatcccagcactttgggaggccaaggcaggcggatggcttgaggtcaggagttcgagattagcctggccaatatggtgaaacctcatctctactaaaactacaaaaattagctgggcatggtggcacgcacttgtaatcccagctacttgggagactgaggaacaagaaacacttgaacccaggaggtggagtttgcattgagctgagatcactccactgcactccagcctaggtgacagagtgagactccatctcaaaacgaaacaaaacaaaacaaaacaaattagagtgggtgcagtgtctaatgcctgtaatcgcagcactttgggaggctaaggcaggaggatcacttgagctcaggtaaaagagaccagcctgggcaacaaagtgagacctcatccccacaaaaagttgtttagaaaattagctgggcgtggtgatgcatgcctgtggtcccagctacatgggaggctgaggcagaaggatcacttgagcccaaggaggttgaggctacagtgagctgtaatcatgccactgcactccagccttggggacagagtgagaccctgcctcaatcaatcaatcaatcaataacaaaaacttaaatagctattaacctcagtcttctttccttcatataaattctattctaagaccaaatagaaaaataaatgtaactaactttgcagagctattgacattgagagacctaacaacagactgcaatggggattgtaaaataacttttcagccttgcacttgctcatatatgttttgagaaaaatgtaagttaggtataacttattgttttaactattataaggcagtgtttacataaattaatcatctctttcttggaaaacattgagacaaatttattttcagttttacttaaacatgaaacctgtattttagttgctttttgttttgtccagaaatttccagattttgtcttcattttttttcctggttaaaatctaaaccatagtgaagatagtatttatgtttacattttatctgtgaatgtggctaagcagagaagctacatggctttggtctacatattttttgaccttgtatttggttctgtagttgcagacttgtgaaggcttacatcatcatggagactttagtaaggaaggaaccaaaaggtttttggtttggggatgcaaactggaggttatgttacaagtcttcaatgcattttctgtgttcctggcagcagtgttgcctttttttttcttttccttttttttttttaaagaccaggtagggtagtgttattgaagggtaattgaagagtggtagagagtaagaggttttgaaggaggcaggtttgctgttatcacaaaataatttgggggaaacctttcgtggctgtgctgcaagaattctttatgtggctatcctctccatagttttctgaccagaattgcaagggcaaaaatagaacttctagctctatttatttgtatcctttgaaatcagaacttatccttagaaccagtcagttaaataatgcggactatgcctataatcccagcactttaggaggctgaggcaggcagatcacgaggtcaggagttcgaggccagcctggccaatgtggtgaaactccgtctctactaaaaatacaaaaattagccgggcgtggtggtgcacgcccatgcctgtagtcccagctactcgggaggctgaggcagaagaatcgcttgaacccaggaggcggaggttgcagtgagccgagatactgccactacacttcagtctgggtgacagagcgagactccatctcaaaaaaacaaaacaaaataaaataataatgtgggctattcagaagaaaaagtcagtgacagagagaccagaacccattggatcaagagacctgcagggattataactctttactctgtgagcagcggtgtttcgtgccctgtctctgcctgtgtgtttttactaagaattccagaaatcctgtaatttgtaaatgggaaacagaggaaccagattgttttatagctgataagaaacagtctgttttagaaacatctgtttggaaagtattactcatgtattcacaaagtcatatttataacactagtcttctttgactgtattcaacaaaaggcagtttcaccattaatttcatagtaagcttttttaaaggattctagatctaaattgcctaagaatgttaaccacattcttgttttaaactctctaatttaataaatgtaattattttatagtcttttatagacttacattttcttcatactaaaggtaatgataatatagtcatttgccagtactttaaggtattcaggcatttgagacaagaaagctgtcttgtagaatagtccaattgctttcttaaacagtactggtttcatttagacagtttctaagccagcaaaggtgtcaattttaatgccaacttgacagtttaacagttagtgtttgtaagcagtttagcctgaattatcccatactgctgtagaggagaattgttagtaacatcaaaggtcagaatgcttcaggtgactaataagaatggaaagagactgagtaggttttttgtttcttttccctgtctttgagtaactttgaatgactaaaattagtatgaaactaggttttggacccccttctcacctcacccggatgtaatgccaccaatttcaaataactaaaatgtgaccaattactttgcttcaagttctatacaaatatctctgaaatctgtaagccatatttcagctattctggtttttataatacattctaccctaaattaaccaaaggactttttattcagtgtattccatgtttcagcataaggaaagtttgtgcctgatatggcaggagaaagaacactatggtaatttcattgttacttcaggtctctttcaatctgaagaactgggttgtctggagaattgaacatagccaagcaatattatcaattagtaatgtcatcttaaaaatgttcacttttactaagttttattcagaggatctatgtattattagaaaaatgaagtatttctgacatggaacaaagaaagtggaaactggtacttaatgggggaagcaaaattagctgggactaaaacggacatgttttgttttgtgaattctacctaaatgtctctctatccacagagaaactagtattacttgaagatgtgaaagttcctgtggtagccataccttgaagcacagtgtttgtacataagtaaatatcttgattctaaattaaatccagatttaactaatatatattattttatatctttgttgtattaaaatgtttaaaaacactaaaaataaaacatttgaaagttgga

SEQ ID NO: 6180 - DNA, 1987 bp, Homo Sapiens
  NM_144665
agccgccgccgtctccgccgtcgctggggcagctgccgcggtggtcgcctctggcagtgccgctagctttcaggcagtcgcctctcctcccgacatcccgccttgaggaggctgaggcggaatcgcggctggcggcggggggacggaccggccctgcagtggccgcagtgacagcccggacccggccctccgcccgctctcgcctcggcgcccgcagccacgatgaaccggggcggcggcagcccgtcggccgccgccaactacctgctctgtaccaactgccggaaagtgctgcggaaggataaaagaatcagagtgtctcaacccttgacaagaggaccaagtgcctttattccagagaaggaagttgtccaagcaaacacagtggatgaacgtactaactttcttgtggaagaatactctacatccggtcgtctggacaacatcacacaggtcatgagtttacacactcagtacctggagtctttcttgcggagccagttttacatgttgcgcatggatggtccccttcctctaccatacaggcactatattgcaataatggctgcagctagacatcagtgttcttacttaataaacatgcatgtggatgaatttttaaagactggaggtattgctgagtggttgaatggtttggaatatgtgccacaaagactgaaaaatcttaatgaaattaataagctgctagcacatcgaccttggctgatcacaaaagagcacattcagaaacttgtcaaaactggagaaaataattggtctctgcctgaactggtacatgctgtggtcctcctggcacattatcatgctttggcaagctttgtttttggtagtggtatcaatccagagagagatccagaaatctccaatggattcaggctaatatcagtcaacaatttctgcgtttgtgatcttgctaatgacaacaacatagagaatgcatctctttcaggcagcaactttgggattgtggattctctaagtgagctagaggccttaatggaaaggatgaaaagacttcaagaagaaagggaagatgaagaggcgtctcaagaagaaatgagcactcgttttgaaaaggagaagaaagaaagtctttttgtggtctctggagatacttttcattcatttcctcattcagattttgaggatgacatgattataacatctgatgtctctcgatatattgaagaccctggttttgggtatgaagactttgccagacgaggagaagagcatttgccaacattccgagctcaggactatacctgggaaaatcatgggttctccctggtgaacagactttattctgacattggacatcttcttgatgaaaagtttcggatggtctacaatctcacatataacactatggccacccatgaggatgttgacacaaccatgctgcgcagagctttatttaactatgttcactgtatgtttggaatcaggtatgatgactatgattatggagaagttaatcaattacttgaaagaagcctgaaggtttacattaagacagtgacctgctatcctgagagaactacaaaacgcatgtatgatagttactggcggcagttcaaacactcagaaaaagttcatgtcaatctacttttaatggaagcacgaatgcaagctgaacttctttatgctcttcgtgccataactcggcatttgacctgaagtatcacccaaggaaaatgtcatacatgtgtaaagacctttcacataagataaacattgaagctatttgtgatatagcatcaaaaattattcagttctctagtgtcaaagtttagccgtttgtttttttttttttgttttttgcggctgtaatgtgcaatgatgtgttttattttccttgatgcttaacattactaacaattgcaaaaataatactgaggagcactactttgcattgtttgtagttggagttttggatactgatcataaatcatgaatctggcgt

SEQ ID NO: 6181 - DNA, 14882 bp, Homo Sapiens
  NM_144666
aacggttctaacagctgggtgcgggtggagctgcgggcgatcgccagctcgagtgcagattccttgctgtgaccgaggttcagagtgagctctgtcggtgtgtcagtttgcctcttcaggcactcttcaatgaaacctcatcagcagatcgggctctcttcccttgccttgcctcctaacccccctaggccaggtgagggggacagggtactgggaggtaagaaggaactcttctgcaaggagggctctcacgtctgtcttaggcctgctccttaccagagtctttggggaagcagtagggagggcctgagggtctcaggaaaggctctctgctggtctggctctgctctgtagctccatctatttccctgtcccaggtcctttcttcctcctaaccccattgactctgaccatcccctgcccagagcctgaggtcccttctctggcccctctgctgggctggcccatgcaggtgaggccccgcatctggcatcctggaactggcagttggagcctgagctatgggcaaggtcacttcgacagcagttgaatgcccagctcctcatggtcccggaggagaggagggtaggtttgtcttctgatgagacatcatctgattcccttaagtcttggcactccatatgtgtcttggacagcaaagaacagcccttggcctgccagcagaaacagaggcagttcgtgaagccagtgactgagtcagagcagcccacagtgctggaactcctgctagctgagctccgaactctgttctcagctgtgttgcaggacagtagccctgcagcttggcgctatcttcatgcagtactgggtctactgcctccatatcgtgagttgctagttggccaccttgatttgctgcccttcctggagcagctgtactgctgggcaccctgggtccaaacccacctccatctggacctgctaggtgccattgtccaggcctttcctccagacagctctttgttagacagtgcttcccatgctgactgctgtccccagaagcggaggctccatcacaggcccccatgcccagcttgcccttttgtgcaggcccagtggagcaggcagcaagtaaaggaggagctggccacctggctgcgaccattgacactgcctgagctacagcgctgcctgggcattgttggtgctcaggtggccctagaagaggctgtgtggctggatggacttagtctccttcccttggcactggcagcggacatccctgtacggtatgaaagcagtgacactgacaatgcagaggtggagcctgttggaagaaaagagaccaggtctcagcttgactatgaagttcccagggaaaaggccttccaaaagagcagcaccggcttttcacctgagacttccttcctggatagccaggtgatgactgctctgaagatggagagatacctgaagaagatccacttcctctatctcaatgtggctcccagccggtactttaggccttacagcctgatggtggtgccacccgacaaggtgaatcccgagcactacatcttctctccctttgggatcttgcatgtacatcctgtggaaggtagcgagacgatgacactgggtacctggcaccatcactgtgttctctggcagcagctccagttcattccattctttaagtattgcctcttacgcaagtcctttacctgttggaagaagaatgtgagattacaggggctgcatcgactccagaaattcctagagaatcatctgctcttggctgtgccccactttggagctgggctactccatattagcaggcttctgcaggagctacactctgtgtcctggctaccccaggaactggatcggtgctatgagctgctggacctgcagacggctctagccgaggagaagcataaggctctacggctgctccatcgttgcctaaacctctgcacatccattcttcgactggttcacgaggacacataccacatgcaacagtgcctacaggagcgagtacaaaactgtgacaggatcaggacaggccaaggctccatataccttcagagggtacagcacaagcaactggagcagaagctgaagcaagcagaggcctggtggctgcagctgggaaagtttgcccgcctggttgactacatgatttgtcagagcctcatttctgtcttggaagagcagataacctcttttgtggccaacatccttcaagccccaaggcagaaaccctttctctcatcacagctggtctttgatgatcatggtcaactgtctcatgtgccctgtgttgaaaatatgatccagactctaactggaggcctacagtctgtcaagacctctgccttgcaggtagtgcagtctgcagacctgaagacctcctcggattccctgtattctgaagaagaagatgaagaggaggactcaaaagacgaatttctgatgcccaagttccagggccagcccagcgatgctgtgagcatcttctgtggcccgaatgtgggattggtgtggccctggaagtctcacccaattgctggtatcttggaggtccgtggatgtcggctgcggggccaatacttcccccacaattataagcagctggaggaagacctggacaacaaccctaagatccagcaggcactgaatatacaacaggtgctgctggagggcgtgctgtgcaaggtgcaggaattctgcagggaacatcattggataacaggcatttatgaattcctgcaatcctgggggcctcagaagctggaagacatgagaggtggtcccatcaagaactacgtgacgctggtgagccgcctgaatgtttggcaggcccgtgtctccagtatgcctatcgagttgctcacaaaaggcgggttgctgctacttagctgccatgatgtacaggcagagatggaatccaagctgaacagcataaggaaggacattcttgcacacgtgcaaaatgagtgctggaacctcagtcaacaactcatgacagagctcacagatttcatgcatatcttccgaaccatcaactcagatattcatgccattgcacagtgcacccagaagttgaatgaagccaatgaacagtacgtcgagctggaggagcgaatggaatacgtacgggcactccacgaactcatccgcaaccactttagcctctttagtgctgagaatgaagcactggacatctcggtgagaaggcaattcggggagtcacccatccctccctgccctcctcccccacaaccacatctactccactgccctctgcttgccccacagcttctggatatgtgggaggcatttcagtttgagaaaagccaggcttcagagttcctgctcagcaagcgacatgccattatgcccaagctgcagcagctgatggcagcagcattggcagagctggaaggcctgcttgcgaaggccctctccggtccctttatggaccccacacaagatcagaggagtactgagcaccagctcgtctccctagagcgtcagttccagaacacagtcagcgacctcagtgaactgcaccacgcctatgccatcttcactgaggatgagactcctgtgcccttgccaatctgtgggacacgtcctattgtgcagcagcagcgcatatggcacctgtaccgagtcatctccgaaaacatcagcgagtggaagtgcatggcttttgccaagttcagcccagctatggcccaggagaagacagagggctggctgacagaggcagcacggatgagcacaaccctggagctgcacagccccgtgctgcagcactgcatgcgcatcctgggggagtttcgcagctacctgcccctgctcactaagctgggcagcctccacccacagagcctcaactgccagtgtctcctgcgtgcccttgggctgggcagtctccaaactatagaactcctaacgctgggccagctgcttacttatccactgctggagtttgcagatcgaatcaaccaggtctggcagaatgaaaatgaacgaattcatgcccaagagactatacggcggttgcagcggtactgggaagcgcgccagctgcgcctgctcaacttcatcctgcatgtaccctacgagcccccagcctcagagcgctccaagaggcaggtgctccgcagcccccaatgggaggtagtggacaaagatagtggcaccttcatcctctcagattacagcaacctgcaggattccatccaggaaagtcttcaggtgttgtccaagatcttggccatcgaaaagtcaggagatttaaacaaaatagctttggagtgggtggccatcatgcatggcctgggtgccctgctggaggtgtggctgactttccagcagaagtggatttttctgaataaagttctgcatgagatgaagatccagtttcctaatgctgacctgaactctcgtttcaaggtcatggatgaccagtatcgaaccctgatgcgcatctctgtagctgaccccatggttctgtcacttgtagtgcccagtgccgagaggagcccttacttccaaggccagcagctgcaacaactgctgcaagcaggatcggtggagctggagggcatcatcatgagtctggagagcgtgctctatggggtgtgtgctcacttcccccgcctcttcttccttagtgacagtgagctggtagccctgctggctgctcgactggaatcatgcgaagcccagctatgggtacgacgctgctttcctcatgtgcatgctgtgagcttcaggtcttgcccaactggtgagaaaaacacagatgactgggagtcaagcccaaacacacagactcaggtggaggcacttgcagtgctaggggcaggtggggaggaggtgaagctgcagggtccccttcctctgcatccagatctccctaagtggctggcctctctggagaagtgtctgcgcttggcactggtgcacatgctgcagggctgtgtggctgctcgccttgctcgaggcccatctctaggtgaggccctcaagcaactgcccaagcaaaacaagttgtacctgcaactgtatgtccagcactggatcgacttagtccaggccttcccatggcagtgtgtgctggtggcagaggaggtggtatggcgggccgagatggaggaggctctgcttgagtggggtaccctggccatggtctccatgcatatgcgcaagcttgaggtactggtgaattttatgcgggcccagagggcttcccaaggtgggcagtccctgccttctgtccgccagaccagccttctcagtgccctgctggtcatggcagtgactcaccgggatatagcacagctgctggaacagcaccaggtcagtgatctcacagactttcactgggtccgccaactcaagtatcacttgggttcacctcacataatccccaaaagccccctacagagtcttaagactattgcatcttctgaaccctctctgtcaccagcggcatgctggatagatgtgctaggcaggtccttcctgtacaattacgagtatctgggacctagactagggcctctacccagcctactgcctgaacggccagccctggtactattattggccctagaggaggtggcctgtgggaccgtactgggtcctaatggtgtgggcaagagagctatagtgaacagcctggcacaggccctgggccgccagctggtgatgctaccctgctcacctcagatagaggctcaatgcctgagcaactatctgaatggtgccctgcagggtggtgcctggctgctgttggagaaagttcatcagctgccccctggcttgctctctgccctgggccagcgcctgggtgaactgcaccacttgtatgccccactgtaccaggaggcttcccgaaacacaagcaccatagaccccacccagccccagctccttggcagtagcttctttgaaaaacatcacgtgtctgtgcgccttggctatggctgtctcctggtactgcgtgccctgagctctgctgtgcctgccaacctgcacctgctgctgcggcctgtggcattggcattgcctgatctgcggcaagtggcagagctgactctgctgggtgcagggatgagggatgccttccagatggctacccgcctatccaaattcttctctctagagcgtgagctggtgtctgggcccctgccctgccgcctgccactgctcaagcagatactggaagacacaatacggacactaaatgtgaccaaggaggaaccgaagtgccagaagcctcgcagcctagctgccattgaggaggctgccctactgcgctcaccactgtttagcattctcaatgggctccacctgcacaacctccgagggctgttgtgtgcgcttttccctagcgccagccaagtgctggcagaacctatgacttacaagctgatgaagccattggtggtggaggaactgcaacaggtaggtctggatcccagccctgacattttggggtccttggaacagttgagccaggccctgagccgggcctcaggcattctgctcctgggccctgcgggcagcggcaagaccacttgttggcacagcttatttaagatccagaatcggctggcagccatggaggacacctcaacccaaggctgccagcctgtggaaattacccacctgtaccccagtggcctcagcccccaggagttcctgggatggctagagggctcctgctggcatcatggcatctttcccaaggtacttcgtgcagccggtcagtgtaacaacatgggccaaaagaggcagacagaggaatcaatcgggatccagcactggataatatgtgatggagcctccaatggtgcttggctggactccatcacttgcctcctgagtgagcttccccagcttagtctccccagtggacagcagatagcacgacccccaggcacctttctcttgatggaggtggctgacacaacaggcatatcccccacagtggtaggctgttgtgccctagtctggtgtggtggagagcagacttggcagtgtatacttagtgccctgatggcatcccttccttatgagtaccgcctgcagcaccggacagtcgctgagctcaaccacatggctgaggttctggtgcctgcaacattgcgattcctcacctgccaaggtgtcagctctctgctgcaggtacacgggcagcaggctgtttgtgcaggtgtggcagaagttaccagcatggcacgcatcttgcatagtctgcttgacctccaccttcgcctaaaggaggagaaggcccctggcccagaggacctcagctatagtgatcctgtggcccaaagcttcaggtcttcaaaaagcagctttctaaaccggtcccaggttgacagtgacgatgtgccagataagtgcagggaacacttgctggctgtcagcagttttctttttgccttgatctggggctttggagcccaccttccctccaggttctggcccatctttgataccttcataagggattctattagtcgcctctccaactaccctgagccaccaccctcagccttggtgtttgatctacatgtaagccctgaagatggaacactggtccccttcactggccaatacctgagcagccacatcaaaggaactttgggcacctttcacccttctatccagactgaacggctcttgtatgtggtggacctgcttctgtcagggggacagccagtgttgctggctggagaggcagcaacagggaagtcagcctttgtggaggtgctggtagagccacatcacccttacatatacagccccatccaccctgccttcagttcctcccacctccgtctcctgctgagcagaggaatccagggccaaacacaagccagcccacagcctgggcatcaccaggattctaaaccctccctcctcttcttgctggaggacctgcacctagccacttctgacccagagaagagctgccagccagtgttggagactctgcgccaggccatggatggcactgtgtatgcccacagcaccttggaactgcagacgctgcagcctacagtcaacttccttgccactgtcacagtgccaggatactgtgagcgcccactgtgtccacgcctctttcgactcttcacagtcctggccctggaaagcatgacccaggccaccctgctggaaagacatgtgcctatcattcaggcttggcttgagcgtttcccttctgtggaacgggagcgtgctctggcacgaggtctggttagggcctcagtagaggcctgggaggctgtgtgcaattgcttcatgccttcacccctccacccacactaccacttctccctacactctgtgagccacctactgagcagcctgcagctgctgcccaacagaacaggctcccgaggttttgtggactatcccaaccaccaggagcacttgcgccgggtgtcaggcctgcgaggcacttgtctgaccgttatgatggccacacgcaatgtggtgcgtctttggttgcatgaggcacagagaaccttttgcgaccggctggacagccccagggaacgctcctactgtgccaagctgctcctagtagtagctcaaagtgtcttctgctgtgggccagggccccagcacctgggcaaggaccatcaggagagtgaggaggaggaggaggaggagagggtgcccgaagtagaatctgaaggggagttggcccagtgggaggacttcagcaacagcaatagtgaaacagaggaggaagaggaaccttatggccttcaggtcgccagagtctcaaactccagagatccaagtctaacaccatccataggaccagtaagcagggggatgaaggaaagcataagtcacaagataaggcaagagaaaggcacaagggcatccaactataggctccaggtaaggagatcattcaagacttggtggcagaagaaaccccagatggacctgatctcacccttgttgttaccagtgttactactacatccccaggaaaagccctcagacctggtcttcagtcaggagctgatactggggcctaactctgagacccccaacttgtacctggaacgacagtgggagaagctagaggagcagttggccacctcagctgctcaactgaagttgagcccccacctggcccggtgtcattccatggcccagcacgtggcccgcctggtccgggtgctggccaggccccggcagcatggcctgctgctctcgggggctctgggtactgggcgccacactgccatcactctggcttctagcatttgtcaggcccatttctttcatctaccatctgggtcagaggaggccattctccaatgtctacgagatgccagctggcatgctggcatgttaagccagccagtggctctgttggtacccagtggtgtggatctcactacacttcatcgcctcctggccctggcaacctcaggcagtttccctggccagtacacagaagcagatttggaccgcattggagaacacctccccagggagaaccttggtgtcaaacagaacatcaagaaggaaatggtgttgcagaggttccaccagcaagtgtgcagccaccttcacctgttcttcctgattggagataaacaggcccacaagcagctgccctccacccttttcctgaggctccttcaactggccactgccagcattgaccgctatgaaccctgggaccaagctgccctggccaaggtggcccagcatcacctggagggtgctcagagtgtgccccttgatgacggctcctggaagtacccagacctccaggcctcaattcccagtgtggccaaagccatggctcttatccacctttcggccacccactaccatgagcacctgtgccctgcattgccactcgtcacccccaagaccttcctagacttcctggacactttcctgatgctgcagcaacagacaatcctgaagattaagaacaaggcccagcgggtccagaatgccttggagaatctgagaatgctgattaaggagcacggtacccatgccaatctgatctttgacttggaacagcagctgaaagactccggcaagagtctcagcatgtttcagcagcagctagagcaaagcaagctcctatacaagcagcagctggaagagtgtcggcatcaagagaacctcattgagaacctggccaggcaacgggatgccctgcaagctcagcgagaggctttcctggagcagatgagcaaggcatttctggagcctctgagccagctgcaggtggctgactttgaggagatacggagctatcgagcaccaccagaatctgtggtccgggtaactgatgcaatgtgtgacttgttccaccatgaaacaggctgggccagtgccaaacagctgttatgcactgaggatttttatcaggagctggtgttcttccccaaggagaagataacagactcagagctgataaagttacatctaattctgaaggctccaggtatggacgatgcagccctgcgggcagtgagccgacctgcagccagcctggcagcctggctctgggctgttctgcactatgggctggcgcattgccggggactgcccacggacctgctgctgcagcaagtggaggcaacactcactcgggagcaggcccgcctgggctactaccagtttcaggcccaggagaccctggagcataatttggccctggctaagatggtggaggatgcccaagcttcccacaactgcgtggcaaagaccctcagtcaagcacagtgtgggcagtatcacaaatggcccatgaaggctgcactgctcacgcctatgcgtgcctggactacacagctccagaagctgaagggacgctgcatgactgtgtttggagataccctcctatgttcagctgccatcatctacctgggtcccttcccaccattgcggcgccaagagctactggacgagtggttagctctgtgtaggggctttcaggaggctctgggcccagatgatgtggcacaggcactgaagcggaagcaaaaatctgtcagcataccaccaaagaaccccctgctggctacacactctcccttcagtattctgtccttgctgagctctgaatcggagcagtaccagtgggatggaaacctgaagccacaggcaaagtcggcccacctggcaggcttgcttctgcgaagccccacacactacagtagttgccgttggcctctgctgcttgaccccagcaacgaggccctcatctggttggacccgctgcctctggaagagaatcgatcttttgcgccagccctcactgagggtagagggaaaggcctcatgagaaatcaaaagagagagagtaaaacggacatgaaagaggaagatgatgagagtgaagagagtaatgaggctgaggaccagacaaaagagcagaaggcagaggaaagaaaaaatgagcaggagaaagagcaagaggaaaatgaagagaaagaggaggagaagacagagagccaggggtcaaagccagcctatgagactcagcttccatcccttccctaccttagtgttctttcaggtgctgacccagagctgggttctcagctccaggaggcagctgcttgtggcctgcctgtgttactgaccaatgtggagctgggtctagggtgcgaagaactgcaatggctgctgcaacgggagcagctgagtccaccccaggtgcagcctggcttctgtctgtatctcagcaccaccctctccctctgtgccatggaaaaagtgctaggttgtgaactgctaaaggggctgaatgtgttggatctgggcctgaacatggaaatactggaagaacagatgctgcatgaaatcttgtgcagagagtatcctgaactcgagacccgctggcaggacctaaagatcagagccctagatacctgcaaggctgtggaggctgctgaggagcggctgctgacgatgctgctgttccagaatccgaagcgtcagaagccagccaagtttctgcggaacatagtgagggcccaaggaaagctatgccagctgcgtgctcattgtgaagagttagaagggcagaaactacaggagatggtattgtgggcaccctatcgacctgtggtttggcatggaatggccatggtaaaggccctaagccaactgcagaacctgctgccacttttctgtatgagcccagagaactggctggcagtcactaagcaggctctggacagcatgaagccacgtgagattaatcacggggaggacctggccagccatctactgcaattgagagcacacctgacccgccagctgctgggcagcaccgtgactgcactgggccttacccaagtacccttggtgggtgcattgggcgctttggctctgctgcaagcaacagggaaagcatcagagctggaaagactggcactctggcctggactagcagcctctcccagcacagtccacagcaagccagtctcagatgtggctcgaccggcctggcttgggccaaaagcctggcatgaatgtgagatgttagagctgctgcccccatttgttggcctgtgtgcctccctggcaggccactccagtgcttggcaggcttacctgtcactgtcatccacagtgctgggtcctgcacctgggccagggcctgagccactcagcctcctccagaagctgatcctgtggcgcgttctgcgacctgagtgcctggcaggtgccctggcagacttcaccactagcctcctgggtcggcccctggatgaaaacacgtatgctcccaccatgccctttaaacatagtcaggctactcagcccatgctgatcttgttgccaccgcctggccacccctcagccactctgcatcctctgactgtcatccagaaactggctgccaagtatcagcaggggcagaagcaactgcaggtgatagccctgggctctgaagcctgggacccagtctcagttgtggtcagcactctatcccaggctatgtatgaggggcactggctggtgctggacaactgtcatctgatgccccattggccgaaagagctgctacagctcttgctggaactgttaggcagagccaaggtggttgcagacctggaatcagaacagcttttagaccaacctgaaagcaggaatgtaagcactgttcacagagattttcgtctttggcttattgtgcctgcagagtctagtgcttctttgccagctgtgctgactcagcactccatgcctgttttctggaaccagtccctggagctgggccatgttttgattgacagtgtggagctagcccagcaagtactctacatgcaaccccccacccaggcactacctctgctcctcctccatggcctcctgctacaccggcagctctatggaacaaggctgcaggcacacagggggcgctggagtcaagtgactctaacccaggttcttcagacccaagaccagctgtgggcaagtcttagcaatccccgtgctgccatgcaagagctggctgcttcagttttctacgggggtcctctgggggacactgaggacagggaggccctgattagcctcacacaagcctgcctgagccccagtagtgggagctgggtccagccacacacacctcagtctttgctggccacgctcatgcccctcccagagctaagggagctggatgcaatggcagagtgcaaggcccagatgcacctactgccctcaccacctgaaccccggctctgcggactgagtgagggcccccaagcctggctgttgcgacgccagagtcgcgctctcttgagtgcgctgcagcggagttcacccgtgtgggttcctgagtctcgaagaggcgcccagcttgcggaaaggcgactgcggcaacgcctagtgcaagtcaaccggaggctggagtcactgcaggatctgctgacccacgtgattcgccaagacgagtccgacgccccgtggtcagtgctggggccaaatgcacggcggcctctggagggcgtcttagagaccgaggctctagaactgagccagttggtgggcacgctacaacgcgaccttgattgcctgttgcagcagctgaagggcgcacccccgtgcccctcccgccgctgtgctgcggtggcccacgctctctggactggccgcctacccttgccttggcgacctcatgcgccggccggtccgcagccgccctggcactggctgcgacagttgtcgcgccgtgggcaactgttggttcgttacttgggcgtgggcgcggacgcgagcagtgatgtaccagagcgcgtcttccacctgtcagcctttcgccacccgcgccgcctgctgctggcattgcgtggggaagctgccctggaccagaatgtgcccagctcgaatttccctggtagccgaggctcggtctccagtcagctccagtataaacgtctggagatgaacagcaaccctctgcacttcagggtggagaatggtccaaatcccacggttccagagagagggctgctgctgatcgggctacaggtcctacatgcggagtgggacccaatagctggagccttgcaggacagtccttccagccaacccagccctctgcctcccgtcagcatcagcacacaggccccgggcaccagtgacctgccagccccagccgacctgactgtgtactcgtgtcctgtgtacatgggagggccccttggcaccgctaagctgcagagcaggaacatcgtgatgcatctgcctttacccaccaagctcacccccaacacctgtgtccaaaggagggtccatgtgtgcagcccacccctgtcttgagcccgtctaccaaaataaagttgtagtgattccatgaaaaaaaaaaaaaaaaaaaa

SEQ ID NO: 6182 - DNA, 2721 bp, Homo Sapiens
  NM_144669
gtcggcggcggcggggccggtcgatggcccgggcggcggcggcggcatgcggctcctgttcctggcggtgctgcggccacacaccggcaacgcggtcacggcccagcgcgttcgggcccatctagaggctgcagggcacgtgtgcgttttgaaggatgcctttgactttgaaagccgatctgagattgcaaacctcatcttggctgagaactgcgaggctgccctggctcttcatctctataggggaggcaggcttttgcaaggccaccgaatcccttttggagtcatctttggtggaactgatgtaaatgaagatgccaaccaggcggaaaaaaacacagtcatgggcagagttcttgaggaagccagatttgctgtcgctttcacagagtcaatgaaggaaatggcacaagcgcagtgggtcgatccagtgtttacaagggaagtgaaagccaaagtgaaaagagccgctggggtacgattgattggagagatgcctcaagaagatctgcacgcggtggtgaagaattgcttcgcggtggtgaatagctctgtctctgaaggcatgtcagctgcaattttggaggcaatggatttagaagtaccggtattggccaggaacatccccgggaatgctgccgtggtgaagcatgaagtcacagggctactgttttccaatcctcaggagtttgttcatctggcaaagagactggttagtgatcctgcattagaaaaggaaatcgtagtgaacggaagggaatacgtgagaatgtatcattcatggcaggtggaaagagacacctaccaacagctcatcaggaagctggaaggaagcactgaagattgagggccccgcctcatcagacacctgctctctgacacacagctctgggtgcacactcagagacagagttctggatcacgtgggcccagtgcagttcaaataaaaccagcctcagcggaatcctagaaaatgttagtcgtgagtccccagagccactgcattcatcccatatccttctgtgcgttcagatgctgtcccaggcgtgttcaccagccagtcctgatggaggtgcatgagtgactgggttgactgggacagggaaaggggaactggttttcagggaatttgggagagaatttgattacctgccttagggctttggtgtggacaatagaggcttattttcaagcagtcatggttcagactcctcccgcctgccttctgaccaacctctccccatcgttgccagtttgaaaggcaaaagcaaaacagacgtgtcagctgagccgagtcctcgcaggatttttgttgtgatctcaggactctgacaggcacgtgggtgacccgaggcttctctgaacactagaaagcgctgtgagtgagctcacgcccggcacagctcacttttcaatggtggaattgaaagttgtgctttttagaaaagtggccaggctgcccgcaggccccgcccacctcttggctgaatttgagtggaaaaccaggaaggaacaagcgccacgtcacgcatagcctgcaaatcgcccgcgtgaccctgagatggaggcctgaggctttgggtccagggtgggctcttccccttcccacatcagggacccggggatggatgtcggaagggtcaccagcctccagcctttggcaggatggagcttgggtctgcagggctttgcagccacacagcgaggtcagtccggggccagccgcgccatcatggtaatggtggcctcgccccatccatgtcatccatgtcacatgaggacgtgcagtcttccttgtcctctcctagtggaatttgcctgggagaacctccactgaatactgaaattgttgcatgcctgtggattccttacgacaatggggaacgcggtgtttcccacctcttgtgggtagaaagcagtctgctttgaggaggcgagaaggcaaagccagggcagggcgttgctgtgggaagcgttcggtgaaagcgggtttcgacgcttaggagggccgagggagaagattccaccagcattgtccttgcttcaagttttaggatgtctgaactttcagctttcatgttttcaaccatcatttttttaatggcacaacctacatcttgtttttaaaagaagtagcctcaaattaaactccttaaactctgatgccctggggatgagaacaactagcttggatctcgtgccgtgtaattcaatgtttcattccgctgcctccatcatgtaatagaatcgctttccagaaaggcagttaactggaagcagcagaggctcccagccgtgagaggactgctcaacaatgccccccatcgccgcccccccacccctcgcaccccttgtgttttccctctgaggggcccaagggttatggctttcatgtctaggtgtggggacagaggagggagaggcagatcctgggccgggagaggatggcctggtctgaatctggagtaattaatgccacccaaagaaaaggccctgccaggtccaatgttgtcttagatctgatgatgctgctatttacaaaacactgatcgtccgaaagcttgaatctgttcctcctcgaatgaccctgtagatgcctgacctccaccgtacctccacatcactattcatgtccttctaggaaaatgtgcacatgcctcacgcactatgtgggaagggcgtgtttttaaattaataaagtgtgtcaccattagccatacg

SEQ ID NO: 6183 - DNA, 3168 bp, Homo Sapiens
  NM_144671
aggggcgcgcccgtgggtcgcggactgtccggttgctcccgcctccttccgtcggatccgcgctctcccgcggctgcgccggcccggccgcccaggagacaaagcgctgccgccgccgtcgccgccaccgggccagtcccgaaccatggccgggccaccccgcaacctcgcgcctcccgtcccgtcgccgccctaggcctgcgctgcgagatgcagaaacagaggcccagagagatgaatagcctgcctggggtcccccagcccagatgctgcagagctgacatttgaatccagagaagagcgagctgaggctggagctgagcagagggcagggaggcaagtggtggcctgagaggccccaggctcccctccaggccccgcgattgccaccatgaagctgaacgagcgcagcctggccttctacgccacctgtgacgccccggtggacaatgcaggcttcctgtacaagaagggtgggcggcacgcggcctaccaccggcgctggttcgtgctgcgcgggaacatgctcttctacttcgaggacgctgccagccgtgagcccgtgggcgtcatcatcctggagggctgcactgtggagctggtggaggccgccgaggagttcgccttcgctgtgcgctttgcggggacccgggcgcgcacctacgtgctggccgctgagagtcaggatgccatggagggctgggtcaaggccctgtcgcgtgccagcttcgactacctgcggctggtggtgcgcgagctggagcagcagctggcggctgtacgtggcgggggtggcatggccctgccccagccccagccccagtccctgcccttgcccccgtccctgccctctgccctggccccagtcccatccctgccttctgccccagccccggtcccagccctgcccctgccccgccggcccagtgccctcccgcccaaggagaatggctgcgctgtctggagcactgaggccaccttcaggcctggacccgagccccctccaccaccgcctcgccgccgggcctcggcaccccacgggcccctggacatggcccccttcgcccggctgcacgagtgctatggccaggagatccgggccctgcgtggccagtggctcagcagccgggtccagccctgaggccaccagggcgcctgttttagggggacacaagctctatgccctctgggacaggccgggtcctggagagactgggggagcagatcctgagggaaatcatgggcaaggctggcccccaggccctgagtggcctggttttgggggatgcaggctctgagaaggtgctggattctgagtgggcctttaggaccatgtgacccagaaggcctacccttgaggggaacgtcacgtgcaacactaaggagaatccagggcctgagggggaggtttcctgagaactccggccccaggctggcctgagctgccgggcagaggcctgtgctggcaacaggcattgccgggcctgcagctcagagggtcactgggactgagggcgatctgtggcctgaaaagcaaatgcacagttagtgcagctcctgaccaggccttcagggtggacagagggaggatcggtcatggcagccacacctgggcctggccttgctccgggacctgccagaggagctggcctggctctgtgcctgcctgcctccaggagcaggacggtggctgggagggtagtgactggggacacaggtgcaggtgttagtgcaggaccggaagggtgaggtggcctggtcctcggggctcctggcctgggctggctgaggcaggactctgccaaaagtcccctgccaggcctcatggtggtgctcctggtggcagtggctctctggccgcgggccctgtctgtgtctccgtggtggctctcacagggctctccagacactccttgactgcatccttcagtcttggcccctaggcctggggccccttgggagcttgcctgacctcccttcctgggctgggtagccatggcccgaggtgaccttctagcaggttcccccagggaggggaggccaccagctgactcaccgcctaggaaggcccaggtgctgacctagtggcggagaaaaagccgcacaccgagtgtggcttccagagcccctcttcagctccaggcagccccctctaacatgtcccctcctgagctcagcccccacccccatactcctggtggggaccaggtcttgcttggcttcggggctgaccgccggtcccctttcttctcaccacagtgcccatttttcatccagggagaacctcggggctgggacacctcctggccctcaccctgggtcatgtttacagtcctcagtgccccacaccggtggccccctgaggacacctccaccctgaccttgattttcccaaacgctgcctcttggtgacagactcagcccaaaaccccttccttctgtctctggagacccttgagcttggggaaatatggaggggtgtgtgtctgcaatcaaggcctctgcagctcacggctggcccggtgggctgggacttccgtctgaattttaaatacttagggttcatttttttttctctggcaacaaagcttgatgttttcactgctttagtttcctgtttgctggtgggaggggatacggtctgtgactctggacttgctctgggggaacagttgtcactgcccccggggagaggggcagcttgggctggagaagcacagccagagacagagcccctcgagagggatccttggctgcttcattgtcttccccccagcaagccctgctctccacaggcacctctggggtcttggtatggtccccgctcacctccttccagagtcctgagtggtgtgggtgtgggtggcacaggatctggggcatgggaggggttcagagcttcccagagccccgtgtcctggcagactcagctggtgggctggggtgttaaccccagtcctggcgtaggtttacagactctcaaggtacgttggccctggtctcctgggagagaggggtgagggatgtcccctaccaaagcacaaggtgggatcaggctgcctcctgggttgggtgtcgggggagctgtccggcagcctggcagggagatgcaagggctaaagtaaaattttgtcaagtaatggctgattgtgtcattttttttcccca

SEQ ID NO: 6184 - DNA, 1073 bp, Homo Sapiens
  NM_144673
ggcgcgggagttggcattcggtggtcctggcagttagctgagcacgccctctgagccgctcggtggacaccaggcactctagtaggcctggcctacccagaaacagcaggagagagaagaaacaggccagctgtgagaagccaaggacaccgagtcagtcatggcacctaaggcggcaaagggggccaagccagagccagcaccagctccacctccacccggggccaaacccgaggaagacaagaaggacggtaaggagccatcggacaaacctcaaaaggcggtgcaggaccataaggagccatcggacaaacctcaaaaggcggtgcagcccaagcacgaagtgggcacgaggagggggtgtcgccgctaccggtgggaattaaaagacagcaataaagagttctggctcttggggcacgctgagatcaagattcggagtttgggctgcctaatagctgcaatgatactgttgtcctcactcaccgtgcaccccatcttgaggcttatcatcaccatggagatatccttcttcagcttcttcatcttactgtacagctttgccattcatagatacatacccttcatcctgtggcccatttctgacctcttcaacgacctgattgcttgtgcgttccttgtgggagccgtggtctttgctgtgagaagtcggcgatccatgaatctccactacttacttgctgtgatccttattggtgcggctggagtttttgcttttatcgatgtgtgtcttcaaagaaaccacttcagaggcaagaaggccaaaaagcatatgctggttcctcctccaggaaaggaaaaaggaccccagcagggcaagggaccagaacccgccaagccaccagaacctggcaagccaccagggccagcaaagggaaagaaatgacttggaggaggctcctggtgtctgaaacggcagtgtattttacagcaatatgtttccactctcttccttgtcttctttctggaatggttttcttttccattttcattaccacctttgcttggaaaagaatggattaatggattctaaaagcctaaaaaaaaaaaaa

SEQ ID NO: 6185 - DNA, 2308 bp, Homo Sapiens
  NM_144679
agtgattggagggcccgggcctggcggaagcggggcagaccgggaggggacctggatcatggctgccgcgccgccgctacgggaccgcctgagctttctacaccggctcccgattctcctgaaggggacgtccgatgatgatgtcccgtgtccgggctacctgtttgaagagattgctaaaatctcccacgagtctccgggcagcagccagtgcctgctggagtacctcctgagccgcctgcacagcagctccggccacgggaagctcaaggtgctgaagatcctgctctatctgtgcagccacggctcctccttcttcctgctcatcctcaaacgcaactctgccttcatccaggaagctgcagcttttgcagggcccccagatcctctgcacgggaacagcttgtaccagaaggttcgcgcggccgcgcaggacttggggagcaccctgttctcggacaccgtgttgccgctggctccctcccagcctctggggaccccgcctgccacaggcatgggctcccaggccaggccgcacagcaccctccagggtttcggctacagcaaggaacacggccgcacggctgtgaggcatcagcctgggcaggccggagggggctgggatgagctggacagcggccccagctctcagaattcctcccagaacagcgacctgagcagggtctcggactcgggcagtcattccggcagcgacagccattcaggggccagccgggagccgggtgacctggcagaaagggtcgaggtggtggccctgagtgactgtcagcaggagttgagcttggtgaggactgtgactcggggaccacgcgccttcctgagccgcgaggaggcacagcacttcatcaaagcgtgtggactgctcaactgtgaggccgtgctgcagctgctgacctgccacctgcgtgggaccagtgaatgcacgcagctgagggcgctgtgtgccatcgcctccctggggagcagcgacctcctcccccaggagcacatcctcctccgcacccggccgtggctgcaggagctcagcatgggcagcccgggacctgtgaccaacaaggccaccaagatcctgaggcactttgaggcctcctgtgggcagctgtcccctgcccggggcacctcagctgagcctggccccacagccgccctcccaggcccatctgacctgctgaccgacgctgtgcctctccctgggagccaggtcttcctgcagcctctgagttcaaccccggtctcgtcccggagccctgctccctcatctgggatgccgtccagccctgtgcccaccccacccccagatgcctcccccattccagcccccggagaccccagcgaggccgaggccagactggcagaaagcaggcggtggagacctgaacggatcccagggggcacggacagcccaaagagaggccccagcagctgtgcgtggagccgcgactccttgtttgctggcatggagctggtggcctgtccccgcctggtgggggctggggctgctgcgggagagtcctgtcctgatgctccccgcgccccccaaacatcgtcccagaggacagcagccaaagagcctcctggctcagagccgtcagctttcgcgttcctgaacgcctgacccgatggcctggccctggagtcttcagcttcagctgctgtctggggcggtctgtgcttcctgagcagcctcaaccgtagctgctacagtctccaggcagcttgacttgagaggacgaccctagggctacctcagtttcccccatctcctctgccagaggctctggctatttggacttgaatccctacgagggatggcaggtggcagggcttcagaaatgtcgatctcagggctctcagggggcagtccctgcctgtcttgctctcagacatgaggtttcttgtatgaatgcggaagcgactaccaggttccttatttcattttgatctcagctccctccttccccaggaggtcatgagcagcaacaagccactgctcccccgtcccatcggggtgggctaggtgctgaggctgggtttggtgcatgtgggttgagggtgtcttgtccgggctgccttgtgctgtctggcctgaggccatttcaagtctcagatccctacgtgatccttccctggctctcacctgctcctttaggctgtaattgcttcctacacacgaagcctctgattggagcctctggtccatctcagaaaaaccttccaagagcgctggggtttatgctttctgaataaacactactgtttacatgaaaaaaaaaaaaaaaaaaaaaaa

SEQ ID NO: 6186 - DNA, 2767 bp, Homo Sapiens
  NM_144680
atctgcgtccgcacctgactcagctgggcaccccggagctacggaggggccagcgggctcccttgcccatgcgtctgggagcgcgcgggggacgtggcgaggctgaaaatgagtctctggaagaggaaacccgatgggatgatgcctggagtctctccctctctcatcagggtgcaatcggcatttggggggcgcatggtggagaatacatatccaatgagcagcgctgccctggcctcgagcactaaatgccagttcccctagctgcttgtgacaaccagaaaacgccccaacaaatcaccagacgttggcagttctccccaaagcaaaggctttagagcttcctgggttaatctggctgccacttgtgagcctcggaggttcctgatctgtacaccaggatggagtctccctctgtcgcccaggctggagtgcagtggtacgatcttgactcactgcaacttccgcctcccaggttcaggctgttctcctacctcagcctcctgagttgctgggattacagtgtcctggtgaagacctagttcttgccggagacaattccactgcagaagcactttacttaaaaggacttgccaggctggacaatgcccgttgacttggggcaggccctaggcctgctgccatcgctggcgaaggccgaggactcccagttctcagaatcagatgctgcccttcaagaggaactctccagccctgagaccgcacgccagcttttcaggcagttccgttaccaggtgatgtctgggcctcatgagaccttgaagcaacttcggaagctctgtttccagtggctacagccagaggttcacaccaaagagcagatcctagagatcctcatgttggagcagtttctgaccatcctgcctggggagatccagatgtgggtgcggaaacagtgtccaggaagtggagaagaggcagtgacccttgtggaaagcttgaagggggacccccagagactgtggcaatggatcagtatccaggttctaggacaggacatcttatcagagaagatggaatctccaagctgccaagtgggggaagtggagccccatcttgaagtggtgcctcaggagttgggacttgagaattcatcctcagggcctggggagcttctgagccacatcgtgaaagaggaatctgacacagaagcagaactagccctggctgcctcccagcctgcccgactggaggaaaggctgatcagagaccaggacctcggagcctcactgctcccagcagcacctcaggaacagtggagacaactggattccactcaaaaggagcaatactgggatctcatgctggagacctatgggaaaatggtctcaggagcaggcatttcccatcccaaatctgacctgactaattcaatagaatttggggaagagctggcaggaatataccttcatgtcaatgagaagatcccaagacccacctgcataggagatagacaagagaatgacaaggagaacctaaatttggagaatcacagggaccaggagctcctgcatgcttcctgtcaagcttcaggagaggttccttctcaggcttccttgaggggcttcttcactgaggatgagccaggatgctttggagaaggagagaatctccctgaggctctgcaaaacattcaggatgagggaacaggggaacagctgtctcctcaagaaagaatttctgagaaacaactaggtcagcatttgcctaatcctcattcaggagaaatgtccaccatgtggcttgaggagaagagagagacctcccagaaggggcagccaagagcccccatggcccagaagctccccacctgcagggagtgtgggaagaccttttataggaattctcagcttatttttcaccaaagaactcacaccggagagacatactttcagtgcaccatctgcaaaaaagcctttctgcggagttcagactttgtgaagcatcagagaactcacacgggagagaagccctgtaaatgtgattactgtgggaaaggctttagtgacttctcaggattgcgccaccacgagaaaatccacacaggagagaaaccctataaatgtcctatctgtgagaaaagtttcattcagagatcaaactttaatagacatcagagggttcacactggagagaaaccttataaatgttcgcactgtgggaaaagtttcagctggagctcgagccttgacaaacatcaaagatcccacttaggaaagaagccctttcaatagccagtaaccaaactctctttccccatttctatctcccagcccagtcacaaaaatactcagctccatcaagaggaattgtgtctaagaggatacccctgttaatctccttttttcttggattggagaggagagaatctggacatggctttggacttggaggatatcttggattggattgcacaatggcttaaattcttgattctgcctcaggagaaagaatagtcttcatgtttccactcatccttcctttggacccatcggggaaaaagtctaaattggagatccagttttagaagtgctttctgggaagcatttaatgggattagctgtagtcactgcttatgggaagaacctcagatcagccccttaaaatgagttctagagcaggtcttctgttcctgaaggggagaagcatagagggcctgtgagctcacgtgtgttctttgtcataggggtgaaaaaccaacttcaagtgtcccttgtttgaaataaacttagcagagtcactttct

SEQ ID NO: 6187 - DNA, 8469 bp, Homo Sapiens
  NM_144682
atcccctgtgtgggacctgcccaggtaggcgccaaccattggttataagaacctgaccttggcgcctccagggaaacgcggagtgtcctggagcttgacgcgctggagcttgagaggtctttcaggactgattttggtggaagaagacagcaggcggtgggcattcactgtgctggtgggaagtctggttacattaagaaaggaattctagcaaagttattctgtaaatacaacagaatcagttgcttttgttaaatatattggtgcaagttcaacatggaggcaaatcactgctccctgggtgtgtatccatcttacccagacctggtcatcgatgtcggagaagtgactctgggagaagaaaacagaaaaaagctacagaaaactcagagagaccaagagagggcgagagttatacgggccgcgtgtgctttattaaactcaggaggaggagtgattcagatggaaatggccaacagggatgagcgtcccacagagatgggactggatttagaagaatccttgagaaagcttattcagtatccatatttgcaggctttctttgagactaagcaacacggaaggtgtttttatatttttgttaaatcttggagtggtgatcctttccttaaagatggttctttcaattcccgcatttgcagccttagttcttcattatactgtagatctggcacctctgtgcttcacatgaattcaagacaggcattcgatttcctgaagaccaaggaaagacagtccaaatataatctgattaatgaagggtctccacctagtaaaattatgaaagctgtataccagaacatatctgagtcaaatcctgcatatgaagttttccaaactgacactattgaatatggtgaaatcctatcttttcctgagtctccatccatagagtttaaacagttctctacaaaacatatccaacaatatgtagaaaatataattccagagtacatctctgcatttgcaaacactgagggaggctatctttttattggagtggatgataagagtaggaaagtcctgggatgtgccaaagaacaggttgaccctgactctttgaaaaatgtaattgcaagagcaatttctaagttgcccattgttcatttttgctcttcaaaacctcgggtagagtacagcaccaaaatcgtagaagtgttttgtgggaaagagttgtatggctatctctgtgtgattaaagtgaaggcattctgttgtgtggtgttctcggaagctcccaagtcatggatggtgagggagaagtacatccgccccttgacaactgaggaatgggtagagaaaatgatggacgcagatccagagtttcctccagactttgctgaggcctttgagtctcagttgagtctatctgacagtccttcactttgcagaccagtgtattctaagaaaggtctggaacacaaagctgatctacaacaacatttatttccagttccaccaggacatttggaatgtactccagagtccctctggaaggagctgtctttacagcatgaaggactaaaggagttaatacacaagcaaatgcgacctttctcccagggaattgtgatcctctctagaagctgggctgtggacctgaacttgcaggagaagccaggagtcatctgtgatgctctgctgatagcacagaacagcacccccattctctacaccattctcagggagcaggatgcagagggccaggactactgcactcgcaccgcctttactttgaagcagaagctagtgaacatggggggctacaccgggaaggtgtgtgtcagggccaaggtcctctgcctgagtcctgagagcagcgcagaggccttggaggctgcagtgtctccgatggattaccctgcgtcctatagccttgcaggcacccagcacatggaagccctgctgcagtccctcgtgattgtcttactcggcttcaggtctctcttgagtgaccagctcggctgtgaggttttaaatctgctcacagcccagcagtatgagatattctccagaagcctccgcaagaacagagagttgtttgtccacggcttacctggctcagggaagaccatcatggccatgaagatcatggagaagatcaggaatgtgtttcactgtgaggcacacagaattctctacgtttgtgaaaaccagcctctgaggaactttatcagtgatagaaatatctgccgagcagagacccgggaaactttcctaagagaaaaatttgaacacattcaacacatcgtcattgacgaagctcagaatttccgtactgaagatggggactggtataggaaggcaaaaaccatcactcagagagaaaaggattgtccaggagttctctggatctttctggactactttcagaccagtcacttgggtcacagtggccttccccctctctcagcacagtatccaagagaagagctcaccagagtagttcgcaatgcagatgaaatagccgagtacatacaacaagaaatgcaactaattatagaaaatcctccaattaatatcccccatgggtatctggcaattctcagtgaagctaaatgggttccaggtgttccaggcaacacaaagattattaaaaactttactttggagcaaatagtgacctatgtggcagacacctgcaggtgcttctttgaaaggggctattctccaaaggatgttgctgtgcttgtcagcaccgtgacagaagtggagcagtatcagtctaagctcttgaaagcaatgaggaagaaaatggtggtgcagctcagtgatgcatgtgatatgttgggtgtgcacattgtgttggacagtgtccggcgattctcaggcctggaaaggagcatagtgtttgggatccatccaaggacagctgacccagctatcttacccaatattctgatctgtctggcttccagggcaaaacagcacctatatatttttctgtgaagtgactattaggaagaactccaaaccaaaatactgtgtaaatgtctatgggtgacagtctgctgatggtagaaacctttctttttagttcacaagtcagttagagatttggacagagctgacacaaagagtttggagctcccccatttctggctctcctttcaggggttcctcccccaactcttttcagcagtggtggctgccccccattctgacccctgactcttgcagccagaaagatggtggttttctaaaggaactttagctgtgctgcacaatgcagacctgtgtcttgctctctgggtaaaagccataaaaataagaaactcagcctgtggcctttcttccaaggctggagttctcgagttcttttatgtgacttcgtgtagtttgttgctttaaaaaatttgtccagaattgttttctgcagaagcatggtctgttaggagcttacaggccataggagaagcagttgtttcctgaatttatctttgctgtattcatttagggcttgggagagtcccaagataattcagtcactgtcagattaatcatttcggcagaacaaacaatattgttatgattatttaatccttaaaattgtgatctccagagtttgttatcagaataacccagaccaaggcttaattgtaatagtgaacattaatggtacctttacagagaaattataggccaagagaaaatgctggctttcagtagaagttaatattagaaacccaaatctggttctgaaagtgtgtatcagatgtacggtgaacaaacttgggaaagattttctttaaaaatcaatgagcgttggccaggcacggtggctcacacctgtaatcccagctgtttgggaggctgaggcaggtggatcacctgaggtcaggagttcaagaccagcctggccaacatggagaaaccccatctctactaaaaatacaaaaattagcagggcatggtggtgcatgcctgtatcccagctacttgggaggctgaagcatgagaatcacttgaatcctggaggcagaggttgcagtgagctgagatcatgtcactgtactccagcctgggcaacagagtgagactgtctcaaaaagaagaagaagaaaaaaaatgcagtgagtttatgttgttacattgtaacatctcagcgtagctgtatgcattactctatagcataactacttaagttttatgtcattcttgaactgtgatttttttttctatttgctttcatagtttggtgggccattgttatggactgaatgtttgtgtcccatcctcacccctaaattcccatgttgaagccccaaccttcactgtggagctggggctgctaaggaagtaattaaggttacacgaagtcacagtggagaatctgatctgctaagactggtgtccttatagggagagaccccagagagcttgttcccttcctccctgtgcacacaaacaagagggcatgggagcacacagagagatggcagccacctacaagccaagaggagaagcctcacaatgaacccccccccccaccctgctggcacctatgtcttcgacttccagcccccagactgtgagaaataaatttctgttggttcagccatccagtctctagtgttttgttattgcagcctgagaacacagctgtatgatcattcatcaaactaaaaacactgatacttaacaatgctaatgcaattacttatttgcttttcagtctctacaaaacattctaaaacactaatctaaatactaacaataaaatatttgcataactaatgaaaattaagaaaccacatgcccaatattccatttataagtaatcctatttggctgatttccctccatattgtaagttttgaacttttctgccagtctttctcctatttgtgttaactcatggaattccagttgtctagccttgaaattgtaggctcttctaacttgagcaaaatctgacagatcagcaaaataaggagaaaaatatttcttctttctttctggctgcattaaatgagatacagctcagcaccaaaaagctatctttgtaaatgttcttagtaaactccctggtctttggagttatttcagcctttgagagtaattctttaaaagtctaattctgactggttgaatctctctatatgatttattgccctagtaatatttgaaacagtatcatattttaaaatatataaatatttatgaatttttgttcagcccaaagaggattactgatgctttcttctttttccatatgatgaggaaatgtttagcttatatatttattgcatttctgttttaaataaaaaattgagagtttgtgtttcattaaactgaaaaaaaaggttctgtaaaataaatgattaaatggaggaaaaggagaagactgaggccagcaactccatgatacagccaaaaatgagccagtaaaagattaagcaagattaactgtaaattttttttttttttttttttaaagagaaaaggtctcactgtgtttcccaggctggagggtagtggtgtgatcatagttcactagagccctgaactcctgggctcaagtgatcctcttgccttagcctcccattgctgggattataggcatgagccactgtgtcaggcttaattgggttttgatgggtacctgcctatctctgtaatttggctctagtcatataggacctgcttcattaaagatctgaaaatctatccagccattgtaaaatgaaacaaaatgttttgaaaatttaaattagccttttattttagttcagacatatagaaaagttgcaagcatagtacagaaagttcctatataccccacttagtgccctcctttttaaaatttttttaaacctagcttatttcctttaagatttctgagaattccaggaatgctcacagatctgtccttgtagtctcctgccacttcttgctatggagtgctgtaccaaggtctctgctagtttctagttggcttgacataatgactttcctaaacttcttctgctctgaatctcaagcatggaaagcggtcacatcttttgtttcacgaattaacagtcaacacctggccctacttttaacaaaacttagtaaagccttgagcatagtgaaagacaaatatttaaattatatattagcaggaggctgaggtgggaggatcatatgaggccagcctgggcagcatagcatgacccccccctcgagaagacaacaaaaaattatctgggtgtggtggtgtgctcctgcagtcctagctattccagaggccgaggcgagaggatcgcttgattccaggagttcaaggctgtagttagcgataatcgtgtcactgaatcctagcctgggcaacagaataagaccccatgtctaacaaaataataataaaacaatcaaaagtttaaaattagttattaaatgtcagtgtgcccagagtcctttgaccacagatgatcctgatggccttctctcgccttgtccctgtgcctccttctaccatttttcttcctgagattcaaaagtaagtagcggacagggttcccatttaccactaaatacttcagtgggtgtttcctaaaaggacatttatagtaccatcatcaaaatcagtaaattaaccctgatactattatctaatctgtagactttattgaattatatcagttgtgcctcaagtgtctttatgtttttttctcaaaagagaaaaagttctggtccaggatttgatctaagatcatgcattgtattgagctttcctttcttttaagtctcatttaatctggagatgttaatctgtctttgtcatatctttgacactattgaagaggactggcctattattttgcagagtatctgattttgggtcatttcatgtgttctcatgattagattcaggttatgcatttttggcatgaattccatagaagggctgttacggttctcagttcacggtattagaaggcacttgatagtgattagttccattcctgatgatgttaactctgatcatttggataaagtggcgtctgccaggtttccctactgtgcagttacaatttgctttttgtaattaataaagtgtgtgtgtgtgtgtgtgtggagggggggtgtttttgcttctgaacgcataatatttgagatttttttctaattaaaaagtaattattcaaagagttcagagaactgatactgatcacattctttgaccccacatgcaaatacattataaactagtaataaaacggtaactagaaaaatgttcatatcttttggaattaaaaaagtgtttaactcgtggatcaaagcagaaattctgtaaccattgtcacagcaggttctaacaagcaagtttaaggaggagagaatttcagtcctagagaatttcagtcttattcaaatgctttcctagaaagaggaaacagttcctaactaatttcatgaggctggcataatcttgataacaagtctgataggtaaagtatgaaaggaaaattgcaggtcactcaattatcactcaaatatctacatgaaaaattctaaacaaaattttagcaaacaaaatccaacaatttgtaaaagtgataatacaccacgaccaaggtggttcaagtcaggaattcaacgttgattttggcgttaaaaaatcaatcatcaggcccagtgaggtggctcactcctgtaatcccagactttctggaggctgaaggaggaaagatccttcaggccagaagtttgagtctgcactgagctgtgactgcatcaccgcactctagcctgggtgccagtttgagaccctgtctccaagaaaaaaaaattaatcagtgtaattcaccacagattaagagttcaaaagagaaaaatcacatgatcatctgaatagaggaaaaagcttttgataaagttcaacatccattcataataaggactctcagcaacttagaagtataaaaacacttttggaaatcaacaaagggaatttacagcatgaacaaacagcaagccagcatggtggctcacacctgtaatctcagcacttccagaggccaaggcaggagaatcacttgagcccaggggttagagacaagccttggcaacatagcaagatcctggctctacaaaaaataaaataaaatgaaataaaatttaaaaattagctgggtttggtggtgtgtgcctgtagtcccagctactgggaggctgaggtgagaggatcactggagcccaggaggtgaaggctgcagtgggctaaaaacaaccagaacaaccccccaaccccctccccgcaaaacactataaagaatagcaacacaaggttcaatgtaaactttgatatggtgttttacctctgaggagaggcttattgttaatattctttagccgtgtaaggggttcacagatgttcatacttttgttctttataccttatatgtattctataaatattgtttctactcaatagttaataaaaacataatttaaaagttc

SEQ ID NO: 6188 - DNA, 1939 bp, Homo Sapiens
  NM_144683
cgcctccgccttcggaggctgacgcgcccgggcgccgttccaggcctgtgcagggcggatcggcagccgcctggcggcgatccagggcggtgcggggcctgggcgggagccgggaggcgcggccggcatggaggcgctgctgctgggcgcggggttgctgctgggcgcttacgtgcttgtctactacaacctggtgaaggccccgccgtgcggcggcatgggcaacctgcggggccgcacggccgtggtcacgggcgccaacagcggcatcggaaagatgacggcgctggagctggcgcgccggggagcgcgcgtggtgctggcctgccgcagccaggagcgcggggaggcggctgccttcgacctccgccaggagagtgggaacaatgaggtcatcttcatggccttggacttggccagtctggcctcggtgcgggcctttgccactgcctttctgagctctgagccacggttggacatcctcatccacaatgccggtatcagttcctgtggccggacccgtgaggcgtttaacctgctgcttcgggtgaaccatatcggtccctttctgctgacacatctgctgctgccttgcctgaaggcatgtgcccctagccgcgtggtggtggtagcctcagctgcccactgtcggggacgtcttgacttcaaacgcctggaccgcccagtggtgggctggcggcaggagctgcgggcatatgctgacactaagctggctaatgtactgtttgcccgggagctcgccaaccagcttgaggccactggcgtcacctgctatgcagcccacccagggcctgtgaactcggagctgttcctgcgccatgttcctggatggctgcgcccacttttgcgcccattggcttggctggtgctccgggcaccaagagggggtgcccagacacccctgtattgtgctctacaagagggcatcgagcccctcagtgggagatattttgccaactgccatgtggaagaggtgcctccagctgcccgagacgaccgggcagcccatcggctatgggaggccagcaagaggctggcagggcttgggcctggggaggatgctgaacccgatgaagacccccagtctgaggactcagaggccccatcttctctaagcaccccccaccctgaggagcccacagtttctcaaccttaccccagccctcagagctcaccagatttgtctaagatgacgcaccgaattcaggctaaagttgagcctgagatccagctctcctaaccctcaggccaggatgcttgccatggcacttcatggtccttgaaaacctcggatgtgtgcgaggccatgccctggacactgacgggtttgtgatcttgacctccgtggttactttctggggccccaagctgtgccctggacatctcttttcctggttgaaggaataatgggtgattatttcttcctgagagtgacagtaaccccagatggagagataggggtatgctagacactgtgcttctcggaaatttggatgtagtattttcaggccccacccttattgattctgatcagctctggagcagaggcagggagtttgcaatgtgatgcactgccaacattgagaattagtgaactgatccctttgcaaccgtctagctaggtagttaaattacccccatgttaatgaagcggaattaggctcccgagctaagggactcgcctagggtctcacagtgagtaggaggagggcctgggatctgaacccaagggtctgaggccagggccgactgccgtaagatgggtgctgagaagtgagtcagggcagggcagctggtatcgaggtgccccatgggagtaaggggacgccttccgggcggatgcagggctggggtcatctgtatctgaagcccctcggaataaagcgcgttgaccgccgaaaaaaaaaaaaaaaaaaaa

SEQ ID NO: 6189 - DNA, 4742 bp, Homo Sapiens
  NM_144684
tcccacaaacccggaagcggatcgcgtggagtgaaggtcacgccgcggcgcgattgacttctaaagagtcatgctgtgtgatgaaaaagcccagaagagaaggaagaggaaagcaaaggagtcagggatggctcttcctcagggacacttaacattcagggacgtggccatagaattctctcaggcggagtggaaatgcctggaccctgcacagagggctttatacaaggatgtgatgttggagaactacaggaacctggtctccctgggaatctctcttcctgacctgaatattaactccatgttggagcaaaggagggagccctggtctggtgagagtgaagtgaaaatagcaaaaaattcagatgggagggagtgcatcaaaggtgtgaacacagggagcagctatgcattgggaagcaatgcagaagacaaaccaattaaaaaacaacttggagtatcctttcacttacatctgtctgaactggagctatttccagatgaaagggtaataaatggatgtaatcaagttgaaaactttatcaaccacagttcctctgtttcctgtcttcaagaaatgtcttccagtgtcaaaacccccatttttaataggaatgattttgatgattcttcatttctcccacaagaacagaaagtacaccttagagaaaaaccttatgaatgtaatgagcatagcaaagtctttagagtatcttccagccttactaaacatcaagtaatccatactgtagagaaaccttacaaatgtaattcatgcggcaaggtctttagtcgcaattcacaccttgcagaacattgtagaattcatactggagagaaaccttacaaatgtaatgtctgtggcaaggtttttagttacaattcaaactttgcacgacatcaaagaattcataccagagagaagccgtatgaatgtaatgaatgtggtaaagtcttcagtaataattcttaccttgcacgacatcaaagaattcatgctgaagagaaaccttacaaatgtaatgaatgtggtaaaggcttcagtcataagtcatctctagcaaatcattggagaatttatactggagagaagccttacaaatgtgatgaatgtggcaaggccttctataggattgcgctccttgtacgacatcagaaaattcatactggagagaaaccttacaaatgtaatgaatgtggaaaggtctttattcaaaattcgcacctagcacaacattggagaattcatacaggagagaaaccttacaaatgtaatgaatgtggaaaagtatttaatcaactttcaaatcttgcacgacatcgaagaattcatactggagagaagccttacaaatgtaatgaatgtggtaaagcatttagtgagtattcaggcctttcagcccatcttgtaatccacactggagagaagccttacaaatgtagtgaatgtggcaaggcattcagacacaagttatcactaaccaatcatcagagaatccatactggagaaagaccttacaaatgtaatgaatgtggcaaggtcttcaatcgaattgcacaccttgcacgacatcggaaaattcatactggagagaaaccttacaaatgtaatgagtgtggcaaggcctttagtcgcatttcatacctagcacaacattggacaattcatatgggatagaaactacaaatgcaacaaatgcgtcaaagaatttagtgtgcactcaagccttactacccatcttttattccatactgcaaagaaattttgcaaatgtaaagaatatgacaaggtcttcaaacacaagtttttctaataactcattagagaatttatactggagagacttcacaattataataaatgtgtggaaaagtcttcaaaaaaatttcacaccttgcaaaaggagatctaaaaaacacaatcagaaatgacaaaggggacattaccaccaaccccacagaaatacgaaaaaccctcaaagattactataaacacctgtatgcacacaaactagaaaacctagaaaaaattaataaattccttgaaagatataaccccccaagattgaaccaagaagaaattgcatccctgaacagaccaataatgagttccaaaatttaatcactaattaaaaatctatcaaacaaaactctggaccagacagatttatagttgaagcctacgagatgtataaagaaaagctgttaccaatcttactgaaactgttcaaaaacatggatgcagagggactcctccctatctgattctatgaggccagcatcattctaataccaaaacctgacaggcacaatgaaaaaagaaaacttcaggctggtactcctgacgaatataggtgccaaaatcctcagcaaaatactagtaaaccaaatccatctgcacatcaaaaagctaatccaacattatcaagcaggctttagtgttgggctgcaaggttggttcagtatacacaaatcaataaatgtgatttatcacatacacagaactaaaaacaaaaaccacatgaccatgatcatctctttagatgcagaaaggtttttaataaaattcaacatcccttcattttaaaaaccctcaacaaattacacattgagggaacatacttcaataagaaccatctatgctggactcacagccaaattaatactgaacaagcaaaagctggaagcattccccttgagaactggaaaatgacagggatgaccactctcaccactccgattcaacatagtactggaagtcctaagcttagtgatcaggcaagataaagatatgaaaggcatatataaataggaagaggggaagtcagtttctcttgcagaagatataattctgtatttagaaaacctgttgtctctgcccaaaggctcctagatctgataaacaacttcaaaaaagtttcaggatacaaaatctgtgtacaaaaattagttgcatttctatacaccagtaatgtccaagctatgaaccaaatcaagaatggaatcccattcacagtagccacaaaaagtataaaatacctaggaatacagccaaccaggtaagtgaaagatttctacaatgagaattacaaagcagtgcacaaagaaatcagaaacaataaaaattgaaaaatatctcatgctcatggataggaagaatcagtattgttaaaatactgcccaaagcaatttacagagccaatgctatttctatcaaactaccaatggcatttttcacagaatcagaagaaaacattctgaaatttatttggaaccagaaaagcccaacctaaatagcaaaagcaatcctaagcaaaaagagcaatgtttgaggtatcacactacccaactttaaaccatactacaaggctacagcaactaaaacagcatggtactggtataaaaaaagacacatagatcaatggaataggtaagagaacccagaaataaaggcatatacctacaaccatgtgatcctcaacaaaactgacaagcaatgaagtaagaacttcattcaataagtggtgctggcataactggctagccatatgcaggatattgaaactggacccctatccttcacgatatacaaaaatcaactcaagatggattaaagacttaaatataaaacctaaaagtattaaattcctagaagaaaacccaggaaatgccattctggacataagtgctggaaaagacttaatgatgaacaccccaaagcaattgcaacaaaaacaaaaattgacaagtgggacctaattaaactaaataacttctgcacagcaaaagaagctatttgcagactacagaatgggagaaaatgtttacaaactgcatctgacaaagatctaatccagaatctataaagaactcaaacaaatcaacaatgagaaaaacaaccccattaaaaactgggcaaaggccatgaatagacctttctcaaaagaatacatacatgtggcaataagcatatgaaaaaaatggttaatatcgctaatcattaaggaaatgcaatcaaagccacaatgagataccatctcagacctgtctgaatgggtattatcagaatgggtattattaaaaaatcaaaacatagatgctagtgaggctgcagagaaaagcaaatacttatacactgctggtgggaatgtaaattaattcagccattgtggaaagcactgcagcgatttctcaaagacataaaagaacatagcattcaacccagcatcccattactgggtgtatacctaaaggaatataatcattccaccataaagacaaacacttgtatgttcattgcagcactattctcaatagcaaagatgtggaatcaacgtaaatgcccatcagcagtagaccagataaagaaaatttggtacatatacaccatggaatactatgcagccataaaaaagaacaagactgtgtcctttacagcaacatagatggagctgaggctcttatcctaagtgaattaatgcaggaacagaaaatgaaatatcccatgttctcacttataagtgggagctaaacattgattacacatggactcaaagaagggaacagtagacacgggcttatgggtggaggttgggaagaggatgaagattgaataactgcctgttgggtactatgctgattacctggggacaaaattaactgtacaccaaactcctgcaacatgcagttgacccatgtacacatactccttgaacctaaaataaaacatgaaaaaaagcaaa

SEQ ID NO: 6190 - DNA, 2476 bp, Homo Sapiens
  NM_144686
ctgagaaaccacaggaagtgtaccttactccctccgggccacctgctggccaggtacacacctgcccctggcccctcccttacctggggcagtgtctgcctggtggccactagagacagcccagcctgggccatggaagaaaacccgaccttggaatcagaagcctggggctcctctagggggtggctggccccccgggaggccagaggaggcccatcgctgtcttctgtgctgaacgagctgcccagtgctgccacccttcggtaccgagaccctggggtgctgccttggggggcgctggaggaggaggaggaggatggaggaaggagcagaaaggccttcacagaagtcacccagacagagctgcaggaccctcacccttcccgggaactgccctggcccatgcaggccagacgggcacacaggcaaagaaatgccagcagggaccaggtggtctatggctctggaactaagacggaccgatgggcgcggctacttcggaggtccaaggagaaaacaaaggaaggcttgcgaagcctgcagccctgggcgtggacactgaagaggatcgggggccagtttggcgccggcacggagtcctacttctccctgctgcgcttcctgctccttcttaacgtgctggcctctgtgctcatggcctgcatgacgctgctgcccacctggttgggaggcgctcccccaggccctcccggccccgacatctcctcgccctgcggctcctataacccccactcccagggcctggtcacctttgccacccagctcttcaacttgctctcgggtgagggttacctggaatggtcccctctcttctatggcttctacccgccccgcccacgcctggcggtcacctacctgtgctgggcctttgccgttggcctcatctgcctcctgctcatcctgcatcgctcggtgtctgggctgaagcagacactgctggcggagtccgaggctctgaccagctacagccaccgggtgttctcggcctgggacttcggtctctgcggggacgtccacgtgcggctgcgccagcgcatcatcttgtacgaattaaaggtggagctggaggagacagtggtgcggcgccaggctgcggtgcggacgctgggccagcaagccagggtttggttggtgcgggtgctgctcaacctgctggtggtcgcgctcctgggggcagccttctatggcgtctactgggctacggggtgcaccgtggagctgcaggagatgccccttgtccaggagttgccactgctgaagcttggggtgaattaccttccgtccatcttcatcgctggggtcaattttgtgctgccgcccgtgttcaagctcattgctccactggagggctacactcggagtcgccagatcgtttttatcctgctcaggaccgtgtttcttcgcctcgcctccctggtggtcctgctcttctctctctggaatcagatcacttgtgggggcgactccgaggctgaggactgcaaaacctgtggctacaattacaaacaacttccgtgctgggagactgtcctgggccaggaaatgtacaaacttctgctctttgatctgctgactgtcttggcagtcgcgctgctcatccagtttcctagaaagctcctctgtggcctctgtcctggggcgctgggtcgtctggcggggacccaggagttccaggtgcccgacgaggtgctggggctcatctacgcgcagacggtggtctgggtggggagttttttctgccctttactgcccctgcttaacacggtcaagttcctgctgcttttctacctgaagaagcttaccctcttctccacctgctccccggctgcccgcaccttccgggcctccgcggcgaatttctttttccccttggtccttctcctgggtctggccatctccagcgttcccctgctttacagcatcttcctgatcccgccttctaagctttgtggtccattccgggggcagtcgtccatctgggcccagatccctgagtctatttccagcctccctgagaccacccagaatttcctcttcttcctggggacccaggcttttgctgtgccccttctgctgatctccagcatcctgatggcgtacactgtggctctggctaactcctacggacgcctcatctctgagctcaaacgtcagagacagacggaggcgcagaataaagtcttcctggcacggcgcgctgtggcgctgacctccaccaaaccggctctttgacccccgcagcccacgtcccgctttcagaccccaggcccattgtaagcctaggtcacaacatctgtaaactaggagaactggagaagactccacgcccttccagctttggtatctggagatttccagggcccctcgccgccacgtccctgactctcgggtgatcttccttgtatcaataaatacagccgaggttgctgagcgcgctttgaaaaaaaaaaaaaaa

SEQ ID NO: 6191 - DNA, 3871 bp, Homo Sapiens
  NM_144687
attggtgagtggggcagggcaggagggaactgaagagtgagaaagcattatttcagcaaaaggtctttcctcccttgctctctcctccaaccactggctcagcctctccgcccgctgcctgtgaatgatgcaatggaaggtgtgctggggtcgccctgtgtcccgtgcataggagcatctcagcctccaggtcctctcctttggggctcacggcacccccatgctacgaaccgcaggcagggacggcctctgtcgcctgtccacctacttggaagaactcgaggctgtggaactgaagaagttcaagttatacctggggaccgcgacagagctgggagaaggcaagatcccctggggaagcatggagaaggccggtcccctggaaatggcccagctgctcatcacccacttcgggccagaggaggcctggaggttggctctcagcacctttgagcggataaacaggaaggacctgtgggagagaggacagagagaggacctggtgagggataccccacctggtggcccgtcctcacttgggaaccagtcaacatgccttctggaagtctctcttgtcactccaagaaaagatccccaggaaacctacagggactatgtccgcaggaaattccggctcatggaagaccgcaatgcgcgcctaggggaatgtgtcaacctcagccaccggtacacccggctcctgctggtgaaggagcactcaaaccccatgcaggtccagcagcagcttctggacacaggccggggacacgcgaggaccgtgggacaccaggctagccccatcaagatagagaccctctttgagccagacgaggagcgccccgagccaccgcgcaccgtggtcatgcaaggcgcggcagggataggcaagtccatgctggcacacaaggtgatgctggactgggcggacgggaagctcttccaaggcagatttgattatctcttctacatcaactgcagggagatgaaccagagtgccacggaatgcagcatgcaagacctcatcttcagctgctggcctgagcccagcgcgcctctccaggagctcatccgagttcccgagcgcctccttttcatcatcgacggcttcgatgagctcaagccttctttccacgatcctcagggaccctggtgcctctgctgggaggagaaacggcccacggagctgcttcttaacagcttaattcggaagaagctgctccctgagctatctttgctcatcaccacacggcccacggctttggagaagctccaccgtctgctggagcaccccaggcatgtggagatcctgggcttctctgaggcagaaaggaaggaatacttctacaagtatttccacaatgcagagcaggcgggccaagtcttcaattacgtgagggacaacgagcctctcttcaccatgtgcttcgtccccctggtgtgctgggtggtgtgtacctgcctccagcagcagctggagggtggggggctgttgagacagacgtccaggaccaccactgcagtgtacatgctctacctgctgagtctgatgcaacccaagccgggggccccgcgcctccagcccccacccaaccagagagggttgtgctccttggcggcagatgggctctggaatcagaaaatcctatttgaggagcaggacctccggaagcacggcctagacggggaagacgtctctgccttcctcaacatgaacatcttccagaaggacatcaactgtgagaggtactacagcttcatccacttgagtttccaggaattctttgcagctatgtactatatcctggacgagggggagggcggggcaggcccagaccaggacgtgaccaggctgttgaccgagtacgcgttttctgaaaggagcttcctggcactcaccagccgcttcctgtttggactcctgaacgaggagaccaggagccacctggagaagagtctctgctggaaggtctcgccgcacatcaagatggacctgttgcagtggatccaaagcaaagctcagagcgacggctccaccctgcagcagggctccttggagttcttcagctgcttgtacgagatccaggaggaggagtttatccagcaggccctgagccacttccaggtgatcgtggtcagcaacattgcctccaagatggagcacatggtctcctcgttctgtctgaagcgctgcaggagcgcccaggtgctgcacttgtatggcgccacctacagcgcggacggggaagaccgcgcgaggtgctccgcaggagcgcacacgctgttggtgcagctaccagagaggaccgttctgctggacgcctacagtgaacatctggcagcggccctgtgcaccaatccaaacctgatagagctgtctctgtaccgaaatgccctgggcagccggggggtgaagctgctctgtcaaggactcagacaccccaactgcaaacttcagaacctgaggctgaagaggtgccgcatctccagctcagcctgcgaggacctctctgcagctctcatagccaataagaatttgacaaggatggatctcagtggcaacggcgttggattcccaggcatgatgctgctttgcgagggcctgcggcatccccaatgcaggctgcagatgattcagttgaggaagtgtcagctggagtccggggcttgtcaggagatggcttctgtgctcggcaccaacccacatctggttgagttggacctgacaggaaatgcactggaggatttgggcctgaggttactatgccagggactgaggcacccagtctgcagactacggactttgtggctgaagatctgccgcctcactgctgctgcctgtgacgagctggcctcaactctcagtgtgaaccagagcctgagagagctggacctgagcctgaatgagctgggggacctcggggtgctgctgctgtgtgagggcctcaggcatcccacgtgcaagctccagaccctgcggttgggcatctgccggctgggctctgccgcctgtgagggtctttctgtggtgctccaggccaaccacaacctccgggagctggacttgagtttcaacgacctgggagactggggcctgtggttgctggctgaggggctgcaacatcccgcctgcagactccagaaactgtggctggatagctgtggcctcacagccaaggcttgtgagaatctttacttcaccctggggatcaaccagaccttgaccgacctttacctgaccaacaacgccctaggggacacaggtgtccgactgctttgcaagcggctgagccatcctggctgcaaactccgagtcctctggttatttgggatggacctgaataaaatgacccacagtaggttggcagcgcttcgagtaacaaaaccttatttggacattggctgctgaatggtcctatctgctggctctcccctgagatctggacagaggaagatgggagggtgctcatcacccccccagcataatgatcagcctccttcctagagacagactcatgcagattgagatcaaaagtccctctgcttgggatcaaattaatgtttgacagagctggccaggcgtggtggctcatgtatgtaatcctagcacttcgagaggccgaggcaggtggatcacgaggtcaggagtttgagattagcctggccaagatggtgaaaccctgtctctactaaaaataaaaaaaaattagccaggcatggtggcgggcacctgtagtcccagctactcaggaggctgaggcaggagaatcgcttgaacccgggaggtggaggttgcagtgagccgagatcgcgccactgcactccagcctgggcgacagagtgggactccatctcaaaaaaaaaaaaaaaaaaa

SEQ ID NO: 6192 - DNA, 3014 bp, Homo Sapiens
  NM_144693
caggtggccctgaattcattgcctgctcagcaaaataaaggcccagtgtggaagccggaacttgcatttgaagaaggatgggaaggatgggttgaggagggcccatccccagcagcccgagagggaggaggccacggagacttggagcattcccgtttcttccagagcgctgcgggataaaggaggagcgtcctgcttcccggctgccctgttgctgtcggagtcacaggatggcggctgtcatcctgccctcgactgctgctccgtcttccctgttcccagcctctcagcaaaaaggacacacacagggcggagagctggttaatgagctcctgacaagctggctacggggcttggtaaccttcgaggatgtggccgtggagttcacccaggaggagtgggcgttgctggaccctgcccaaaggacactgtacagggatgtgatgctggagaactgcaggaacctggcctcactagggtgtcgtgttaataaacccagtctgatatcccagttggaacaagacaagaaggtggtgacagaggaaagaggaattctaccaagcacctgtccagatttggagactctacttaaagccaaatggttaactcctaagaagaatgttttcagaaaagaacagtctaaaggtgtaaaaacggaaagaagtcatcgtggagtgaaactcaatgaatgtaatcagtgttttaaagtcttcagcacgaaatctaacctaactcagcacaagagaattcatactggagaaaaaccctatgactgtagtcaatgtgggaagtccttcagtagcagatcttaccttactattcataagagaatccataatggggagaaaccctatgaatgcaatcactgtgggaaagcatttagtgatccctcatcccttagactgcatttgagaattcacactggagaaaaaccctatgaatgtaaccagtgttttcacgttttccgcaccagttgtaacctcaaaagccacaagaggattcacacgggggagaatcaccatgaatgtaatcagtgtggaaaagctttcagcacaaggtcctctctcactgggcacaatagcattcatacaggggagaaaccttatgaatgtcacgattgtgggaaaaccttcaggaagagctcctatctgacacagcacgtaagaactcatactggagaaaaaccctatgaatgtaacgagtgtgggaaatccttcagcagtagcttttctcttactgtgcacaagagaatacataccggagagaaaccctacgagtgcagtgactgtggaaaagcctttaataatctctcagctgtgaagaaacacttaagaactcacactggagaaaaaccctatgaatgtaatcattgtgggaaatccttcacaagtaactcctatctttctgtgcacaagagaatacataatagatggatatgaattactgcaggaacttctggaggaaagcactcattgatctttcatccctaagatagtttgagagagctcacactggatatataagttatttgttgcagcataacaaatgatccccgcaaattttgtggcttcaaacacgaaatgtttattctctaacaatttctacagatcaggaattcaagaacagcttatctctgtagttacactgcaggatctctcatgcctttacttacaatcaagatgtcagccaaagctatagtcatctaacatctttactgatgaacagtccacttccaagatgacttattcacatgcctggaaagttgatgttggttgttgtcaggggaccttcagtcattaccatgtaggcctctttacaaggcccagctccttgacaatttggcaataagttctcgccaaggttagtgatccaagagaggaccaatacagaggccaaaatggcttttatggcctatcctcaggaggactgctaagctttcacttatttcctattgtgttggtctcacaacacaccaatcctgatacaatgtgagagactgcagaaggtatgaataccaggaaacagataactcagaagcatctgggaaatttgccatggaattaatgaagaaaagccctcagcacatcatccttctactctaatcaatatgaaatagcattcagtaactcctattaattcactctgaagagaaaccttttgaggacaatctgtatggtaaagctctcagctcgaattctcaccttcatgggcccagaagattatgtactgagagaatcctgaagaatggaacagctgtagaaagccttcagtgctatcagcagggattcatgtgacagctcacactaagggagaaaacctgtgaaggtctcagaaggcttcagtgacagtcatcccttaagacacactggaaatcacacaatggaacaacactcagaaatgcggaataccctgcagcaaaagtgttcacattactgagcaaactatagtgtggtattctgcagtgactatgggaaagccttgaatgttctatcggtttttaagggacttgagaattaattctggagagaatgccccattgaacatcatcaatattggagagctttctgtttttctacatttgttaggaaacttgtgagcattcacactacagagaaacttgaaatataaagaagaagagaaagccttcagtgatgcctctgtgttagggaaaatatggaacttctccctggatgcaaaacctatgagtatattaatattggaaaatttttcagtgattcttctctttcttgtatatgagagaacttacatggagaaacccctaggaatgtaatcagtgttaggatgcctcagcctgaactcttcactgagtggccacaattttcactgggaacaaaaagtataatcactgttttgagtgtgggatatcctttatcagtgtctcatctgtagattggactgctggctcattaatttttttagtctttttttcttttaatataaacatttgtgtatagctgttccctaaaataaacattaacatatttcataatttt

SEQ ID NO: 6193 - DNA, 1686 bp, Homo Sapiens
  NM_144695
actgcgccgagggccgccatcgctattgcggcattctccctcggctccggaggtaggggcaactcttctcttcctgtctgggaaaaagaccatagctcaaaaggaaggccgagggagaagttagaaagggatgatgaacgaagcgttttgaggggactgcaacgccgcggcaatacccgcccctgagctgcgcgcactaccgcctcggtagctgtcatggccgccgggtcacgtgactccggcttggcgccgtcctggttttccgtcaccctggttctgtagtctcggttctccgactccctctttttctcgcttgtggactccgatatattgcccttcttcccttagaagaactgctgaaccgactctgagaaatttgaaaacatctggagaaaatgacccattggtttcataggaacccattaaaagccacagctcctgtgtcttttaattactatggtgtagtcactggcccttctgcttcaaaaatatgcaatgacttgaggtcatccagggcacgactccttgaactgttcactgatttgagctgtaatccagaaatgatgaagaatgcagcagattcatatttctcacttttacaaggtttcataaattctttggatgaatctacccaagaaagcaagttacgatatattcaaaatttcaagtggactgatacattgcaaggacaggttccaagtgcccagcaggatgctgtttttgaattaatttccatgggatttaatgtagctttatggtataccaaatatgcttcaagactggctggaaaagaaaatataacagaagatgaagcaaaagaagttcatcgaagcctaaagattgcagctgggatttttaaacatttaaaggaaagtcatctcccaaaactcattacacctgcggaaaaaggaagagatttagagtcacgactcatagaagcatacgttattcaatgtcaggctgaagctcaagaagtaacaattgctcgagcaattgaactaaaacatgctcctggactaattgctgcactggcgtatgaaacagccaatttctatcaaaaagctgatcatactttatccagtttggagcctgcatattctgccaaatggagaaaatatcttcacttgaagatgtgtttctacacagcttatgcttactgttaccatggtgagactttattggctagtgataaatgcggtgaagcaatcaggtctctccaagaagcagaaaaattgtatgcaaaggcagaagcactgtgtaaagaatatggagaaaccaaaggacctggaccaacagtcaaaccttcaggacatctgttctttaggaaacttggaaaccttgtgaagaacaccctagaaaaatgtcagagagaaaatggatttatttactttcaaaaaattccaacagaagccccacagctggaactcaaagcaaattatggtctcgtagagcctatacctttcgaatttcctcctacaagtgttcagtggacaccagaaacattggctgcatttgatctcaccaaaagacccaaggatgacagtactaaacccaaaccagaagaagaagtgaaacctgtgaaagaaccagacatcaaacctcaaaaggacactgggtgctacatctcctaaaatacaacttgcacttagaatttctctagcagtaaataagataaaccacaaaaga

SEQ ID NO: 6194 - DNA, 1430 bp, Homo Sapiens
  NM_144706
cttccctcagcttgaaacacctgctgcttcgcggcggtggctttgtgccacttttcccagggcttgggcatcattctggacccatgttcggtgaaccggttactctcagagctgctttcgggcgcagctcctgctgcagccagggcccgttttaagagaggcttccaggtccagccctcccgctgcagcctgcagggagcgagccggcctgtcccgatgacatagacactaggtttttacagcaattctctgatgaccttgatatggtagaacgctgtgtatttcaagagtaagctctcgtttgaggagactaacaattcctgttttcgccagatttcttcttgaatggcaacctaaatgccagtccaaagaggcccccaatagacttgttcacccttcatgtcctcaactctggggaagttaagtaatcaagttgaagaaacacttccactacttaaaaaggtacctgcaaattactttcacatttgttcagctatcctaatgggattttcacttagtaaatctgctactcaggtatctgctatacatatggattcaaaagtggatgatcacttaatacgagggactgaaaaaagcaggttggaaccagcgactcagttatttcaaaacaccaagaaaataagattagaagacacaaatcaagaaaactttacaaggattgaagggactggcacaggatctctttctgggaaagccttgggttcagtggtatatgtcaaagaaagtgatggactagaaatgacagatgtggaatgaagcaatttgtacgtattaccaaagaaaccaaaaactgcctttgactaaggggggtgttgaaagagaacttaaccttattaggaaaccctgacaaaatgatggaagactattgccttattttgcactatttgtgaatcatcttacactgcatttttttatgatgcttattcaaaaggcagttgctttagggtgaaaaagccttccaagattcaaagcagatttctctggtattatattatatccttcttaaaaaccagagtttttaagtaacagtatttgaatggcatcaaaacattttcattttaatgtatttctttaacaagtggttaaaaaaagtgtccaagcagccgggcgcagtggctcacacctgtaatcccagcactttgggaggccaaggcgggtcaatcacctgaggtcaggagttcgcaaccagcctggccaatatggtgagaccccatctctactaaaaatgcaaaaagttagccaggcatggtggtgggcacctgtgatcccagctacctgggaggctgaggaaggagaatcgcttgaagcctggaggcggaggctgcactgagctgaggtcatgccattgtactccagcctgggcaacaagagcaaaactccgtctcaaaaaaaaaaaaaaaaaaaaaaaa

SEQ ID NO: 6195 - DNA, 4443 bp, Homo Sapiens
  NM_144708
ctcacaagaagctgagcagatgctggtgccatgcttgtacagcctgcagaattaagcttcaaaaaggacacactagatttaattagaaatgttaagattgcccaaaaaaggattacctagatttgagcaagttcaggatgaagacacctacctggaaaatttagcaatacaaagaaatgcatctgctttttttgaaaaatatgatcggagtgaaatacaagagttactaactactgcactagttagctggttgtctgccaaagaggatgtgcgctctcaagtagacctcccatgtggaattatgagtcaaatgaataacgtaggcttctccactgcaatcctactgactcccgtggaccctactgccctcttagactatagagaggtccatcaaatgataagagagttggctattggaatttattgcctaaatcaaatcccttccatcagtttagaagctaattatgatcagagttcttcttgtcaattacctccagcttattatgataccagaattgggcaaattctgatcaatattgactacatgctgaaagcactatggcatggaatatatatgcccaaagaaaaacgagctagattctctgaattgtggcgtgccatcatggacattgatcctgatggaaaacctcaaacaaataaagacattttttcagagtttagttcagcaggtttgactgatattacaaaggatccagactttaatgaaatctatgatgaagacgtgaatgaagatccaacatatgatcccaacagccctgaagaaacagctgtatttatgaaatatgctgaaaatattatgctaaagttaacattcagtaccacacaaattcaacagtatgaaaatgtctttatatttgaaacaggctattggcttactaatgctataaaatataatcaggattatcttgatatctgtacctaccagagactacagcaaagattatatcttcaaaaaaagattattcaaaaacactttgagaagaaaaaagatatcagaagagggataggatacctaaagttaatatgttttctgattccatttctactgagtttaaagaagaaaatgaaagttccatatttaagtagtctgcttcagcctttttcagatgacaaggtcaagacagagcgagaattgcctccatttatttatggaagagattttaaatgccagaattttcactacaaagagaatcaatattttcatgttcatggaggaattgaatttgatatcagcaccccttcaattgagaatgccttggaagattttcagaaaaatttagaaaaaatacgagattgtgctgctaatacatttatagaagattcaggatataaagaatattactcaataccagtcatggaatttcatggaaaaagctactatgtgatctattttgaactagaaactttctatcagcaactatataagacacagtggtggggagccataaatgaaatagtgaacaatctgagactgaaaagacttccactgacagatgctcaattacatgaacaatttaagaaaaagcttggtttcaaaagagctatgaaatgcaagagtattccatttggtatgaagtccgctgttgaaagagggttgtctgcagttttccacacatttagccgtaaaacctcaagctcaacaatcaatgtttcagatgaagcaggttatactatttttcatcatgctgccctgcacaacagagtttctattatatgtcaactgtgcaatgctaacttcaaggtcaaccagaggcgctttgttacgttcagccaaggtccaacacctctacaccttgctgcacaggcttgctcattagaaacaacagtttgtctactgtgttccaaagctgattacacgctttctgaaaaaagaggctggatgccgattcactttgccgctttctatgacaacgtttgcatcattattgctctctgtaggaaggatcctagtttgctagaagctgaggcaacagctgagaatcagtgcactccactgttacttgctgccacttcaggagcactggacactattcaatacctgttttctatcggtgctaactggagaaaaacagatattaaaggaaataatataatccatttatcagtgttaacctttcatacagaggttctcaaatatataataaaattaaatattcctgaactcccagtgtggaaaactttggtagaaatgttacagtgtgaaagctataaacgaaggatgatggccgtcatgtccttggaagtaatttgcttagcaaatgatcaatactggagatgtattttggatgcaggcaccattcctgccttaatcaatctattaaaaagttccaaaataaaactgcagtgcaaaactgttgggttattgagtaatatctcaacccacaaaagtgcagtgcatgctttggtagaagcgggaggcattccatctctaatcaacctactggtttgtgatgagcctgaagtacactctcgctgtgctgtcattctatatgatattgctcaatgtgaaaacaaggatgttattgccaaatataatggaatcccaagcctgataaatctattgaacttaaacatagaaaatgtgctagtaaatgtaatgaactgtatacgggtattgtgtataggaaatgaaaacaatcaaagagctgtgagagaacataaaggcctcccatatcttatcagatttctgagttctgattcagatgtgttgaaggctgtatcttctgctgcaattgctgaggttgggcgtgacaataaggaaattcaggatgctatagctatggagggagcgattcctcctctggtggctctttttaaagggaaacaaattagtgtccaaatgaaaggtgcaatggctgtggaatcactggcaagtcacaacgctcttatacagaaagcatttctggaaaaatcgttaactaaatatcttttaaaactcctaaaggcatttcaaatagatgttaaggaacaaggagctgttgcactttgggccttggcaggacaaacactaaaacaacaaaaatatatggcagaacaaattggatacagctttataataaatatgcttttgtcaccatcagctaaaatgcagtatgttggaggtgaagctgtcatagctctaagtaaggacagcaggatgcatcaaaatcaaatatgtgaagggaatggaattgcaccattggttcgcttactaagaattagtacgattgctgaaggcacacttctcagtgtcatcagagcagtgggatccatttgtattggtgtagcccatacaagcaatcctgtcagtcaacaattggttgtagatgaaaatgcctttccagtacttatccaactactaagaaatcacccttctcctaacattaaggttgaagtggcattttccttggcatgcattgtcctagggaatgatgtgttacagaaagacttacatgaaaatgaaggatttgaatatgctgatgtcctttatcttcttcactcaacagaaaaggatatttgcttaagagcaggctatgcattaacactttttgccttcaataatcgctttcaacaatacttaatattggaaagtggaataatgaccatatctatttttgaacgttttcttgaatcaacagttgaaactgagaaggcaatggcagcatttcagattgttgtactggctaaagtcattagagatatggaccatattactttgtctgcaagaggtgttactattttagttgatagtctgtattcagttcagacttctactattgtcttgacagggaatttaatagcaagcctggctcattctagagctggtatcccagaagcatttaccacattaggaacaatccaacggctctgctatcatttgtactcgggaatagaagaggttcgtgcagcttgttcctctgctcttggctacttaacatacaatgcaaatgctttccgcatcctattaaaagaatgcaggaataaacctaatcagttcattcgtataaaaaataatatcagcagagatgcaagtattaacccagcatttttaaaggaatttcaaatgcaacaaacactggtgggacttccttccttaagtctggagaagaatggaggaccatccataattcctatctttaaaagagggaaggagcaccgaagaaaattaaaacctaaaattcaaccaaaagattctttgactttattacctcctgtaactaacttcatgggactcttcaaagcaacaaaaaagaccaaggattcccataatattttttctttttcatctacaattacatcagatatcacaaatgtatcaagaccaagaatagtgtgtttgaaccaacttgggaaacatgtccagaaagccaacccagagcctgcagaaggctaataaaacattttagaatgaaaggaaaaaaaaaaaaaaaaaaaaaaaaaaaa

SEQ ID NO: 6196 - DNA, 893 bp, Homo Sapiens
  NM_144716
gcctgcgcgatgcaagacgggagaaaaggaggggcgtacgcgggcaagatggaggcgactacggctggtgtgggccggctagaggaagaggcgttgcggcgaaaggaacggctgaaggccctacgggagaaaaccgggcgcaaggacaaggaagatggggagccaaagaccaagcatctcagagaagaggaggaagaaggcgagaagcacagggaacttaggctgcggaactatgtcccggaggatgaggacctgaagaagaggagggtgccccaggccaaaccggttgcagtggaggagaaggtgaaggagcagctggaggccgccaagcccgagcccgtcatcgaggaggtggacctggccaacctcgctcctcggaagcctgactgggacctcaagagagatgtggccaagaagctggagaaactaaaaaagcggactcagagggccattgccgagctgatccgtgaaaggctgaaaggccaggaagacagcctagcctctgcagtggatgctgccaccgaacaaaagacctgtgactccgactgaggcatgccctgccccaccactcgcccatcaggcctgtcctgcagaggatggtcttgggcagggatgggggctaggcttgccatcacctccagtttggcttctgagcagagactccctgcccatcaagtctgaaacccccatggatgaggtcagctccttgtctgctgggtggcccctgccattctgaatggaggcagaaccagcaacaactctgggcgtgcctgtgtctgcacatgtggatgtacatatgtctgtatatatgtatatattttgaactttctaaaaaaaaatctggaaatagaaacaagtaaacccctgtgtgtggcaaaaaaaaaaaaaaaaaa

SEQ ID NO: 6197 - DNA, 1512 bp, Homo Sapiens
  NM_144723
acttcgctgtgaagatggcgtcgggcagcgggacaaaaaacttggactttcgccgaaagtgggacaaagatgaatatgagaaactcgccgagaagaggctcacggaagagagagaaaagaaagatggaaaaccagtgcagcctgtcaagcgagagcttttacggcatagggactacaaggtggacttggaatccaagcttgggaagacaattgtcattaccaagacaacccctcaatctgagatgggaggatattactgcaatgtctgtgactgtgtggtgaaggactccatcaactttctggatcacattaatggaaagaaacatcagagaaacctgggcatgtctatgcgtgtggaacgttccaccctggatcaggtgaagaaacgttttgaggtcaacaagaagaagatggaagagaagcagaaggattatgattttgaggaaaggatgaaggagctcagagaagaggaggaaaaggccaaagcgtacaagaaagagaaacagaaggagaagaaaaggagggctgaggaggacttgacatttgaggaggacgatgagatggcagctgtgatgggcttctctggctttggttccaccaagaagagttactgaggctttctgtgcttggcctgactttggcctatgctggacctaactttgcgtgtgtgtgtgtgtagtagggggtcatttctttttgggtaatgggaaagttcttaagagtgtcaatggggagggatagagggtgggggctcatggtttccctctactttgggagagggcacagattgcagaggtaatgctgtggcatattgcttctgcctcagtgtatcactggagtcacaggaccctgcccacctgagttcccaataaagaaaaacctccccttctgaggctgctttcccaaaactccccctgcatctttatctcttcatctatcccacctcttgtctgaacatcccacctttatcctgtgttctgcctttgttttaattttaactcatgttcatcctgcaacagaagcattctctaggtcccagtttccagttgattgcatatccttgatcagccctttttcccatcctgccctatggttctctagccacctgtgcatgcatgtgtatttctgcctggttctatggtgtgtggatgtgtgtgcatgaatctgtcatatagagggggtccgagctggaatcctagagcattgctgccctggggcctgatgttcttggcttcctcagagcatgtaacaggaaattaaatgggatgagtgtttggtgtggtttgtgtctgatgagttttttaacattcaggtgtagattgtttcagcttctcttgtttcattttcctgaagatttatgtttttgtctaccttgtgagcaggcttttggaagaacctgtttgatgcaaaaaagaaaatgaaaaacaaaacaaaaaatccccaaaaccttattatgggggcccttcggtcttagaagctgtttgacatgtataataaatggcattgactggg

SEQ ID NO: 6198 - DNA, 3379 bp, Homo Sapiens
  NM_144726
agactccctgtctttgcggtttgggagatgatgagaaaccacagaattgctagtagtttatgtggagatcaggtcttctccaagaaaaaaaaaaagaaaaaaaaaaacaacatggctgcaaaggagaaactggaggcagtgttaaatgtggccctgagggtgccaagcatcatgctgttggatgtcctgtacagatgggatgtcagctcctttttccagcagatccaaagaagtagccttagtaataaccctcttttccagtataagtatttggctcttaatatgcattatgtaggttatatcttaagtgtggtgctgctaacattgcccaggcagcatctggttcagctttatctatattttttgactgctctgctcctctatgctggacatcaaatttccagggactatgttcggagtgaactggagtttgcctatgagggaccaatgtatttagaacctctctctatgaatcggtttaccacagccttaataggtcagttggtggtgtgtactttatgctcctgtgtcatgaaaacaaagcagatttggctgttttcagctcacatgcttcctctgctagcacgactctgccttgttcctttggagacaattgttatcatcaataaatttgctatgatttttactggattggaagttctctattttcttgggtctaatcttttggtaccttataaccttgctaaatctgcatacagagaattggttcaggtagtggaggtatatggccttctcgccttgggaatgtccctgtggaatcaactggtagtccctgttcttttcatggttttctggctcgtcttatttgctcttcagatttactcctatttcagtactcgagatcagcctgcatcacgtgagaggcttcttttcctttttctgacaagtattgcggaatgctgcagcactccttactctcttttgggtttggtcttcacggtttcttttgttgccttgggtgttctcacactctgcaagttttacttgcagggttatcgagctttcatgaatgatcctgccatgaatcggggcatgacagaaggagtaacgctgttaatcctggcagtgcagactgggctgatagaactgcaggttgttcatcgggcattcttgctcagtattatccttttcattgtcgtagcttctatcctacagtctatgttagaaattgcagatcctattgttttggcactgggagcatctagagacaagagcttgtggaaacacttccgtgctgtaagcctttgtttatttttattggtattccctgcttatatggcttatatgatttgccagtttttccacatggatttttggcttcttatcattatttccagcagcattcttacctctcttcaggttctgggaacactttttatttatgtcttatttatggttgaggaattcagaaaagagccagtggaaaacatggatgatgtcatctactatgtgaatggcacttaccgcctgctggagtttcttgtggccctctgtgtggtggcctatggcgtctcagagaccatctttggagaatggacagtgatgggctcaatgatcatcttcattcattcctactataacgtgtggcttcgggcccagctggggtggaagagctttcttctccgcagggatgctgtgaataagattaaatcgttacccattgctacgaaagagcagcttgagaaacacaatgatatttgtgccatctgttatcaggacatgaaatctgctgtgatcacgccttgcagtcattttttccatgcaggctgtcttaagaaatggctgtatgtccaggagacctgccctctgtgccactgccatctgaaaaactcctcccagcttccaggattaggaactgagccagttctacagcctcatgctggagctgagcaaaacgtcatgtttcaggaaggtactgaacccccaggccaggagcatactccagggaccaggatacaggaaggttccagggacaataatgagtacattgccagacgaccagataaccaggaaggggcttttgaccccaaagaatatcctcacagtgcgaaagatgaagcacatcctgttgaatcagcctagaggagaagcagcaggaatgatgctttgatactctggaggagaagttaactcaagatggaattcatgttctgatttgaggaatgaaaatgagatgatcaggcaggaaactgacattccaaggatctaatccaggaagtactctcagtggggaccacctgctttcatcccctgacattgtgggagaaattttgcaatgtatgctaatcaaaatgtatttatatgttctctgctgatgttttatagaggtttgtgaagaaaattcaacctcagcaacttcagaaactgcccctgatacgtgtgagagagaaataaaatcagattttgagtgttgaagggactgaggaagtgaggataaagagcatgaggacagcatggaaagaaggaggcagaagtggaactgaactttcactctccatgggacagatcaatctcattatcaagtctgaatagcaaccagccctctcctccaccccgtttctcctcagttaattggagctcagtcaggtgattattgagtcttgtacagcactgaaatgaaatcaaagatgaagaagcattgattgtattcaaagattgaagcacgctcatactttgtatgtgctttagggaaggggtgggtgggcacttgggccttgcgggtgcattcatgtaatctgagactcttgaactttatgacggagtcttcagtattttgatgtatatgaaacttttgttaaatatgttgtatacttcgctggctgtgtgaagtaaactaaaactctgatgaacactttggagtctgctttagtgaaggagaccaaagtgggaagggctttagggcactgatagaggccctgggtgtacttttcaatcctgtgtaatgtttaattcttgcaactgaatcaaaacagtgttaaattatggcaatatttgcactttgggaatgagtacataactgtatgatcacactctgcaaatgccacttttaaagctgttaatagactttgcaccttttctttgacaaggatgtgtcatatttaaatttttacattcatcatggctacaggtagaactggggaggggggaatgtaattttttatgggaattttgatatgaaaagaaactagtcatttatttatacaataggcttggctcaaaaagtgtttttcagacctcggtattcctaatgtgggatgtgactttattttatttttagtagcaaatttggatgtagactgacagacatagctgaatgtcttaataaatttaaatttgaagataaaaaaaaaaaaaaaaa

SEQ ID NO: 6199 - DNA, 1765 bp, Homo Sapiens
  NM_144729
ttacatttacagtgtagcaaaagagaaagtaactatgttgctgctggagatcaatgaagccgagtgaatgggggctgaatgtgcgagtccatagctgaagaggagcgccagatggtggaggaatacacttatttatgaagtggacttagtagttttaagcagaaccatgaaaacctctgtgacaactccctccagctccaagagtgccgggaggtggggggcggcgcatccgcggcctcgagcttgctacctcagcccatccccaccacccctgacatcgagaacgctgagctcacccccatcttgcccttcctgttccttggcaatgagcaggatgctcaggacctggacaccatgcagcggctgaacatcggctacgtcatcaacgtcaccactcatcttcccctctaccactatgagaaaggcctgttcaactacaagcggctgccagccactgacagcaacaagcagaacctgcggcagtactttgaagaggcttttgagttcattgaggaagctcaccagtgtgggaaggggcttctcatccactgccaggctggggtgtcccgctccgccaccatcgtcatcgcttacttgatgaagcacactcggatgaccatgactgatgcttataaatttgtcaaaggcaaacgaccaattatctccccaaaccttaacttcatggggcagttgctagagttcgaggaagacctaaacaacggtgtgacaccgagaatccttacaccaaagctgatgggcgtggagacggttgtgtgacaatggtctggatggaaaggattgctgctctccattaggagacaatgaggaaggaggatggattctggttttttttctttctttttttttttgtagttgggagtaagtttgtgaatggaaacaaacttgtttaaacactttatttttaacaagtgtaagaagactataacttttgatgccattgagattcacctcccacaaactgacaaattaaggaggttaaagaagtaatttttttaagccaacaataaaaatataatacaacttgtttctcccccttttccttttaagctatttgtagagtttatgactaaatagtctgtgcaggttcatagaccgaagatactacacactttaaaccaattaaaaagaaccaaaagtaaatagaaaagacattgaatcaccaaggcctgggatcaacctgggctgtccacacagaaaacaaaaacccaaccaaaccaagccctgttgtgctcactggtgcaaagagaagatcagggcagcttaagtggtctaagaatccttcaggcattctttaaggagaaaaaggatacctttgattttgtgtgtttcatgctctggattttttttttttttccttctctgggtttaagagattttttttgaaatagtgaggaactgaccattatatgccttcactggcttcttgtgcaataatatgatgttttaagtgtgcaaacaagttagagctggcagctgaatgatagacaaatagtgcaaatttgccagcttggagatagaaaggaattcaacaatatatcaaatactttccttcccacctttttccttttttttttttttttctgatttgattctggttacagtgccataaaccttgttacatatgtatatcagaatgtaagaaaaaaaaatttatttaaaaatatttttcgcaaaaaaaaaaaaaatcttggtgtgtttctgttgattgtgtaaaaatttattttcattatataaatgaaactgg

SEQ ID NO: 6200 - DNA, 3714 bp, Homo Sapiens
  NM_144732
agaacaaatcattgtgggaagctgggaggagagagagagagaggaagtcggacgtgggcgaggggcggggtgtctggactggaacctctgggcccacatgccatggacaatattaccaggcagaaccaattctacgatacccaagtcatcaaacaagaaaacgagtcaggctacgagaggagaccactggaaatggagcagcagcaggcctatcgtccagaaatgaagacagagatgaagcaaggagcacccaccagcttcctcccgcctgaagcttctcaactcaagccagacaggcagcaattccagagtcgaaagaggccttatgaagaaaaccggggacgggggtactttgagcaccgagaggataggaggggccgctctcctcagcctcctgctgaagaggatgaagatgactttgatgatacccttgttgctattgacacctataactgcgacctccacttcaaggtggcccgagatcggagtagtggctatccgctcacaattgagggctttgcatacctgtggtcaggagcccgtgccagctatggggtcagaaggggccgtgtatgcttcgagatgaagatcaatgaggaaatctccgtgaagcaccttccgtctacagagcctgacccccacgtggtccgtatcggctggtccctggactcctgcagcacccagctaggcgaagagcctttctcctatggctatggaggcactgggaagaagtccaccaatagccggtttgaaaactacggagacaagtttgcagagaacgatgtgattggctgctttgcggattttgaatgtggaaatgacgtggaactgtcttttaccaagaatggaaagtggatgggcattgctttccgaatccagaaggaagccttggggggtcaggccctctatcctcatgtcctggtgaagaattgcgcagtggagttcaacttcggacagagagcagagccctactgttctgtcctcccggggtttaccttcatccagcaccttccccttagtgagcgtatccggggcaccgttggaccaaagagcaaggcagaatgtgagattctgatgatggtgggcctgcctgctgctggcaagaccacatgggccatcaaacatgcagcctccaacccttccaagaagtacaacatcctgggtaccaatgccatcatggataagatgcgggtgatgggcctacgccggcagcggaactatgctggccgctgggatgtcctgatccagcaggccacccagtgcctcaaccgcctcatccagattgctgcccgcaagaaacgcaactatatcctagatcagacaaatgtttatgggtcagcccagagacgaaaaatgagaccatttgaaggcttccagcgcaaagctattgtaatttgtcccactgacgaggacctaaaagaccgaacaataaagcgaaccgacgaggaagggaaggatgtcccagatcatgcggtcttagaaatgaaagccaacttcacgttgccagatgttggggacttcctggatgaggttctgttcattgagctgcagcgggaggaagcggacaagctagtgaggcagtacaacgaggaaggccgcaaggctgggccaccccctgaaaagcgctttgacaaccgaggtggtggtggcttccggggccgcgggggtggtggtggcttccagcgctatgaaaaccgaggaccccctggaggcaaccgtggcggcttccagaaccgagggggaggcagcggtggaggaggcaactaccgaggaggtttcaaccgcagcggaggtggtggctatagccagaaccgctggggtaacaacaaccgggataacaacaactccaacaacagaggcagctacaaccgggctccccagcaacagccgccaccacagcagcctccgccaccacagccaccaccccagcagccaccgccaccacccagctacagccctgctcggaaccccccaggggccagcacctacaataagaacagcaacatccctggctcaagcgccaataccagcacccccaccgtcagcagctacagccctccacagccgagttacagccagccaccctacaaccagggaggttacagccagggctacacagccccaccgcctccacctccaccaccacctgcctacaactatgggagctacggcggttacaacccggccccctataccccaccgccaccccccactgcacagacctaccctcagcccagctataaccagtatcagcagtatgcccagcagtggaaccagtactatcagaaccagggccagtggccgccatactacgggaactacgactacgggagctactccgggaacacacagggtggcacaagtacacagtagccagtgtgacccagaggctcccggaggcccctgccggcttcctccaccagcgcctgcctcggcccctcctctgcccccgccagatcccgtggtgctggggatggggtcatcccagggctgcctccctccagcccactgcctcccctctgaggggcttccttcccctccatagggccaggcatttttttctggattcaaacaggcaacaatgaccttttattttctgtttgtccccacctccccagccttccacctcctgttcttcctaccttcttcctttttgactaaataatccccacctcccttgatcatacagtgaggctacagtgactgaggggagaatcccctcctgttcactctcccaaccctgctccagcccctcagcttcccagaccctcatgcagttggttgtaaattctcccaggagctgttttactgtctacttttcaggattaaaaaaaaaatcaaaacttaaaaaaaaaaaagtttaaaaagcaaaatggggagggggaggaagcagtgacttttttttggtaattatgcgcttttttttaatttttagaatttgtctttttactgtgggtgggctgttgatatttcatcaagataagcatttctttcctgagttcaggtgactgaggaagagccacaaaacaaaacacaacaaaaccaaaccacagaatcatctttaacccaactttttatacgatgccccagttccccataactttgcacacaagcttctgtgttcagttgaattgtaactgctttttgtatttggagagagtgactattgaacttgaaaccttttattccgggcgtcttggtagtttctggtgggattcagtgggtgagagggaagaaggggaggttggggggctccttcccttcagaacttgaagtttctcccactgcctcctctccagtggtctcccaggtgccagacccaaaagcttttcctacagtgataccctttatttttacttccccttgactcatatgttttaacatgattttaacaaactgcacttattaagaaatgtgtttgccctgttttgtttggtttcgttttgttttctttgaataaatgacatggcacctcctagcaggaaggaagcagggttgaaaccctgaagtgttactgcagttggccgttaattggggtgggggcctctttaaagggaaattatttactcattcattaaacaacttaactgagggattcatgtgcctggccccgattttggtgctaaaaatgcacgcttaaacaagggtccctggtttaaaatccactagttcatttttaaagtgcttctcttgttctctacctctcacagtcta

SEQ ID NO: 6201 - DNA, 2221 bp, Homo Sapiens
  NM_144736
gtcggggcgtgtcttctcccggaaatggtctaagccccagctcctggcggagcgagctagcctgcgaatttcagcatgagtgtactgctgaggtcaggtttggggccgttgtgtgccgtggcgcgcgcagccattccttttatttggagagggaaatacttcagctccgggaatgagcctgcagaaaacccggtgacgccgatgctgcggcatcttatgtacaaaataaagtctactggtcccatcactgtggccgagtacatgaaggaggtgttgactaatccagccaagggttattatgtgtaccgtgacatgctaggcgaaaaaggagatttcattacttcacctgaaataagtcaaatctttggggagctactaggtatatggttcattagtgaatggatggccactggaaaaagcacagctttccagctggtggaactgggcccaggtaggggaaccctcgtgggagatattttgagggtgttcactcaacttggatctgtgctgaaaaattgtgacatttcagtacatctggtagaggtaagccaaaaattaagtgagattcaagcattgacactgactaaagagaaggtcccgttagagcgaaatgctggatccccagtgtatatgaaaggtgtcactaagtctgggattccaatttcctggtaccgagatctgcacgatgttccaaaagggtacagcttttatcttgcacatgaattttttgatgttcttcctgtgcataaatttcagaaaacaccacagggatggcgagaagtatttgttgacattgatccacaggtttctgataaactgaggtttgttttggcaccttctgccaccccagcagaagccttcatacaacatgacgaaacaagggatcatgttgaagtgtgtcctgatgctggtgttatcatcgaggaactttctcaacgcattgcattaactggaggtgctgcactggttgctgattatggtcatgatggaacaaagacagataccttcagagggttttgcgaccacaagcttcatgatgtcttaattgccccaggaacagcagatctaacagctgatgtggacttcagttatttgcgaagaatggcacagggaaaagtagcctctctgggcccaataaaacaacacacatttttaaaaaatatgggtattgatgtccggctgaaggttcttttagataaatcaaatgagccatcagtgaggcagcagttacttcaaggatatgatatgttaatgaatccaaagaagatgggagagagatttaacttttttgccttgctacctcatcagagacttcaaggtggaagatatcagaggaatgcacgtcagtcaaaaccctttgcatccgttgtagctgggtttagtgaacttgcttggcagtgatatttcagcttggacattttacccttcagtcggcccaagaaatcaaaataaaggaaacacatttcatatactgcaggtaacaaaagtcaaagtattttatcttttcacagcaagaacagtccatgttgtatataatacaaccaacattatagaacttttagggttgtgactggctttggtgcaaatgtgtgctcaagctaataagttattgtgaaactgagtttcctttaacttacaaagctagttgccatatttctattttattttaaaaagtaaacatgcggctgggcgtggtggctcatgcctgtaatcccagcactttgggaggctgaggtgggcatatcacctgaggtcagcagttaaagaccagcctgaccaaaatggagaaaccccatctctactaaaaatacaaaactagccgggtatggtggtacatgcctgtaatcccagctactcaggaggctgagacaggagaatcacttgaacctgggaggtggaggttgcggtgagctgagatcgtgccactgcactccagcctgggcaacaagagcaaaaatccctctcaaaaaaaaaagtaaacatgggcactgattgttttaataaaaatgggaaacagactaaatggctattcacaggaaactgataagatatatgttatttttttaaatgagctagggcaatatgttttgacagaaaactctctaagatttagtaagtgaaaaaaagtaggatgcaagagtttttatagttgattccatttttgttgaaggagaaaaactaaataaatacgagtaatttcatagaaacgaaaaaaaaaaaa

SEQ ID NO: 6202 - DNA, 1121 bp, Homo Sapiens
  NM_144772
gggccgggccgggccgggggcgcgcgctctgcgagctggatgtccaggctgcgggcgctgctgggcctcgggctgctggttgcgggctcgcgcgtgccgcggatcaaaagccagaccatcgcctgtcgctcgggacccacctggtggggaccgcagcggctgaactcgggtggccgctgggactcagaggtcatggcgagcacggtggtgaagtacctgagccaggaggaggcccaggccgtggaccaggagctatttaacgaataccagttcagcgtggaccaacttatggaactggccgggctgagctgtgctacagccatcgccaaggcatatccccccacgtccatgtccaggagcccccctactgtcctggtcatctgtggcccggggaataatggaggagatggtctggtctgtgctcgacacctcaaactctttggctacgagccaaccatctattaccccaaaaggcctaacaagcccctcttcactgcattggtgacccagtgtcagaaaatggacatccctttccttggggaaatgcccgcagagcccatgacgattgatgaactgtatgagctggtggtggatgccatctttggcttcagcttcaagggcgatgttcgggaaccgttccacagcatcctgagtgtcctgaagggactcactgtgcccattgccagcatcgacattccctcaggatgggacgtggagaagggaaatgctggagggatccagccagacttgctcatatccctcacagcccccaaaaaatctgcaacccagtttaccggtcgctaccattacctggggggtcgttttgtgccacctgctctggagaagaagtaccagctgaacctgccaccctaccctgacaccgagtgtgtctatcgtctgcagtgagggaaggtgggtgggtattcttcccaataaagacttagagcccctctcttccagaactgtggattcctgggagctcctctggcaataaaagtcagtgaatggtggaagtcagagaccaaccctggggattgggtgccatctctctaggggtaacacaaagggcaagaggttgctatggtatttggaaacaatgaaaatggactgttagatgccaa

SEQ ID NO: 6203 - DNA, 4731 bp, Homo Sapiens
  NM_144778
agcaacagagtttagactgtctttgcttcatcatctgaaggtaaaattttccagatacggcagacggctttcagagtacaataaacagggaatgagaactatttacatggaagtttctttctcatgatgcggtggagaagcctcggccacttggttctgccagatgttcctggggttactgtaaatgggaaggacaggcagagctaaacaaggtttatcatttaaaagtgcctgtgtgaagtcacttttgctggaaaactgcagcttgggagctttctttgtattcacatcccactcttctgtcaagtacactttaccctgaccttatgagtggatgaagatacctcagttgtctgactttgccaattgcttaatttcagaatttaaaaaggggaaagaaaaacatcctgctaaaatatgaacatctgagtgtcttattttccaacatcgtcaatagctgtgagcgtcagcattaaatattctcccaaggagtgccatgatattgaagtcactttattaataacagctgtatctgcaaaacagtcaagagactcggacgttgaaagccagagatgacactgagcatgcttttattgcggcctaccatctttaagtgggacatattgattgatgagtgattgcctgtccatacactctctcatcatcctgttccttggattggacttcactaagcaatttatcactcaccttcagacttacatgtgggagttttcacaacagtagttttggaatcattagaacttggattgatttcatcatttaacagaaacaaacagcccaaattactttatcaccatggctttgaacgttgccccagtcagagatacaaaatggctgacattagaagtctgcagacagtttcaaagaggaacatgctcacgctctgatgaagaatgcaaatttgctcatccccccaaaagttgtcaggttgaaaatggaagagtaattgcctgctttgattccctaaagggccgttgttcgagagagaactgcaagtatcttcaccctccgacacacttaaaaactcaactagaaattaatggaaggaacaatttgattcagcaaaaaactgcagcagcaatgcttgcccagcagatgcaatttatgtttccaggaacaccacttcatccagtgcccactttccctgtaggtcccgcgatagggacaaatacggctattagctttgctccttacctagcacctgtaacccctggagttgggttggtcccaacggaaattctgcccaccacgcctgttattgttcccggaagtccaccggtcactgtcccgggctcaactgcaactcagaaacttctcaggactgacaaactggaggtatgcagggagttccagcgaggaaactgtgcccggggagagaccgactgccgctttgcacaccccgcagacagcaccatgatcgacacaagtgacaacaccgtaaccgtttgtatggattacataaaggggcgttgcatgagggagaaatgcaaatattttcaccctcctgcacacttgcaggccaaaatcaaagctgcgcagcaccaagccaaccaagctgcggtggccgcccaggcagccgcggccgcggccacagtcatggcctttccccctggtgctcttcatcctttaccaaagagacaagcacttgaaaaaagcaatggtaccagcgcggtctttaaccccagcgtcttgcactaccagcaggctctcaccagcgcacagttgcagcaacacgccgcgttcattccaacagggtcagttttgtgcatgacacccgctaccagtattgtacccatgatgcacagcgctacgtccgccactgtctctgcagcaacaactcctgcaacaagtgtccccttcgcagcaacagccacagccaatcagataattctgaaataatcagcagaaacggaatggaatgccaagaatctgcattgagaataactaaacattgttactgtacatactatcctgtttcctcctcaatagaattgccacaaactgcatgctaaataaagatgtagttcttctggacagaccacaactctaagaagctagtgctgctatctcatatatgagtattaaatatggtatgcttagtatattccaacctaagatagttaactacctgagaccagctgtgatgtttaaagacataaaggataaagtttacttttaaagggtttctaaacatagtttctgtcctaggaatattgtcttatctccataactatagctgatgcagaaagtccagccagtttactcatttcgattcagaatatttcaaatttagcaataaacaattagcattagttaaaaaagaaacatattccaagggcaggttcgattctagctctaattactgtcatgtcatttacccactggatcaaagggtatgtttcacttcttgacaatataaatgctgcagcaaagatgagaggtgaagtaaaaccgatacctgtcctgcaggtctaaaatttgaatggaaattcaagcacaagtactggggacacatcaaagtgtggtgtttggtttgcctggagatgccacgttgaatcatgtgattctagattaacattaaatagattgaaaaagaaactttgcacggtatgagcttcataccccaccaaacaaagtcttgaaggtattattttacaagtatatttttaaagttgttttataagagagactttgtagaagtgcctagattttgccagacttcatccagcttgacaagattgagaggcccatgccaacagtctaatctaagagattagtctttcaaactcaccatccagttgcctgttacagaataactcttcttaactaaaaacctagtcaaacaaggaagctgtaggtgaggagatctgtataatattctaatttaagtaagtttgagtttagtcactgcaaatttgactgtgactttaatctaaattactatgtaaacaaaaagtagatagtttcactttttaaaaaatccattactgttttgcatttcaaaagttggattaaagggttgtaactgactacagcatggaaaaaaatagttcttttaattctttcaccttaaagcatattttatgtctcaaaagtataaaaaactttaatacaagtacatacatattatatatacacatacatatatatactatatatggatgaaacatattttaatgttgtttacttttttaaatacttggttgatcttcaaggtaatagcgatacaattaaattttgttcagaaagtttgttttaaagtttattttaagcactatcgtaccaaatatttcatatttcacattttatatgttgcacatagcctatacagtacctacatagtttttaaattattgtttaaaaaacaaaacagctgttataaatgaatattatgtgtaattgtttcaaacatccattttctttgtgaacatattagtgattgaagtattttgacttttgagattgaatgtaaaatattttaaatttgggatcatcgcctgttctgaaaactagatgcaccaaccgtatcattatttgtttgaggaaaaaaagaaatctgcattttaattcatgttggtcaaagtcgaattactatctatttatcttatatcgtagatctgataaccctatctaaaagaaagtcacacgctaaatgtattcttacatagtgcttgtatcgttgcatttgttttaatttgtggaaaagtattgtatctaacttgtattactttggtagtttcatctttatgtattattgatatttgtaattttctcaactataacaatgtagttacgctacaacttgcctaaaacattcaaacttgttttcttttttctgtttttttctttgttaattcatttaaactcattgaaaacatagtatacattactaaaaggtaaattatgggaatcactgaaatatttttgtagattaattgttgtaacattgtctttcttttttttcttttgtttcatgattttgatttttaaaattattagcacacaactattttcagccctttaataatggagcatcaaaaacatcacctgtaaccccaagcaaatatagaagactgtattttttactatgatatccattttccagaattgtgattacaatatgcaaagagtcataaatatgccatttacaataaggaggaggcaaggcaaatgcatagatgtacaaatatatgtacaacagattttgctttttatttatttataatgtaattttatagaataattctgggatttgagaggatctaaaactatttttctgtataaatattatttgccaaaagtttgtttatattcagaagtctgactatgatgaataaatcttaaatgctttgtttaattaaaaaacaaaaatcaccaatatccaagacatgaagatatcagttcaacaaatactgtagttaagagactaactctccacttgtatgggaactacatttcactcttggttttcaggatataacagcacttcaccgaaatattctttcagccataccactggtaacatttctactaaatctttctgtaacacttaaagaattccctcattcattaccttacagtgtaaacaggagtctaatttgtatcaatactatgttttggttgtaatattcagttcactcacccaatgtacaaccaatgaaataaaagaagcatttaaaaggaaaaaaaaaaaaaaaaaaaaaaaaaaaa

SEQ ID NO: 6204 - DNA, 927 bp, Homo Sapiens
  NM_144779
tctctccacgaggctgccggcttaggacccccagctccgacgtaagtccctctcgtgcgccacctccatccgctgcccctctgcccacgggccgggctcagatgtcgccctctggtcgcctgtgtcttctcaccatcgttggcctgattctccccaccagaggacagacgttgaaagataccacgtccagttcttcagcagactcaactatcatggacattcaggtcccgacacgagccccagatgcagtctacacagaactccagcccacctctccaaccccaacctggcctgctgatgaaacaccacaaccccagacccagacccagcaactggaaggaacggatgggcctctagtgacagatccagagacacacaagagcaccaaagcagctcatcccactgatgacaccacgacgctctctgagagaccatccccaagcacagacgtccagacagacccccagaccctcaagccatctggttttcatgaggatgaccccttcttctatgatgaacacaccctccggaaacgggggctgttggtcgcagctgtgctgttcatcacaggcatcatcatcctcaccagtggcaagtgcaggcagctgtcccggttatgccggaatcgttgcaggtgagtccatcagaaacaggagctgacaacctgctgggcacccgaagaccaagccccctgccagctcaccgtgcccagcctcctgcatcccctcgaagagcctggccagagagggaagacacagatgatgaagctggagccagggctgccggtccgagtctcctacctcccccaaccctgcccgcccctgaaggctacctggcgccttgggggctgtccctcaagttatctcctctgctaagacaaaaagtaaagcactgtggtctttgccccaaaaaaaaaaaaaaaaaaaa

SEQ ID NO: 6205 - DNA, 2098 bp, Homo Sapiens
  NM_144781
tccgcctcctgtcctccggaaaggtgcccgcctcttgccttccggcccggcgcccgatttccgccttccgacccagctgtgggctgcgccccacgccagcccgcgccccgcatggctgccgccggggccaggcctgtggagctgggcttcgccgagtcggcgccggcgtggcgactgcgcagcgagcagttccccagcaaggtgggcgggcggccggcatggctgggcgcggccgggctgccggggccccaggccctggcctgcgagctgtgcggccgcccgctctccttcctgctgcaggtgtatgcgccgctgcctggccgcccggacgccttccaccgctgcatcttcctcttctgctgccgcgagcagccgtgctgtgccggcctgcgagtttttaggaatcaactacccaggaaaaacgatttttactcatatgagccaccttctgagaatcctcccccagaaacaggagaatcagtgtgtctccagcttaagtctggtgctcatctctgcagggtttgtggctgtttaggccccaaaacgtgctccagatgccacaaagcatattactgcagcaaggagcatcagaccctagactggagattgggacataagcaggcttgtgcacaaccagatcatctggaccatataattccagaccacaacttcctttttccagaatttgaaattgtaatagaaacagaagatgagattatgcctgaggttgtggaaaaggaagattactcagagattatagggagcatgggtaagcagtttcaggacttcattcattaagtggttaaacataatacttggaagaaagggctccatgtgcctagaagagaggtactgagaggaagactcactttggaggctgtagcatacaattttcagatattgcctcaggtaaaaatatacttcctggactttgttttctgacacataagaggtgtgttctgctccctgtaaagacaagggtgggtatccagatggtcccatgagtagggctgcacaagatgctggaggcttggtaagttcctctgggtcgcagatcggtttctcgggtcgggatagtgtgagtgcctagcacagtgtcgggcacgcagaagggccccttaaaagtttctctttcatctggccagttttagatacacaattttgtcagtttacttacagtgcatactcttgggtagtacttgtgctgaccaagtatcttagaggcttattttattatagtagccaacatttatccagcacttaccttatataaagggctgtttgtgcatgagctcattaaaatcgtgacagcagaccaatgagtgagaaactgccccattttgaaggtgaggaaattgaggttctgggtataactttctttggtcacataatattaaattttacaatttgagccttgagccatacacaaaaccaccacaaaattagatttatagactcaaaatgaaaacatcagcttactggtttgtagttcataccagtcatacattccaaaacatgttttgagtcttactctgtgcctgaccttgtgcttgataacagggatataatgggaagcaacactccagtggtcagatgctcacagtcttatggaggagcccaaataatatctggggaagttaaagtccatataatgactgataagagtacaatacaggtgccatgggaacacgtgacatcactgaagactgcctggaaggggccgcgcgtgtgttcatgcctatacgataaacatgatacataatgaaaatgcttatctttaggagaaaggagagcctagagtagcaggatcaaggatgaaagctggacttcaaatatgccttgttagtgtaaatgtgactgtggaactgtatgagtattttaagattatggagtaaagtaagttttaaaaagcagtccctaatcatcaaaagtaaaaaactcttgatgtagtcatataaccacactaagaactcttccaggtgacttcaaaacataggacagtacatctctagtagaatatgccctgagaatgaaaagaatgtaacagtgttagtattttgaataaacatgttattactaaaaaaaaaaaaaaaaaaaa

SEQ ID NO: 6206 - DNA, 1159 bp, Homo Sapiens
  NM_144956
gctgggagtagagggcagagctcccaccccgccccgcccccagggggcgccccgggcccggcgcgagaggaggcagagggggcgtcaggccgcgggagaggaggccatgggcgcgcgcggggcgctgctgctggcgctgctgctggctcgggctggactcaggaagccggagtcgcaggaggcggcgccgttatcaggaccatgcggccgacgggtcatcacgtcgcgcatcgtgggtggagaggacgccgaactcgggcgttggccgtggcaggggagcctgcgcctgtgggattcccacgtatgcggagtgagcctgctcagccaccgctgggcactcacggcggcgcactgctttgaaactgaccttagtgatccctccgggtggatggtccagtttggccagctgacttccatgccatccttctggagcctgcaggcctactacacccgttacttcgtatcgaatatctatctgagccctcgctacctggggaattcaccctatgacattgccttggtgaagctgtctgcacctgtcacctacactaaacacatccagcccatctgtctccaggcctccacatttgagtttgagaaccggacagactgctgggtgactggctgggggtacatcaaagaggatgaggcactgccatctccccacaccctccaggaagttcaggtcgccatcataaacaactctatgtgcaaccacctcttcctcaagtacagtttccgcaaggacatctttggagacatggtttgtgctggcaatgcccaaggcgggaaggatgcctgcttcggtgactcaggtggacccttggcctgtaacaagaatggactgtggtatcagattggagtcgtgagctggggagtgggctgtggtcggcccaatcggcccggtgtctacaccaatatcagccaccactttgagtggatccagaagctgatggcccagagtggcatgtcccagccagacccctcctggccgctactctttttccctcttctctgggctctcccactcctggggccggtctgagcctacctgagcccatgcagcctggggccactgccaagtcaggccctggttctcttctgtcttgtttggtaataaacacattccagttgatgccttgcagggcattcttcaaaa

SEQ ID NO: 6207 - DNA, 5347 bp, Homo Sapiens
  NM_144963
ggcgggaggcgtagtgtgggtcgcggtggcggccccggccgccggccctggccgcggcatcatgaacatagacgtggagttccacatccggcacaactacccctggaacaagttgccggccaacgtgagacagagtcttggaaattcacagagagaatatgaaaagcaggttgtcctgtacagtatccgcaatcagttacgatatagaaataacttagttaaacatgtcaagaaagatgaacgcagatactatgaggaactgctaaagtacagccgagatcatctcatgctgtacccttaccatctatcggatattatggtgaaaggcttgaggataacaccattttcatattatactgggattatggaggatattatgaacagtgagaaaagttatgattcattgcccaattttactgctgctgactgtctaaggcttcttggcataggaagaaaccagtatattgatcttatgaatcagtgtagatcatcaaaaaaattcttcagaaggaaaacagcccgtgatcttctaccaataaagccagtggaaattgccatagaggcgtggtgggtggtgcaggctggctatatcacagaagatgacatcaagatatgcactttgcctgagaaatgcgctgttgataagatcatcgattcaggccctcaactctctggatcactagattacaatgtagtacatagtttgtataacaaaggatttatttatctggatgtaccaatatctgatgacagttgtatagcagttccacctcttgaaggttttgtaatgaatcgagtgcaaggtgattattttgaaactctactctataagatatttgtttcaatagatgagcacacaaatgttgcagagcttgcaaatgtccttgagattgacttatccctggttaagaatgctgtttcaatgtattgccgattgggctttgcccataagaagggacaagtaattaatttggatcaacttcattcatcatggaagaatgttccatccgtaaacagattaaagagtaccttagatccacagaagatgctcttgtcatgggatggaggggaaagtaggagtcctgtacaagaagcttcatcggcaactgacactgatacaaatagtcaagaagatccagctgacacagccagtgtaagcagcctgagtctgtctacaggacacacgaagcgcatcgcattcctgtttgactccactcttactgccttcttaatgatgggaaatctttcaccaaacttgaaaagtcatgcagtcacaatgtttgaagtaggcaaactctcagatgagtctctggacagctttcttatagaactagaaaaggttcagagcactggtgaaggagaagcacagagatattttgatcatgcacttactctgagaaacacaatactgtttctgcgtcataacaaagatctagttgcgcaaactgcacagccagaccaacccaattatggttttcctctggatctcttacgctgtgaaagccttcttggtttggaccctgcaacttgcagcagagttctaaacaaaaattacacgctgcttgtttccatggctcccctcaccaatgaaatccggcctgtcagcagctgcacccctcagcatattggaccagctatcccagaagtcagctctgtctggtttaaactgtacatttatcatgtcactggacaaggaccaccatcccttttattgtccaaaggtacaagacttcgaaaactgccagatatatttcagagttatgatcgattgctaataacatcttggggtcatgatcctggagtagttcctacctcaaatgtgctcacgatgttgaatgatgctttaacacattctgcagttttaattcaggggcatggtctgcatgggataggagaaactgtccatgtcccatttccatttgatgaaacagaactacaaggagagttcactcgtgtcaatatgggtgttcataaagcattgcagatactaaggaacagagtggacttacagcatctctgtggatatgtcaccatgttgaatgcttccagccaacttgcagatagaaaactcagtgatgcttctgatgagagaggagaacctgatttggcttctggctcagatgtaaatgggagtacagagtcatttgaaatggtcattgaggaagcaactatagattcagcaacaaagcaaacctctggtgccacaacagaagcagattgggttcctctcgagctgtgctttggaattccactgttcagttccgaattaaaccggaaagtttgtaggaaaattgctgcacatggcctttgcagaaaagagagccttcaaaacctcttacattccagtagaaaactctctctgcaagtccttaactttgttcactcattccaggaaggtgcttcaatattggatattcacacagagcccagtttttcaagtttgctttcacagtcatcgtatgctgacatgggtgttccacttcctgcaaaaaacttaatatttaaagatggtgtcttatcagaatggagtggacggtcaccttcctcacttcttattgctaatctccatttgcaataatttggttacaccatttgttgctcacactttctgccttttttctttcttaacgttagctttatagtgtcagccactaaaaagcatcctgctgctgcagtgcaattcttgcttaactaatattaaaagttggggaacatattcatgttttctgaagttttgctcattattgcacatcttattgcgacaaagtgctttttagcagccagcactgtattttttaccttgagacaatctgcatttcttttataaaactaagtatatactttataggctttatgatgactgttatgtttataagcagtcactatgaaaattgcaatggtaattttatatgttagtttatcaaacataaatcttgtttaattttatattttgttacctatactttgggggatcaagggaagagatggaactcttcctctgaaaaggcttcttggtacttaaagtagtaaaactataaaacaataaacatccagtattgagagatgatatgatagggcattatgaattcctatgggtgtctgtaaattatgtatgtcagttggacattgtagaaggtatgtaaatcagcatagttgtgtataacttaaccttgatttataaggtcttaagattatgactattcattgacatctcatgagaagctttagaagactttctatttttaaacaccatttatatgtggacttctgttgtcactgactttgggctttatattttcatagagtctttatggaaaaaatagaatttattttccactcttgtagctatagctgctgcacactttcaccctgatttatttttttgtttcttagctttgatgttttcaaaccaaggattgtgattttaggttagaattacatattagaagcattaagactatgtctttggatcagaatgctttagtgataaacctactttgaagacatactcttaagcaatctggatcttaaatttatgtgaatacttttttagaaaatgataaagaaaaatggaattacttcaaagtgtttcttgagtcattgattcttttagcatctcaaatgttaattagaataattggaatcactttttagacttttcaagttaccttccttgggaagtttgtgcagtgttatagtttagtttagctcctcttacagggtaatggtttgctagtttaaaactgtaaccaaacgaactggtcagacaacatatatctaaaacacttaaaatgttaggaagtttgggaatgttataacctaaacgtttttgctggtaactttttgttatttatagatatttgtgtatttaacatacatacttcaggaaatatatgcctttcctaaaacttaaccatgcattcaataccatggcctatctatagaattgaatattttggaccatgttatctgtggcacagtcagtgctgtgtttgaggtaaatgcagtaacggttagttttctactttgtcttatagaaggtagaaaccatgtgtatgttatgtttgtctataaaagaaaaaatactaatattaaataatttcttacgactctgagtcactcacttatttttccaataattgatattgtacattcctagtgccattaggtatgtatgtatgtaacttttacagtttttcagctgaaagttgtaagtattttttttttttgatcggggctctttaatctcattttaatttcctttgtttgaactgtagttattttatttattcctatattaaccatctaaaccaactgtaatgacatgtacactaatacagaattgaacatttgtagttgttggcagtgaacccagttgttggtgaatttaaagcttaaaatatgggaatgatttgctgctatatttcctttgagagagaaaggaggaagaaatagaacctaatagtgatcatgaattttagggaaagtaccgaagaaccatggggtcccctctggtttcttgtgttgaatgaggcaagggtaatcatctgattccgagctgaagacctctggtcctcttaaggagggagagtgcatttttagagcttttagcaaaatgtgaaaagctgatgtttgcgccttgctttgtgaatttggctttgttttacttatacattaactcatgtaatctcttaaatcttacaagcattgatccatttcaacaaaaaggtaaatttaaaatgcagactttgttatttgccaaagaagattcatgaaaaatttacgtccaattattttgcaaatagttaatttcatttggctttttaccatgttccttcctttctttttcccgcttccttaatgtaatttaaaccctggcaaacattctttagaaaccaagaggaaagaaagaacaaatatcaaaaaagacatagaatttaatattgatacaatttcacctctaaaatggatttgaagaaatgcaactttatatcaaaaaatgtcatctgatttcctttgtttcttttttaaattatgtaatcagatgattttatgtttttttttcaggggagcggaatattggtttcttttacttgttgttttcagttttctctgccattcatgtttcttttttgtgttcagtgtttcaaatacaatttgtatttaaggattttaaaataccaaactgtaactgagtacagtggatcgttttctgttaggatgttaatattatacaatgaaatctataaagtgttgtcaatttgattattgacacatataacatgtttacaaataaactgtggtattgatcaagttactatgaaaaaaaaaaaaaaaaaaaaaaaaa

SEQ ID NO: 6208 - DNA, 2293 bp, Homo Sapiens
  NM_144964
ggggatccgatgcgcgccgctgccgctgcgtgggggtgaggggatcagtctggtggaaaggacagaggactaagtccatggactggaaattggaagggagtactcagaaagtagagtcacctgtgctgcaggggcaagaaggcatcctagaggagacaggtgaagatggacttcctgaaggcttccagcttctgcagatcgatgcggaaggcgagtgccaggagggagagatcctggccacaggcagtacggcatggtgctcgaaaaatgtccagagaaaacagagacactgggaaaagatagttgcagcaaagaagagcaaaagaaagcaagaaaaagaacgaagaaaagccaatcgtgcagaaaatccaggcatttgcccccagcacagcaaacgtttcctgagagctctaaccaaagacaaacttttggaagccaaacactcaggaccaagactatgtatcgatttgagtatgacccactacatgtcaaagaaggaattaagtagactggctggacagattcgaaggttgtatggttcaaacaaaaaagctgacaggccattttggatctgcctcactggattcacaacagacagtcccctttatgaagagtgtgtgaggatgaatgatggattttctagttacctgttagacataacagaagaagactgctttagtttatttcccttggaaacccttgtgtacctgactcctgactcagaacacgctcttgaagatgttgatctaaacaaagtttacatcctcggtgggcttgtggatgaaagcattcagaagaaggtgacatttcaaaaggcccgggaatactctgtcaagaccgcacgcttgccaatccaggaatacatggtcagaaaccagaatgggaaaaactatcattcagagatactggccatcaatcaagtgtttgatatcctgtccacttacttagagactcacaactggcctgaagcattgaagaaaggagtttcttcaggaaaaggctatattcttcggaactcagtggaatgatgggcctaagattgcagctgcgtggccaggtgctcacgccgtaatgccaacactttggtagaccgaagtgggcagatcacctgaggtcaggagttcacgaccagcctggccaacatggtgaaacccttctctactgaaaatacaaaaattagccaggtgtggtggcgcatacctgtagtcccagctacttgggaggctgaggcaggagaatcacttgaactcgggaggcgaaggttgcagtgagccgagatttcaccagtgcactccagcctgggtgacagagcaagactccatctcaaaaaaaaaataaataaaaaaaaatgcagctgcaggagtgaggcgcttggaggtaccttgacccaaagagcagggcagagggtggcagtggcacataggcaagtgtctttgcatgacatcttctcagagcttcacaataatgtcagggaccacatttaatgctttttaatctcccatagtgcctggctcacaggaagtgctcagatatgttaagtaataaaaagttaatgtggtgggtgcagtggctcacgcctgtaatcccagcactttgggaggctgaggtgagtggattacaaggtcaggagttccagaccagcctggctaatatggtgaaacctcgtctctactaaaaatacaaaaattagctgggcatggtggtgcgtgcctgtagtctcagctactcaggaggctgaggcaggagaatcgcctgaacccgggcggcggaggttgtagtgagccaagatccagcctgggcgacagagccagactcttgtctcgaggggaaaaaaaaaaaaaattatgtaacaaggaattagcctcaaaaccacatggctttggacgtgctaattcaacttttgtacatctatttgtgagagacctcttgaaattgtttaaatggttacatcaagagtttaatattcactaaactggcatcataaaattgtatgactttctccagccttgtctgatcatgctcgttgttgcccagctcagtaataagctttgcaggatccagcctgttctgacctatccctactgagtccccatagcattttgttccctcctgtggctcttaccttgttctcccttgcagagtatgggcatggagggcttctcttcctaatccttcctaatggtaggatcctaacaggacaaatctgtgtacctatctttctatcctccctgagcctgtaccaactagattcttcatatgtatttgtaacagattaaattggaaagcaaacaca

SEQ ID NO: 6209 - DNA, 2884 bp, Homo Sapiens
  NM_144965
agcaacgtcagggccagggccgcgaggtagttggcagaggcctcggggtcctcctggaaggggcctcatgacagattcggacgaggatgccctgaaggttgaccagggcccctcacgggacatcccaaagccatgggtgattccagcccccaaagggatcctgcagcacatctttgggaccagccacgtgttccaaagcatctgtgatgtaaaaccaaaggtcacagggttaacagtgcccctcaaagtcagggaatactactccagaggccagcagtgcttggagcaggcagactgggagacagctgtgctgctcttctcccgcgcactccacctggacccacagctggtggacttctatgccttacgggctgaggcctacctccagctctgtgacttctcctcggccgcccagaacctgcgaagggcctactcattacagcaggacaactgcaagcacctggagcgcctcacctttgtgctctacctacagggacaatgcctttttgagcagtgtgccttcctggatgccctgaatgtcttctcacatgctgctgagctccagcctgagaaaccatgcttccgttaccgatgcatggcctgtctcctggccctcaagcagcatcaggcctgcctcacgctcatcaccaacgagctgaagcaggacaccaccaacgccgatgtctacatcttccgggccagactctacaactttctccagaagccccacctctgctaccgggacctgcacagcgccttgctgttgaatcccaagcacccgcaggccaggatgctgctccagaagatggtggcccaggcccagcaggcgcgccaagatgcggggatcctggctgtgcagggcaagctgcagcacgcactgcagcggatcaaccgtgccatcgagaacaaccctctggaccccagtctcttcctcttccggggcaccatgtaccgacggctccaggagttcgatggggcagtggaggacttcctgaaggtgctggacatggtgaccgaggaccaggaggacatggtgcggcaggcacagcgccagctgttgctgacctacaacgactttgccgtgcactgctacaggcagggcgcctaccaggagggcgtgctgctgctgaacaaggccctccgggacgagcagcaggagaaaggactctacatcaaccgaggcgattgcttcttccagctgggcaacctggcctttgccgaggcggactaccagcaggcgctggcgctgagccctcaggacgagggcgccaacacgcgcatgggcctgctgcaggagaagatgggcttctgcgagcagaggcgcaagcagttccagaaggcagagaaccacttctccacggccatccggcacaacccccagaaggcccagtactacctgtaccgggccaagagccggcagctgctgcagaacatttttggggcccgccaggatgtggccactgtcctgctcctcaaccccaagcaaccaaagctgtccctgctgatgaccaacctcttcccgggcatgtcggtggaggaggtgcttagcacccagatagcccacctggccaggctgcagctggagcagatggtggagggcagcctgcaggccggcagcccacaaggcattgtggggatgcttaaacggcacgagttggagcgccagaaggccttggccctgcagcactcatggaagcagggggagcctttgattgcgacctccgaggagctgaaggccacccctgagattccgcaggtaaaaccgggaagctcagagggagaggctgaggcccctgaggaggaggaagaaaaggagaaggagaaaaaagaggagaaaaaatcagagctcatacctagcaaggtggcgtccctgtctgacagctaccttgaccagacctcttcagcctccagcatgagcttcaggaccacaggcacctcagagactgagatgtcggctatctgccaggaatacaggagcacctcagccaccgccgtgacattctctgactcgtcactgttgaagacgcaatcctcggactctgggaacaacagggaggcactaagccatggtcccagaaaaatcaaggccacccagggccagaggcagagccttagcaagactgagcccacccagagccagaggcggaactccagcaagaccaaggccactatacacaagaggaactccagcaagaccaaggccacccaaagccagaggcggaactccagcaagaccagggccacccagggccaggggcagagctccagcaagactgaggccactcagggccagaggcagagctccagcgagattgaggccacccagggcccaaggcaggagcccagcaagaccaagaccacccggagcccaaggcagaggcccagaaaggtcaaggctgctcgtggccggagctggagacccagcaaggttgatgccacccagggccgaagcaggggactgctccgaagttccaccaagactgaggctttctatgactcaaactggagcctcagcaaaactgagtatgcccaaggccagggccagaggtccagcaaggctgagggtgcccagggcaagagccagggcatgagctcaacttccagcaaggccgagtccacctggggacccagcccaagtctcagcaaaactgaggttgatcaggacctcacctactatgaagctgtctgaagggaccatccagaccctcccttcttgctggggaggggacgagttctacccacctccccacactggcactcagccagctgcctccttccagagcaattaaaagtcttagcaacagtcctctggtcccacagctgagtttattatacttgttttcttttacaaaattaaaaacatctaaaaccaggcccaagtggc

SEQ ID NO: 6210 - DNA, 4660 bp, Homo Sapiens
  NM_144975
aggttctctgctctggacttgggaggctccgttgcctgctcccggagggagacgcgctgccgaggagaacccagcgggagaacatttcaggataggaataggccaagtgctgagaagatgagtcttaggattgatgtggatacaaactttcctgagtgtgttgtagatgcaggaaaagtcacccttgggactcagcagaggcaggagatggaccctcgcctgcgggagaaacagaatgaaatcatcctgcgagcagtatgtgctctgctgaattctggtgggggcataatcaaggctgagattgagaacaaaggctacaattatgaacgtcatggagtaggattggatgtgcctccaattttcagaagccatttagataagatgcagaaggaaaaccactttttgatttttgtgaaatcatggaacacagaggctggtgtgccacttgctaccttatgctccaatttgtaccacagagagagaacatccaccgatgtcatggattctcaggaagctctggcattcctcaaatgcaggactcagactccaacgaatattaatgtttccaattcattaggtccacaggcagctcagggtagtgtacaatatgaaggtaacataaatgtgtcagctgctgctttatttgatagaaagcggcttcagtatctggaaaaactcaaccttcctgagtccacacatgttgaatttgtaatgttctcgacagacgtgtcacactgtgttaaagacagacttccgaagtgtgtttctgcatttgcaaatactgaaggaggatatgtattttttggtgtgcatgatgagacttgtcaagtgattggatgtgaaaaagagaaaatagaccttacgagcttgagggcttctattgatggctgtattaagaagctacctgtccatcatttctgcacacagaggcctgagataaaatatgtccttaacttccttgaagtgcatgataagggggccctccgtggatatgtctgtgcaatcaaggtggagaaattctgctgtgcggtgtttgccaaagtgcctagttcctggcaggtgaaggacaaccgtgtgagacaattgcccacaagagaatggactgcttggatgatggaagctgacccagacctttccaggtgtcctgagatggttctccagttgagtttgtcatctgccacgccccgcagcaagcctgtgtgcattcataagaattcggaatgtctgaaagagcagcagaaacgctactttccagtattttcagacagagtggtatatactccagaaagcctctacaaggaactcttctcacaacataaaggactcagagacttaataaatacagaaatgcgccctttctctcaaggaatattgattttttctcaaagctgggctgtggatttaggtctgcaagagaagcagggagtcatctgtgatgctcttctaatttcccagaacaacacccctattctctacaccatcttcagcaagtgggatgcggggtgcaagggctattctatgatagttgcctattctttgaagcagaagctggtgaacaaaggcggctacactgggaggttatgcatcacccccttggtctgtgtgctgaattctgatagaaaagcacagagcgtttacagttcgtatttacaaatttaccctgaatcctataacttcatgaccccccagcacatggaagccctgttacagtccctcgtgatagtcttgcttgggttcaaatccttcttaagtgaagagctgggctctgaggttttgaacctactgacaaataaacagtatgagttgctttcaaagaaccttcgcaagaccagagagttgtttgttcatggcttacctggatcagggaagactatcttggctcttaggatcatggagaagatcaggaatgtgtttcactgtgaaccggctaacattctctacatctgtgaaaaccagcccctgaagaagttggtgagtttcagcaagaaaaacatctgccagccagtgacccggaaaaccttcatgaaaaacaactttgaacacatccagcacattatcattgatgacgctcagaatttccgtactgaagatggggactggtatgggaaagcaaagttcatcactcagacagcaagggatggcccaggagttctctggatctttctggactactttcagacctatcacttgagttgcagtggcctcccccctccctcagaccagtatccaagagaagagatcaacagagtggtccgcaatgcaggtccaatagctaattacctacaacaagtaatgcaggaagcccgacaaaatcctccacctaacctcccccctgggtccctggtgatgctctatgaacctaaatgggctcaaggtgtcccaggcaacttagagattattgaagacttgaacttggaggagatactgatctatgtagcgaataaatgccgttttctcttgcggaatggttattctccgaaggatattgctgtgcttttcaccaaagcaagtgaagtggaaaaatataaagacaggcttctaacagcaatgaggaagagaaaactgtctcagctccatgaggagtctgatctgttactacagatcggtgatgcgtcggatgttctaaccgatcacattgtgttggacagtgtctgtcgattttcaggcctggaaagaaatatcgtgtttggaatcaatccaggagtagccccaccggctggggcctacaatcttctgctctgtttggcttctagggcaaaaagacatctgtatattctgaaggcttctgtgtgacaggaaacccaagcctaagaaacaattaagtggttctcatctctaattaactgtgaaaccatttaatccaaacatgtaagcacacactcacttattaagtcacatacttttctaggtgctggggattgagaacgaatcgatgtaagattcctcctttagggcagagacagaccactgacaaatacacagatagacaaggaatttcccatggtaaaaagggatatcagtaattagaggaccgtgagactcagagatgtgtgtgtgtgtgtgtgtgtgtgtgtgtgtgtgtgcgcgcgcgcacgtgcacatgtgtgtaggtagatggagggggtgattattttgggtggtcagggaagtgctcagtgagggaagaacttgtcatgagaatctctgagcgtgccaggcagactcggatatttttataaatttttaacatggccacttgcagaagagcttgaatgggacgtgcagcgagaatgtgaaggatggagcaggtagctcatctggccttgtaggtgccgggaacgggcaagacatgttttgaaatgtaagatcacagactgttttttgcaagaccacattatattactttattattttctgctttttcttttaacgacattagtgtttttgatcactatattttaaaatgctttttgtgagccttttggttatgtggaatctgttccttagctctgattttttattcttatggagcgtcttaggttactacatgaaggtaagactgccacagtcccccagggaggcacactgtgttttactgattgatttgaagatgatagagagcctagggggatgagtctattggactcaaaggttacattttgtttttccatttaatttaataatcaacaaaacgacaaagtcagtttaatatctttcttctgctgagtcttcaggatgttagctagtctttcaaaagccattgctacaaaagtgcaaatttctcatttcctgtgggtctctagaaactctctcaatatttaaagccaaacaaatccatcttttctgagagacagaaactaaaaaattcagagttaattcactattaaaaacagcaaggccctgctatttcccaagaataaagaaatttaaaattctcattgtaagaagtatgaacttgaagctagaattggtttatttctggcagctacttacaatattaagaactttactttttaaatttgagacaatttcacaggaaagcaagaaattagtctattgtgaaatgtttttacaactaacttggaatatactgcaaatcactagtaagtagagacacatttaagataaaatgattaataaaacaattggtaattctgaataaggatctgaataaatccagatcacagactgttcctttaccaatatgtaaaagaatgtgcaaaattagtaaaaatatacccaaaaatttaccagcaacagagaagcaaagaatggagttcaaccttacactataaacatctaatagatatgtatgaaaatttaaaaactagaaaaggttgggcatggtggctcatgcttgtgatcccaggactttaggaggccaaggtgggaggattgtttgagcccaggagttcaagaccagcttgagcaatatagtgagaccctgtctctacaaaaacaaacaaacaaacaaacaaataaataaataaataaaattagctgggaatggtgatgcacacctggagtcctagctactcagaaggctgaggcaggacgatcacttgacctcagaagtctgaggttacagtgagctatgatcataccagtgcactccagtctgggtgacagaacaagaccctgtctccaaaaattaaataaataaaacaaaaaaaaaaaaaaa

SEQ ID NO: 6211 - DNA, 734 bp, Homo Sapiens
  NM_144987
ggaagtgacgtaagagcagccagacctggagggcttgggtaaaaatggctgaatatttagcttcgatattcgggactgagaaggacaaggttaactgctctttttactttaagatcggggtctgccggcacggggaccggtgctcccggcttcacaacaagccgacattcagccaggaggtgttcacagaactgcaggagaagtatggggagattgaagagatgaatgtgtgcgacaaccttggggaccacctcgtgggcaacgtctatgtcaagttccggagggaggaggatggagagcgggccgtggctgaactcagtaaccgctggttcaacgggcaggctgtgcacgggaatgtacccgaggtggcttctgcaacttcatgcatctgcggcccatttcccagaacctccagaggcagctctatgggcggggacccaggcgcaggtcacccccgaggttccatactggccaccatccccgagagaggaaccatcggtgttcccctgatcactggcatggccgcttctgaggccctggcccccttacccttcacccccaacagggacagatgttcctggcaggacctctcctcaaagcccccttcactctcctgccccatccttcccaggctcccgggctccataatgtaatctgttcagcatggagaccttcttctaccgcccctgtcttaataaagctgcgtgtttcacttcggcatcaaaaaaaaaaaa

SEQ ID NO: 6212 - DNA, 1872 bp, Homo Sapiens
  NM_144995
gtacttacacaaccccagatggtacaacctacaacacacctaggctgtatgatgtagccaattgctcctagactacaaatctatacagcatgttgctgtactgaatactctaagcaattataacacaatgacctagcaacagtaacataagcaaaggagagtcacgcccaaaatggaaacccaaagccaaagtaccccttcagactctacatatgacttctgagaatcaagagaaagtgaaagctcttctccgagacctgcaagaacaagatgctgatgctggatctgaaagaggcctttctggggaggaggaagatgatgagcctgattgctgtaacgatgagcggtactggccagctggacaggaaccttccctcgttcccgacttggatcctttggaatatgctggcttagcctcagtggagccttatgttccagaatttacagtctccccatttgcagtgcaaaaactttccaggtatggtttcaatactgaacgctgtcaagcggtcctgaggatgtgtgatggagatgtgggagcatcactagagcatctccttacccagtgtttttcagagacatttggagagaggatgaagatctctgaggcagtcaaccagataagcttggatgagtgtatggaacagcgacaggaagaggcatttgctctcaagtccatctgtggagaaaaatttatagaaagaattcagaacagagtctggaccattgggttagaactggagtatctgacaagtagattccgcaaatccaagccaaaagaaagtaccaaaaatgtacaagagaattcacttgaaatctgtaaattttacctcaaaggaaattgtaaatttggatcaaaatgcagattcaaacatgaagtgcccccaaatcaaattgttggaagaatagaaagaagtgtagatgattctcatcttaatgctattgaagatgcatcttttttatatgaacttgaaattcgattttctaaagaccacaaatatccctaccaagctccgctcgtggcattttattccaccaatgagaacctacctctggcttgtcgtttacatatttctgagtttctttatgacaaggccttgacatttgcggaaacttcggaacctgtcgtatattctttgataacccttttagaggaagagtcggaaatagtcaagttactaacgaatacccaccacaagtatagtgaccctcctgtgaactttctgccagtaccctctaggaccagaataaataatcctgcctgtcataaaacagtgattccaaataattcttttgtttctaatcaaattccagaagttgaaaaagcatcagaatctgaggagtcagatgaggatgacggtcctgcacctgttatagtagagaatgaaagctatgtgaaccttaagaaaaagatttccaaaagatatgactggcaggcaaagtcagtacatgctgaaaatggtaaaatctgcaagcagttccgaatgaaacaggtgctcaatagccacatgtagccaggtgttgctgtattggacagcacaggtatagaacatttccatcaacacggaaagttctattggacagtactggtatagagactcttgttgggaagaactggatatgtgctaagcaagagggctttatttcacccagaaaatctttcggtttattcagatgttggaaaactaatgtacagattccacaactcattctggctgattctctgagcagcattctgaataaagtcttctacatccaatcccaacaaatccaacaaaggatcactcaaggccaggagtgcaagaccatccagggcaacataacaagactctgtctctataattaaaaaaaaaaaaaagctgtaatcccaaa

SEQ ID NO: 6213 - DNA, 863 bp, Homo Sapiens
  NM_144998
gcggggttccggtgggcgcgcgttgaggctgcggtcatggagggagcaggagctggatccggcttccggaaggagctggtgagcaggctgctgcacctgcacttcaaggatgacaagaccaaagaagcagcagtccgcggcgtgcggcaggcccaggcagaagacgcgctccgtgtggacgtggaccagctggagaaggtgcttccgcagctgctcctggacttctagggatctcagccgtggctgaggccacccccagaggagcccctggtccacagaagcaggccttgtgtttccagcggcctctgataagaggcagggaaggacctgaaggatttggagttgattcaaacaagatctctgggagtctccagcctgtgcagaaggggcaggactgcagtgcactgcgggccttggagtgtccagtggggacactggtgtgggaaggggcagcacctggggagtccctgcctctcctccctgggacaatagtgtgcatgccacccggggtcctacaggcaggtgctgggaaaggcctggccagcaggtagcctgtgtgtttgacaaacagcagctggcagcgctgcctcctgcccacattcctgccacccgacatcaaagctggcgtgtgacctttccagccatgcgatattccccttggaagatgcttccccaggctataaatttgttctcacaaagcaacatcaataaatcaaaactgtctctcccaaaaaaaaaaaaaaaaaaaaaaaaaaaaaaaaaaaaaaaaaaaaaaaaaaaaaaaaaaaaaaaaaaaaaaaaaaaaaaaaaaaaaaaaaaaaaaaaaaaaaaaaaaaaaaaaaaaaaaaaaaaaaaaaaaaaaa

SEQ ID NO: 6214 - DNA, 2639 bp, Homo Sapiens
  NM_144999
ctgcttcctgcacgggtggtccccaagcactgcgggaccccagcccaaagcggaccttgactaccgcccagccccgcgctcccaggacctcccgcccgcggagcccactcggattgctctccgcccgggtcggcggaggccccgtctcctgtacccggcgctgggactgctccgcaccgcgcggctccctttcagcagctgcgggagcatgcggaggaggccctgccggccccgcgggtcatggaggagttccggcgctcctacagccgcctgtgcagggagagtggggccgagccccaggaggctgtcctgcagcagctgcaccagcttcccaggggccggctggacctggccacgcaaagcctgacggtggagacctgcagggccctgggcaagctgctgccgagggagacgctgtgcacggagctggtcctgagtgactgcatgctcagcgaggaaggggccacactgctgctccgaggcctgtgtgccaacaccgtgctgcgctttctggacttaaagggcaacaaccttcgggctgcaggggccgaggctctgggaaaactcctccaacagaacaagtccattcagagcctcacgctggagtggaacagcctgggcacgtgggacgatgccttcgccaccttctgcgggggcctggcggccaacggcgccctgcagcggctggacctccgcaacaaccagatcagtcacaagggcgcggaggagctggccctagccctgaagggcaacaccaccctccagcagctggacctgcgctggaataacgttggcctcctggggggccgggccctcatgaactgtctccccagcaacagaaccctgtggagactggacctggctgggaacaacatccctggagacgtcctcagagccgtggagcaagccatgggccacagccaggaccggctcaccaccttccaggagaaccaagcccgcactcacgtcctcagcaaggaggtccagcacctccgggaggagaagtccaagcagttcctcgacttgatggagactattgataagcagcgagaagagatggccaagagcagcagggcgtcggcagcccgtgtagggcagcttcaggaagccctgaatgagaggcactccatcatcaacgctctcaaggccaagctgcagatgacagaggccgccctggctctgtcggagcagaaggcccaggacctgggggagctcctggccacagcggagcaggagcagctgagcctgtcacagaggcaggccaaggagctcaagctggagcagcaggaagctgcagagcgggagtctaaactcctcagagacttgtctgctgccaatgaaaagaacctgcttctgcaaaaccaggtagacgagttggagcggaagttcaggtgtcagcaggagcagctgttccagaccaggcaggagatgaccagcatgtcagctgagctgaagatgcgggccatccaggccgaggagcgcctggacatggagaagagaagatgcagacagagcctggaggactccgaaagcctgcgcatcaaggaggtggagcatatgacccgtcacctggaggagagtgagaaggccatgcaggagcgggtgcagaggctggaggcggcgcggctgtccctggaggaggagctgagccgagtgaaagcagcggcactcagcgagcgtggccaggctgaggaggagctgatcaaggccaagagccaggcccgcctggaggagcaacagcgcctggctcacctggaggacaagctgagactgctggcgcaggcacgggacgaggcgcagggcgcttgcctacagcagaagcaggtggtggccgaggcccagacccgggtcagccagctgggcctgcaagttgagggcctgcggcggcgcctggaagagctgcagcaggagctgagcctcaaggaccaggaaagggtggccgaggtgagcagggtgcgcgtggagctgcaggagcagaacggccggctgcaggcggagctggcggctcaggaggcgctgagggagaaggcggcggccctggagcgccagctgaaagtgatggcgagcgaccaccgagaggcgctgctggacagggagagcgagaacgcgtctctccgggagaagctgcggctccgggaggcggagatcgcccgcatccgggacgaggaggcccagagggcgagcttcctgcagaacgccgtcctggcttacgtgcaggcgtcccccgtgaggaccctgagccccccaaagtgagacaggccgggaggacccgggcgcagtaggagtgcatcaggcggcgcccgagatggaccaggggctgcgtcccgcccgcgccgcctctttgagacccgggtcgtctgttccacgcggcggttgcggcgactgttggtggtgtcgcggctgcgggggaaccccgtgggaggcgcctgggaagggctccctaccggccccttcttcccggtcgacgccacgtgggagcacaccgggaaggggtcccgcgggcgcgtctccccctcgccttttgcgatgtcaccgtgaacgctgcggccgcctgcgcgcggcggggtttggaaatacagcgcgtttgcactttgtgataaaaaaaaaaaaaaaaaaaaaaaaaaaaaaaaaaaaaaaaa

SEQ ID NO: 6215 - DNA, 1879 bp, Homo Sapiens
  NM_145005
aggaaagagaggtgcgtcaaacagcgacaagttccgcccacgtaaaagatgacgcttgatatctccggagcatttggataatgtgacagttggaatgcagtgatgtcgactctttgcccaccgccatctccagctgttgccaagacagagattgctttaagtggcaaatcacctttattagcagctacttttgcttactgggacaatattcttggtcctagagtaaggcacatttgggctccaaagacagaacaggtacttctcagtgatggagaaataacttttcttgccaaccacactctaaatggagaaatccttcgaaatgcagagagtggtgctatagatgtaaagttttttgtcttgtctgaaaagggagtgattattgtttcattaatctttgatggaaactggaatggggatcgcagcacatatggactatcaattatacttccacagacagaacttagtttctacctcccacttcatagagtgtgtgttgatagattaacacatataatccggaaaggaagaatatggatgcataaggaaagacaagaaaatgtccagaagattatcttagaaggcacagagagaatggaagatcagggtcagagtattattccaatgcttactggagaagtgattcctgtaatggaactgctttcatctatgaaatcacacagtgttcctgaagaaatagatatagctgatacagtactcaatgatgatgatattggtgacagctgtcatgaaggctttcttctcaagtaagaatttttcttttcataaaagctggatgaagcagataccatcttatgctcacctatgacaagatttggaagaaagaaaataacagactgtctacttagattgttctagggacattacgtatttgaactgttgcttaaatttgtgttatttttcactcattatatttctatatatatttggtgttattccatttgctatttaaagaaaccgagtttccatcccagacaagaaatcatggccccttgcttgattctggtttcttgttttacttctcattaaagctaacagaatcctttcatattaagttgtactgtagatgaacttaagttatttaggcgtagaacaaaattattcatatttatactgatctttttccatccagcagtggagtttagtacttaagagtttgtgcccttaaaccagactccctggattaatgctgtgtacccgtgggcaaggtgcctgaattctctatacacctatttcctcatctgtaaaatggcaataatagtaatagtacctaatgtgtagggttgttataagcattgagtaagataaataatataaagcacttagaacagtgcctggaacataaaaacacttaataatagctcatagctaacatttcctatttacatttcttctagaaatagccagtatttgttgagtgcctacatgttagttcctttactagttgctttacatgtattatcttatattctgttttaaagtttcttcacagttacagattttcatgaaattttacttttaataaaagagaagtaaaagtataaagtattcacttttatgttcacagtcttttcctttaggctcatgatggagtatcagaggcatgagtgtgtttaacctaagagccttaatggcttgaatcagaagcactttagtcctgtatctgttcagtgtcagcctttcatacatcattttaaatcccatttgactttaagtaagtcacttaatctctctacatgtcaatttcttcagctataaaatgatggtatttcaataaataaatacattaattaaatgatattatactgactaattgggctgttttaaggcaaaaaaaaaaaaaaaaaaaaaaaaaaaa

SEQ ID NO: 6216 - DNA, 1731 bp, Homo Sapiens
  NM_145008
agtgttatgatgcagttccacaacacacagccacattcacccacagaccgaggtacagaacgagagacaacctctgcccccccagcagctggccagctttgcagccccagtcttgagcccccaactaccctccccccacccacccccatccccttcccaattgaaggagcggaaagagaagagagaagagtgagcagagagattgagagattgagagagagagagagagatagacggagatctctggagcagacctcaaggtgacttctatttctatctggttctcgtctgggggggccctggccgggcagccccccaacacttctcctgccctgaaacacggctctagccaacctgctccgctgcttcacctgcgaccgtctctgcgggggctgcacggcgccagcccctccagcccaccagggcattgtcctccagcccgtcatgcccagctgtgaccccggtccgggccctgcctgcctccccaccaagactttccgcagctatctgccccgctgtcaccgcacttacagctgtgtccactgccgtgcacacctggccaaacacgatgagcttatttccaagtccttccaagggagccatggccgagcctacctgtttaactccgtggtcaacgtgggttgcgggccagctgaacagcgcctcttgctcacggggctccactcggtagctgacattttctgtgagagctgcaaaaccacactgggctggaaatatgagcaagcttttgagacgagccagaagtacaaggaagggaaatacatcattgaaatgtcacacatggtgaaggacaacggctgggactgaggggctcaggcagggtgtgcccttcctccgcatgcccctccctccccacggccctgccaagcagtctataccagcatgagtactgccccacccctgggggaaacctggctccaaccaacccctcccctgcctccaccatatccactaccaggcaccctttagaacaggggtctgggggtaccccaggggtgttaaggctcaggagtgggcagcagtcagggagagacagaactgggggaaagggatggttgtgggtctttctgttcccaagatcctgaacatggaagcgatggcagggcatagactcaggcagagaggattgtgggaggaatccgtttttgctccacctctttttgagtgaacagaggacaaaccttgggtcacagggcaagtagatcatggaccacagaacagcagatgagaaaagacttgggttggagtgaaattctggtctcagacaccaggagaccagagtctctgaggatgaagtttcctacccctatttgtagggaaaaggacttgagtgcagggaaaactcaaatcccaggccctgggaaatagtaaaataatcaaagggttttccatttcactccacttgttagtttatcttggcactgaagaggcactttcgagtatctaacttttgccattgggtggggtggggacagctgctcgcggaacagcccctagtcggctgcttccagagtaagcagtctttatgggctttctctgaggcccagtcactgctcctgggacccagtcccctggaggggaggtggaaaatcagtgctacggggccagtctttcccgtggctgccaccagcgaatgaaacttttgtatgatacataaagtgcttgagtctatttttaataaaaagggaaaaagcaacttgaaaaaaaaaa

SEQ ID NO: 6217 - DNA, 3968 bp, Homo Sapiens
  NM_145012
aggccccgccgccgccgccgctgctgacccggcggccggccgccgttccgccccctcccgtggcggcgagcgggcgggcctccccacacgcccccgccgcccgcgccccgcgtccacccgcgccccgctcccggggactgggagaacaggatagcagcaggagtcggggggccgccgaagatggggaacactacctcgtgctgcgtgtcgtccagtcccaagctccggaggaatgcccactcccggctggagtcctaccggccagacacggacctgagccgcgaggacacgggctgcaacctgcagcacatcagcgaccgggagaacatagacgatttgaacatggaattcaatccttcagatcatcctcgggccagcacaatattcctcagtaaatctcagacggacgtgagagaaaaacgcaagagtctcttcattaaccatcatcctccaggacaaatagcaaggaaatacagttcctgctccaccattttcctagatgatagcacagtcagtcaaccaaacctcaagtatacaattaaatgtgtcgctcttgcaatatattatcacatcaaaaacagggacccagatggaaggatgctcttagatatttttgatgaaaatcttcaccctctttcgaaatccgaagtgccaccagattatgacaaacacaacccagagcagaagcagatttaccggttcgttcggacactgttcagtgctgctcagctgacggctgaatgtgccatcgtcaccctggtgtaccttgaaagacttttaacatacgcagagatagatatctgtccggccaactggaagcggattgttttaggggcgatcctgctggcctccaaggtgtgggatgaccaggctgtatggaatgtggattactgccagatcctgaaagacatcacggtggaggacatgaacgagctagagcgacagtttcttgaattgctgcagttcaacatcaatgttccttccagtgtctatgccaagtattattttgatcttcgttctctggcagaagcgaacaacctgagctttcccttggagcccctgagcagggagagggctcacaagcttgaggccatctctcgcctctgcgaggacaagtacaaggacctaagaagatccgcgaggaagcgctcagccagtgcagacaacctgactctgccccggtggtccccagccatcatctcttaactacggaggcccgccggaggccacaccatcccttagtttctcctttagtttgagaaaagacagacttggggtgggtttgtttttgttttttctttccttttctttttttacgcatagctccgtcaagctgcctggatgagcgcccatgcagcaaggcttggaggaagcgtcagtgccctggagatcccagctcgctctccccactgtcagcaacagcacttccttcgtggaggaagtggactcgaatcctggaggaggaaataaagggaaagggaagtcgtggagaggcagggaaaatggttaagcagcccggccctctggagtccccatgggggcggtagctgaagttggcgagcgcagcggtggatgcagagctggctgcacccagggctgggccagtgtgtcctgtaagacttcttgcattccttctgctgcttttttgggatgggggtatttttgttcatttgtttttgccctgttttgattttggtcccacagagcaggggatgtagtttgtacccaccatggcgcagacttccaaataaatagtactggtcatttctctctgcactatttctgcgcgctgtcttctgagctttcttcctcaccagtgggctgtgcttgttccatttctgtacacccttattttataccgtttttcttcaacaatggcgaaattgactgtagtgctgaaccaaaagtatccctttccctccttattcctcaccccaagaacattctagatcacatgggtgcttgtgccttccgattttcttgcatttgtttttttcctgacctgaagttgttgttacaaaatcagtcagactttgtgggctgaaggacacggtgcagcagagggtgtccctgtgagagttctgcagagtgctgggcatgtgcctggaactaccgagtaggagccatttctttgtacccctgcctaatccattcctctccttccaagtccattgttgcaagcaatattcttctcaatttttatatgtttactttaaatcaaagttagtctatttgtataaaatttttaaaaaatctaaaagaaaaagaaaaaaaacaagggtgggttgggtattccagtgggaagatcattgaagggaaaaatgttactatttactgaggtatttttcacagaatgattgaattaaaaaaaactcaacttgcattttcattgtgggtgcttagagaagttctacaaaattcaaactgtgaaggtttatgcttcattaattatgaccatactttttcattttctgacgatccctgatttccttatggactcaataagaatcttttatatcaagtaaaatgaaagttgatgatagaatatcaaatagtgaatttgatatgaaatctaagagtgtgagtcacttgcatatgtaatgctttgggtttttgcatattttcttaggtcacagtgacaggtttctgagttgtttcccttttcaagtctctgggaggccagtggcagcagcaggtctgtgtttcaccttcttcccatgtgagcttggaaaactttggcatcttaattagtcttgaatcatacacctgatccccaaacattgcctgctctcaatgaaacatgctttggaaatggaagggactcagaaagtcgaaatcccaagaactccaagccaaaagtgttaggttttagtgaaatttgtgtcaggtataagcatacctgtttgggccagaattattatcacagcctttctgacccaaactttcaaaagcaaataaacagcatataaaacgttaattatctttccattgtaattgtgatgatctactctgtatgggtaccaaaatcaccttctctcttcaagtcaaagttgaatttagaactttgaatacaggtcaaaaaatgtagaaaatatcattttatattccctaatctatatagctgaaaaagggttgtattttcttagctgaatatgaatacctcttaaacataaattagttcctctccagtgaagtatcttattttaccaatccatttcaggaaagaggttctgctgccgtaaaggcagaaattttatttttatcccttttatttgaatgagagatttgaaaatcgaattatgtaaatatttcaatgcatctgctattattttgtggagtttattaaactactttaaaaaaattgtatagtctatttattgtatgtatgtacatacagtctgatacctaaaatttaaagtggattccataaaaccagactcaagtcttgtttagactactgaatactgttttagcctgtgccctggattctacctctgtataggaaaattttccatattcattaattagtgttgatctgtattaattggttatgtttcttgcactaaggatgtttaaaactccgctgtaagtgtagattttagttttactggcaggatgaatcacttgacacataggtagatacttgaggttcattttcttttctttttctacatgatgatgaatagttatgttttcttctctgatttgttcaaagtttgccaaaagaaaacacaaaaccagtacagtacttactgataaatcgtagtgactgtaatttgtttgtaaggcgaattaatgctctacaattaaagctggattactattgaggaacacattgtcttagtgtagtttttgaatggaaagtttttgtcattaaggatgaaggaaacgacacaatttgttactttaattttatatttgatttaaacaacaaataaagtcattgggacaataaaaaaaaaaaaaaa

SEQ ID NO: 6218 - DNA, 1829 bp, Homo Sapiens
  NM_145014
aatcctcacattttgggagggaggccaaggcgggcagatcacctgaggttaggagttcaagatcagcctggccaacatggcgaaaccctgtctctattaaaaataccaaaattagctgggcatggtggcacgcgcctgtaataccagctactcaggaggctgaggcaggagagtcacttgaacccgggaggcggaggctgcagtgagtcgagatcgtgccactgcactccagcctgggcgacaagagcgagactctgtctcaaaaaaaaaagagtggttaacaagcatgatgatacaaccagttgaaagcaatatttgagttcataaagaagttgatgagttgataaaccaacaacacctaattggggaaagcataaggaagagagctgtgttgcaatcaaaaggttttttttttacttgaatgtaaataccaatcaagatacattgaaataaggacctgaaggtggcaagacagtagaaagcaggagtaagagtggaaatgaaagcagaaggtcctacagtgtaggggaagcaatggaagaacttctacctgatggacaaatatgggctaatatggatccagaagaacgaatgttggcagctgctacagcttttacccacatctgtgcagggcagggtgaaggagatgtcaggagagaagcccaatctatccaatatgatccctacagtaaagcttcagtagccccagggaagcgacctgctcttcctgtgcaactacagtacccacatgtagaaagtaatgtcccttcagaaacagtctctgaggcctcccaaagactccgaaagccagtgatgaagagaaaggtgctgcgcagaaagccagatggggaagtattagtaacagatgagtcgattatcagtgaatcagaatctggtacagaaaatgatcaggatctctgggacttaagacaaaggctgatgaatgtacagttccaggaagacaaggaatcttcatttgatgtttcacaaaaatttaacctaccacatgaataccaaggaatttctcaagatcagctcatttgctctctacaaagagaaggaatgggctctccagcttacgaacaagacctgattgttgccagcagacccaagtcctttattctcccaaagctggaccagttaagccgaaaccggggcaagacagaccgggtagcccggtattttgagtacaaacgggactgggactcaatacgtttacctggtgaagatcatagaaaggaattacgctggggtgtccgagagcagatgctttgtcgagcagaaccccaatccaaacctcagcatatatatgtcccaaacaattatctagtaccaacagagaagaaaaggtctgcactccgttggggtgttcgttgtgaccttgcaaatggtgtcatacccaggaagcttcccttccctctttctccttcttaaatctttttaaacttctttcacaggattgtttgagataacctagctctttatatcttcccttttaaatagaaacaactgtcttgagaagctcttcgaaacattttatggtaaggacttcacctatcattggtctttcctagctatatatcacattggtatcagatgatacttccaaattgccactcaaatccagcaattgcaagataaatcatatcagagaaagaacaacagacctggtctttctattttgtcaaattagtaagggccctttgtgtcctgtaactttttttacctatcaatatgagttgctgtgcttcagtgtgtgttttttaagttgctgggcattacacttaccaattaaagaattttggaaattcaaaaaaaaaaaaaaaaaa

SEQ ID NO: 6219 - DNA, 3577 bp, Homo Sapiens
  NM_145018
gccaaagcgttacttccggcggaaaaggacgcgggagattcgattggaaggctgccggcgtgctactgagttcggccggtccgagtcactgtgcgtcgcctgggcccgttcctggtcttctcccccagggtcttgctctgtcacccaggctggagtgccatggcatcatcatagctcactatggccttgatcctcctgccttagcctcccaagcagctggtattacagaccacggtgtgaacacatgaacagaagacgaaaatttcttctagcctcagtacttgctctccagaattcaagttttatatatccatcatgtcagaagtgcttctctaggataatcctggtctccaaaaggtctaattgtccaaaatgtggctctactggtgaatctggaaatgccaattacagatacaaactttccttaaaagttgcagaatcaaacaaattgtttgttattactgtatttggaagttgcttagatacattttttggtcttactgccactggtttgcacaggtacattcaggatcctaataaaattccagaaacactggacaatgatacaactcagaatctattaactaaagcagttgaaacttgctttgttggacaaagctttatttttggagtgacgaattttgaaaaccaacctggacaaggttcagatgccagtaacttcttacagcaatgctctgaccacaaaagaaaagccaaagcactagtggcttgccagattgttctaccagacccaggtattgcaggctttactgtcattgactacttccatcaacttttgcagacttttaatttcaggaaacttcagtgtgactctcaggcacctaacaatcacttacttgctttagatcactcaaatagtgatctcagcagcatatatacttctgacagcacttctgattttttcaagtcctgcagcaaggatactttttcaaaattctggcagccatcacttgaattcacttgcattgtttcacaactaacagataatgatgatttttcagcttcagaacaaagtaaggcctttggtactcttcagcagaacagaaagtccatctccattgcagaggccactggttccagtagctgccatgatcccattcaggattcatggagccttgtttcatatatggataaaaagagtacagcagaaaagttgggtaaagaacttggcttacaagctaaggagctgagtgcagttcacagcagtcatcatgaaattggagttaatgactctaatttattctctttggaaatgcgagagccccttgagtcaagtaatacaaaatccttccacagtgcagtggaaattaaaaataggtcccagcatgagctaccatgttttcagcatcatggtatagataccccaactagccttcagaagagatctgcatgttgtccaccttcgttactcagacttgaagagacagccagcagttcccaggatggtgaccctcaaatttgggatgatctgccattctctgaaagcctgaacaagtttctggcagttcttgaaagtgagattgctgtaacccaggcagatgtcagtagtaggaaacatcatgtagataatgacattgataaatttcatgcagaccacagcaggttatctgtgactccccagagaactactggagccctgcatacaccacctatagctttaagatcatcacaagtaatagtcaaagcaaactgtagcaaagatgacttccttttcaactgtaaaggaaatctaagtcctagtgttgaaaaggagtcacaaccagataacaaagtagaggctgtctctgtaaatcataatggaagagatatgtcagaatattttttaccgaatccttacctgtcagctctgtcttcatcttcaaaagatttagaaacaatagttactcttaagaagactatcagaatctcaccacacagggagagtgaccattctagtctaaataacaaatatttgaatggatgtggagaaatatcagtttcagaaatgaatgaaaagttgacaactctgtgttataggaagtataatgatgtctctgatctttgcaaattagaaaataaacaatattgtaggtggtccaagaaccaagatgacagttttacaatttgcaggaaacttacatatcctttagaaactctttgcaatagtccaaatagaagtacaaatacattgaaagaaatgccttggggacatatcaataacaacgtaacacagagctattctattggttatgaaggtagctatgatgcctctgctgatctctttgatgatattgctaaagaaatggacattgcaactgagattaccaaaaaatcacaggatattttgttaaaatggggaacatctttggcagaaagtcacccttcagagtctgatttttcactgagatcactttctgaagacttcatccagccttcacaaaaattatccttgcaaagcctatctgactctaggcattcaagaacatgctctccaacacctcattttcaatcagattcagaatataattttgaaaatagtcaagactttgttccatgttcacagtcaactccaatttcagggttccaccaaacaagaattcatgggataaacagagctttcaaaaaacctgtattttattcagatcttgatggtaactatgaaaaaataaggattttccctgaaaatgacaaacagcaagccagcccaagctgtccaaaaaatataaaaacacctagccagaaaatcagaagccctattgtatctggtgtttcacaaccagacgttttcaatcactacccttttgctgagtgccatgaaactgatagtgatgaatgggtccctcctaccacacaaaaaatatttccttcagatatgcttggattccaaggcataggtctagggaaatgccttgctgcctatcatttccctgatcaacaagagttaccaagaaagaaactgaaacatattagacaaggaaccaataaaggtttaattaagaagaaattaaagaatatgcttgcagcagttgttacgaaaaagaaaactcataaatataactgtaaaagttcaggctggatttccaaatgtccagacattcaagtcttagcagcacctcagctgcaccctattcttggacctgattcttgttcagaagtcaaatgttgccttccattttcagaaaaaggcccaccttcagtgtgtgaaactcgaagtgcttggtcacctgaattgttttcataaaaagtcacctgaacccaattcctgaacttttaaatctgtttggaaatgtttgccttcaggggtacggaaagcattctttacattttgaacacttggagagaagcaaattgaaaacaggactctgctgggagctactgtgccttttaaaatataaagccattgttttccccagggttttatctagaatactatgattaggtagttgagcactttatcttatactgtttattgtactttaataatattgttaagattgtttttgaaagtattaatgtttgttaaaatcacatatacatccagaaataaagactttgcaaaccaaaaaaaaaaaaaaaa

SEQ ID NO: 6220 - DNA, 2511 bp, Homo Sapiens
  NM_145021
ctcggtgtcctcccgcggaggggcgtagggtgtaaacaggcgacgcgctgggggaggtgcggccttgctgcgtccacgtctcgggcatgctcgaggcgggccagggcggtagcgccgccagctcagagcccacctgaggtaactcctgcggcctctaggatcggagtcccccacgccgcgcgcagccgccgccgctggccgccaataagggcggccgagcccccggcccgggcagggggtgtggctgccggcagcgcgtcggctacaggtgggctgggctgggctgggctgggctgggctgggtgggggcggccgccaaggacccatccctgcgctgcgggcccggcgtggagcccgcggagaggcagcgcgactccaggcagtgggtctctctgccccggtgctcgcgtctgcccctggggccgggccgagcggaaccaggaatcgcagaaacggtcagcgcccagggctctaggccggccgccccgggtgccaggtgaattcctttccctgaccggctgtgagacgttggcccgtcagccgtcgtctttggcctgagtgtgcacatctgtaaaatggaagctcggactagtgatccgtgaggaccttccacgtctgacgtgtgatctcgagagacctgcgtacattcggggtgccagaaggaaagcatagcttgaaatccatggcccaaaatgactctaccagtggagactctcttctgtgaagaagacgaccagataagaggttgggatgagcatgccactgcatcagatctctgccattccatcccaggatgccatctctgctagagtctacagaagtaagaccaaagaaaaggagagggaagaacagaatgagaagactttgggacatttcatgagtcattcaagcaacatttctaaggctgggagtcctccgtcagcatcagctccggctccggtgtcctccttctctcgcacttctatcacgccatccagccaggacatctgcaggatctgccactgtgaaggagatgatgagagccccctgatcaccccctgccactgcacaggaagcctccacttcgtgcaccaggcctgcctgcagcagtggatcaagagctccgacacgcgctgctgcgagctctgcaagtatgagttcatcatggagaccaagctgaagccactgagaaaatgggagaagttgcagatgacgtccagcgagcgcaggaagatcatgtgctcagtgacattccacgtcattgccatcacatgtgtggtctggtccttgtatgtgctcattgaccgtactgctgaggagatcaagcaggggcaggcaacaggaatcctagaatggcccttttggactaaattggtggttgtggccatcggcttcaccggaggacttctttttatgtatgttcagtgtaaagtgtatgtgcaattgtggaagagactcaaggcctataatagagtgatctatgttcaaaactgtccagaaacaagcaaaaagaatatttttgaaaaatctccactaacagagcccaactttgaaaataaacatggatatggaatctgtcattccgacacaaactcttcttgttgcacagagcctgaagacactggagcagaaatcattcacgtctgattgtgtgcgggttgtcattttcctggacatccatgaagagctgaaggaaattgtttactgccaattgtatacctttcttatgtcctttaatagcatagactggacaggtgactatttatagtggcttctctttttctaaaccctccttagtctcctagaaaaccttcctgtgggccaggcatgcctgggtcctgcctctgcctggcagctctgtgggaaagtggaagaccccatgatgacatcatggggagccagcagagttcctgcccatggtcttgagctgaatgagagaataaaatgccaatcccaagggaagaggaggagcaggggtgcccaggccctgatacccagccgcctccagcttgcagtggtccccagcctggagcagagcattggggagtgtctagccatgacgagaagattccctctgcatcacggcgaaccccaggagatggtattgaaacagacccccaaacacagactcctgcctgccctctgccgatgctgcctcctccatgctcttgagcaggtggagccatggtgctctgtggtggcgcatgattcactgagcaaacagcactttacagaagaaaatctttattttgtaatatgtgtgtccagcgggattgacactcaaaaaaagtctcacttagaaatcttcccttccttacctttgtatctcctttacatcatgagagatcaaaaatccattttgccttacatatgctaagaagcgtggcattctttctgttcataaaacagactcatgacttttaagacaggacaagcaggccagaggctttttttttaatcacagatctcatgggaattagtggatgctaaatggcaattaaagcatgattcctatgcaaaaaaaaaaaaaaa

SEQ ID NO: 6221 - DNA, 1184 bp, Homo Sapiens
  NM_145028
acctgggcccagggcaacactgaagacatgggcaagagcatcccccaatacctggggcaactggacatccgcaaaagcgtagtcagcctggccacaggcgccggggcgatctacctgctctacaaggccatcaaggctggcataaaatgcaaaccacccctctgtagcaactcacccatctgcatcgcccgtgagtgtccgggccctggggagagggctctgccccaggaggcacctgctcccgaggcctctgctgtgggagggcccaaaggcctggcagtcgagcgagagcggcacgggcgggactcaggtgagctccggaggctcctcaactctttggagtgcaaacaggatgagtacgccaagagcatgatcctgcacagtatcactcgctgtgtgtacttgctggaggctgaggcctctgcttgtactacggatgacatcgtgttgctgggctacatgctggatgacaaggacaacagtgtcaaaacccaagctctgaatacacttaaagctttctctggcatcagaaaattcaggctcaaaatccaggaacactccatcaaagtactcgaactgatctccaccatctgggacacggaactgcacattgcgggcctcagactcctcaacaaccttccactgcccgactatgtgcatccacagctgcgacgggtgatgcctgccttgatggagatcctgcagtcagactacatcctagcacaggtgcaagccgtacgactgctgagctacctggcacagaagaatgaccttctctatgacattctcaactgccaggttcactccaacttcctaaacctgttccagcccacacagtcagggagtctcctgtatgaggtactggtgtttgctgagcggctgagtgagggccggaacgcaccccactaccacgtggtgaaatggcattacaacgaacagtccctgcatgaatccctctttggggaagagtcccgactggcagaccgactacttgccctggtcatccaccctgaggaagatgttcagatccaggcctgcaaggtcattgtcagcctgcagtatccccaggacttgagagcccggccctcctcctgccagcccagtcgttcctactttaaaaacacggaataaaattaaggagagccaataaatgagtataggagagaaacaaaaaaaaaaaaaaa

SEQ ID NO: 6222 - DNA, 1039 bp, Homo Sapiens
  NM_145029
cttcagccgcttccctcgagcctgcagtgcgcaagcgcgggacatctccgtttccctccctcagccccttccccccctacccccccgccccggcctcctttccccttcacgaagccggctctggggcgcgctcacccctgtgaggaggccggaggtcggactcaggaggctccttctccactcccggaagatcatgtaccagcccagccggggtgcggcccggcgtctcggcccttgcctgcgcgcctaccaggctcgaccccagcttcccaagctcttccttcagtcccacgactacagtctgtattccttggatgtggaattcatcaatgagatcctcaacatacgtaccaagggccggacatggtacattctttcactgaccctctgccgtttcctggcctggaattattttgcacaccttcgtttggaggttttacagctgacccgccaccctgagaactggaccctgcaagcccggtggcggcttgtggggctgcccgtccacttgctctttttgcggttctacaagcgtgacaaagacgagcattaccggacctatgatgcctactccactttctacctgaattccagtggcctcatttgtcgccatcgtctagataaactgatgccttcacactcacctccaacgcctgtgaagaagctgctagtgggagccctggtggccctggggctgtcagagccagaacctgacttaaacctgtgttccaagccctgatccttgaccttggagtggaggcagcactgaagactgctacgcccaagagaaggaggtggaggcagccaagaatctcaggagccagcttcctctcctcgtttctctccttccttcctttccatctcatgctgtgtaaagctgctgtgtaatttaacttgtaaataataaagtttaactgactatatgagatagaatttcacatatcactttctctagatcccaaatgttcccacaagctttattccaaaaataattttatttaataggtattaaataatgtatagaaggaaaaggaaaaaa

SEQ ID NO: 6223 - DNA, 960 bp, Homo Sapiens
  NM_145030
aggggcgggggaaaggaggcggcagccaggctgtgtcccctgaccgttggagcgtctgcgacccccgcatccccgcaccctcaaggcacctccaaagatgatgatgggttgtggggagtcagagctgaagtcggcggacggggaagaagccgcggcggtcccggggccacccccggagccccaagtcccgcaactccgagccccagtgcccgagcccggcctggacttgagcctgagcccgcggcccgacagccctcagccgcggcacggcagccccgggcggcggaaggggcgggcggagcggcggggcgcggctcggcagcggcggcaggtccgcttccgcctgacgccgccctccccggtgcggtccgagccgcagcctgcggtgccgcaggagctggagatgcccgtgctgaagagcagcctggccttgggcctggagctgcgggccgcagccgggagccactttgatgctgcgaaggccgtggaggaacagctgagaaagtcgttccagatccgctgcggcctggaggagagcgtgtccgaggggctgaacgtgccgcgctccaagcggctcttccgggacctggtgagcctgcaggtgccggaggaacaggttctgaatgccgcgctcagggagaaattggctctcctgccgccacaggctcgagccccgcacccaaaggagccacctgggcctgggccagacatgaccatcttgtgtgacccagaaacgctattttatgaatctccacacctgaccctggacggtctgccccctctccgacttcaactccggccccgcccttcagaggacaccttcctcatgcaccggacactgaggcgatgggaagcgtagaccccaaagatccctggagggctagttcgtatttttgtgttaaactatttgttagaataaagtaattttgcgaaaaaaaaaaaaaaaaaaaaaaaaaaaaa

SEQ ID NO: 6224 - DNA, 7912 bp, Homo Sapiens
  NM_145034
gacattcgggccgcggcggccgctgggtgcagccgagcggtgtggagcggagagaatactcgaagggctctcctgatactaacagttttacgatttaaaacttcgccagaatttcgacagggtctcactgtattgcccaggttggtctcgaactcctggcttcaagcgattctcccacctcagcctcccaaagtgctgggattacaggcgtgagccaccacgcctggcctcactcaaacagtaaacgagtcactgtatatatgccttatttcctgggtccatgggaagcatgagtctgttgggacttgggacaagaagaaaacaagacatcttcacaaggaaaaccaagtactaaaaaaagtatcctcccaactctgaagagatagaacacaaacatggccgacagtggacttagggaacctcaagaggactctcaaaaggatttggaaaatgatccatcagtaaattctcaggcgcaggagaccacaatcatagcaagtaatgctgaagaagctgagatcctacactctgcctgtggtcttagcaaagaccaccaagaggtagagacagaaggtccagaaagtgcagatacaggtgataaatcagaaagtccagatgaagcaaatgtggggaaacatccaaaggataaaacagaagatgagaacaagcagagttttctggatggcggaaaagggcatcacctcccttcagaaaatctgggtaaagaacccttggatccagatcccagccattctccaagtgacaaggtaggaagagcagatgcacacttagggagcagctctgtggccctccctaaggaagcgagtgacggaactggagcatctcaggaaccacctactacagactcccaggaggcccagagtcctggtcattccagtgcagggcaagagggtgaggatacactgaggaggcgactgctggccccagaggctggaagtcatccacaacaaacacaaaaattggaagaaattaaagagaatgcacaggacaccatgagacagattaataaaaagggtttttggagctatggccctgtgattcttgtcgtcctggttgtggctgttgtggcaagttctgtgaatagctactattcctctccagcccagcaagtgcccaaaaatccagctttggaggcctttttggcccagtttagccaattggaagataaatttccaggccagagttccttcctgtggcagagaggacggaagtttctccagaagcacctcaatgcttccaaccccactgagccagccaccatcatatttacagcagctcgggagggaagagagaccctgaagtgcctgagccaccatgttgcagatgcctacacctcttcccagaaagtctctcccattcagattgatggggctggaaggacctggcaggacagtgacacggtcaagctgttggttgacctggagctgagctatgggtttgagaatggccagaaggctgctgtggtacaccacttcgaatccttccctgccggctccactttgatcttctataagtattgtgatcatgagaatgctgcctttaaagatgtggccctggtcctgactgttctgctagaggaggaaacattagaagcaagtgtaggcccaagggaaacggaagaaaaagtgagagacttactctgggccaagtttaccaactctgacactcccacctccttcaaccacatggactcagacaaattgagtgggctgtggagccgaatttcacacctggtactgccagtccagccagtgagtagcatagaagaacaggggtgccttttctaaagctaagcacagagttggttacagaaggtatatgtttatgaaaaagtttgtttaaagaccttccatttatatggaaggaggttgataaaatagcttgaggaaatagcctgaaaaacaaagatgagcttattttagaaacaagtttttattttttattccttgtaaaatctttctaatctaagccttgacaaagctaaaaattaacctgactttttttctttggaccaaatcaggtttgaaatatcgatgatatatatgagaattttttttaaattctaaaatatagcaacattgcacaggaagatactcttacttcttagagtaactacagagtgattttttttttttcttgagtgagactctgaagaaccttttcgataatgtttggacttggactaaagcaattagaattatgaagcaatgataacctttagaaaatttttctatcacatgttgaatattttcaaaccttactttaataatctaaagttacgggattatatcttatattaattttgcagttttgagtagtatgataaaagaaataagaattcaaaccattaagtacctacctaaatactacatgtaaggcactgtgcttttatttcattcagctgaggtataagcagctgtactcaaatgttcttaaaaatgagaaccagtggggaaattgtttataatcattggaaatgaagaaattccaattggctatatctttacttcagcttttcttgaacaatttacagcattgattttcaaactgtgtctactggcacccttcccctttgtatcagagcagttctgcttttaactgttttatatgttggggttctctatgagatttcattggaacaaagagtttcactgatattcgagtttgaaaaccattgattaagtgaaaaaacatcttagaagataggaaatatgtttaaaaaatgaatgtattaaatcttatgagtaggaagatgaaatacaggtttattgtatagatacattatttatgaaggataaagatctatacatgaacagcagaatgtataagctagcatttactagcatgtctctgatgcttttgttcatttctgttaatcgtcatttctgtcccctctgcatggaattttatacttgtctagggtaagagtttgtagactctttcagcagaacagattttaataaccaatttatttgttttattttaaaaatttatttttgaataaccaatttaatagtaaattttatatgaacatttggcataactttaccagtttatttctatgcagtgatggaacattatgtaatgcagctcatttcttgaccaactagttatagaagtaccattaggttaaaaattagagaaatctaagagatgttatacttagtgagaggaagcagaaatggtgggtagattctcagaggttttgatgttcagtactgacggaccatgttctgtgattgtaagaaagattgaaaacagtttgtatggagatagagttgattagcatttgagctctgaaagcagaactctagtaaaatgatctcgacctaacaaagggtctgttccattatatagactattaccataatcctggattatttcaactgggttttggcctctccattatatgagatcatatgtatatagctaagaagtctgattaaagtatggaaagattttaggaaacactaagaagatacagggatctttactgatacctaaaaagattacaattgagtaattgctcaattgagtgtaggggcatacctgaaggaagaatttgcatttgggacttcgaaggaagcttccaagagatttgggaagagacctgaacaaaaagttaaagcatggtgaatgtgatatcactgtcaatccagtataaaagcagaggaagttgaaggaaaatctgtatcccatatgcacattttttctgtctttttagatcttagatgctagcgttacatccacaaaaccagtgttgccttgtataactattatattggcctgctgacctgtgctacctcagatctgtcaaggaaccagtatgtcgcatattcttgtttcttcattcagttgaatatggtttttcatcatttctcttcaaaataatttagaaaaataaatttctaaagtcataatttttaatttagcctttttaaaaacattttcccttccatgtatagtgcaatcaattgagggtgttgtcagttttctgtctgctatttcaaaagtcttttttttttttttttttttttgagatggagtctcactctgactcccaggctgcagtgctgtggcttgatcatagctcactgtagctttaaactcctgggctcaagcaatcctcccaccttagcctcctgagtagccgggactacaagtgcagactaccacaccactctaccacactattttgtatagagacagggtcttactgtgttgcctaggctggtcttgaactcctggcctcaagtgatcctcccacctcagcgtcccaaagtgtttggattacagatgtgacccaatgcacccaaccaaacttcttttttttttttttttttttttgagagaaggtcttgctctgtcacccaggctggaatgcagtgcagtggcacaatctcatctcactgtaacctacacctcctgggttcaagtgattcttgtgcctcagcctcccaagtagctgggattacaggcatgcaccacaatgcccagctaattattgtatttttaatagagacgaggttttgctatgttgtccaggttggtctcgaactcctggcctcaattgatccgcctgccttggtctttcaaagtgctaggattataggcacgagccactgcacctggcctcaaaaatcatttttaaaagaagcagtatattagctctgggtcttctcatgactaaaatgactatttttaaacataagaccatattttataaatgtacagataattcaaatctattatctaatgtattaggttaatttctatttgttctatacttttttttttttttttttttttgagatggagtcttgctctgttgcccaggctggagtgcagtggtgcaatcttggctcactgcaagctccgcctcctgggttcatgccattctcctgcctcggccttccaagtagctgggactacaggtgcccgccccgacacctggctaatttttaaaaaaatatttttagtagagacagggtttcaccgtgttagccaggatggtctcgatctcctgacctcgtgatccgcccgctttggcctcccaaagtgctgggattacaggcgtgagccaccgcacccggcctattgacattttttaaggtttcagattttcttttgtgtgtctagtaattcgtcttttattgtcaaagataatttgcttatttgacttagaaaaatgatttgtgggcatacaatattgtatgtggtacctaaacgttgccatttagttactcttacagaacaactttcattacactgtatattaatataaattacttcttgagtaatcccagaattgtagaaccaattggtagaatcagaaactgtctttggacttgaggtttttcttcccttagggtaaattttaggttttctggttagtttccaggagttggcggacaagttcatatcactaaaggtgttcatatcactaaaatagtaatgctaatttgtttcatatttctattttaaaaagcaatcaataaagacatttcaatacatttcatttggaagcccccaagtgtatggtggttaataaggctcagcatgctggtaacccaccattctcttagctagtgactccactaaatagtgctagccgctgagatggttttgaccctttaacagcctttttttttttttgagacagagtttcactcttgttatccaggctggggtgcaatggtgcgatatctcggctcactgcaaccactgcctcccaggttcaagcgattctcctgcctcagcctgccaagtagctggattacaggcacgtgccatcacgcccagctaatttttgtatttttggtagagacggggtttccccacgttgaccaggctggtctcgaactcctcacctcaagtgatccacccgcctcggcctcccaaagtgctgggattacaggcgtgagccaccgcgactggcctacacagcttttaattgcttgatttatactttattaaagagaggaagcacaatgagcagtgatactaaaatataactaatatggcatgtgaaagtgatcattattcagatgatcttcaccaacactgcatttgcatatatctgaccaaactttatgcgacataggcaggtctctggcacttcaaaaatgaatgttaaatagaaaataataaataatagctgattagggtaatcatttatttaatcagaataaagattatatccataaaatttacttgcagagaagtactttctttttgttttaaagacagggtctcactctgtcacccaagctatggtgcagtggcacaatcacagctcactgcagcctggacctcctggcctcaaggggatgatcctcctacttcaggaattatgccaccatgcccggctagttgagaagtactttcaaatagcaacatgaagcctttcctttaccatttgaaaataaaacatagttgtaaacataaaccagtatgtctttgtaaagccaataatatatcattttataggagcattgtcttcttgtgtttttcaagttgactatgtagttcaatgtcagtctccattttaatatcttgtttgtttatcagcctgagcatatttcattttaaaatgtatttgttgagaagtcatggtggttttttgtttttcacaagtcaagtagcttgaacactatcacttgtccaatgggaaagttgatgcttatctttatggcaaatgcttggttgaataatatatttgcaaagatgttaattctacagagagctaaataaagttaagatacctgtaaaacagtttctccagatgactttaaaataagccttatttttgtaaatttatgttaaattttaggtgttaagttgtgaaatacctaatgatgtgggcctaaatttgcctcattcagactgagacagggctgttaaaattcatttctagctaataaactgtgctataacttctttattattattattattattattattatagtttaagttctgggatacatgtggagaacatgcaggtttgttaacataggtatacacgtgccatggtggtttgctgcacccatcaacccgtcatctacattaggtatttctcctaatgctatccctcccccagccccccaccccctgacaggccccagtgtgtgatgttccctgccctgtgtccaagtgttttctttgttcaattcccacctatgagtgagaacatgcgatgtttggtaaactgtgctataacttctgtatctctataggccaatccaaatggcctgagaacataatcagtatcccctaatctgcaaaaaggtaaataccttagtcttcagtacctttccttccagtattatctgcattatctgtgcccgcttgctgtgatgtcttgaaaagcccataaattggttcttattttggcaaatggtctcctgcttttcctcactgaggcttataaactaaatttgcctttggctaagcgcagttacatgaaccaaaaagaacattttagacttgggaagcaacaggctgagtcacattgtatggggcagagttggccaagcccccggcagtcacagccctactctctgtgttccttctaggcctgaggacgcatcaacacaaagctccaggcagttgctcctggttcatcagagagcacaggaaatttaaatctatttgcctttcctgtcataaaagaaacagcacactgactttcaaactcaattgcattttgcttatttgtgcttaacaaaaaatatgtgtgctttgccaatactaacgtcccacttctctgcactccctttctgtataacagggattgcttttgtatttgtttcttatagatgctgatgatgtgccttattcagattagttggccattaccagaataaagaataaatctgaatttttttca

SEQ ID NO: 6225 - DNA, 2512 bp, Homo Sapiens
  NM_145052
acgtctggtgtgggcgggagtgagccaaagtgtgctaaaggaaaccaacagcggcctaggggtgaaaggacagccagggttagatgttctgaggaggcgggagcaaccgagagagcacgtgagcatctgtcctttctacccgttcctctttatctttagtgttcagtagcagcggggatagcccggggcccggtgtatggccacggagttacagtgtccggactccatgccctgtcacaaccagcaagtaaactctgcctcaaccccaagtcccgagcagctgcgacctggcgatctgatcctggaccacgcagggggaaacagagcctccagggccaaggtgattctcctcacggggtacgcccattctagcctgccggccgagctggactctggggcctgcggcggctccagcctcaactcagagggcaacagtggtagtggtgacagtagcagctatgacgcaccagctggcaactccttcctagaggactgcgaactctcccggcagatcggggcgcagcttaagctgctgcctatgaatgatcagatacgggagctacagaccatcatccgtgacaagacagccagtagaggtgacttcatgttttctgcggatcgtttgatcagacttgttgtggaagagggattgaatcagctgccatataaagaatgcatggtgaccactccaacagggtacaagtatgaaggagtgaaatttgagaagggaaattgtggggtcagcataatgagaagcggtgaggcaatggaacaaggtttacgagactgctgtcgatccatacgaattggaaagatcctgattcagagtgatgaggagacacaaagagccaaagtatattatgccaaattccccccagacatttaccggagaaaagtccttctgatgtatccaattctcagcactggaaatactgtaattgaagctgtaaaggttcttatagaacatggagttcaacccagtgttatcatcctactcagtctgttctccactcctcatggtgccaaatcaatcattcaggagtttccagagatcacaattttaactactgaagttcatcctgttgcacctacacattttggacagaaatactttggaacagactaagttatttaagtaaaataattatcttatgtaatattacaatcatgttttgattttctatttgttttactgattcacttgagggtggcagagaaaaatgtgttaaaatgctttttagttttggaagtgggtatatttgaggttatatctcatttagttatttgtttactgttggcaccgaattcaacaatgaagtatatgcaactcttacaaaacataaattttaataatattctaatgcaaattactgaaccctcagtgcattaaaattatttcctaatttatgagcctcttagtttggaggttgcttgaagccacaaataaaactcaaatgagagtcagttctttgtcccactgtagtttgcattttgtttagtttggttttagctctactaaggtttcacatatgtggctattgccacattcctctactgttttctttctgatactggacatgctagtaacttggagaggagaataaaagaatgtctcctggaattttacattcccattaatgtcctcattcagttggcagacctaggatgtatggttaactctcaggccattatgtttttcatggctcatttcccaaactgcattgttggtaggtgccttgctaagctgtaatgcagtgaagaagatggtggggcatttttagtaattggaactgtaacattaatttacaagattgaaccggggatgtctggatgctgacaagggagagccaagtactgttaatgccatcaatcctctaggaaggaattggtggtttttctgaagtgtgggggaaagggtggtttcttgctggatttcatggccagtaagtaaatttaaatgcttcatttttaatttggatgtttctgctagagacctttgatttggaaattagttattttgcatgtttgtcaactgtatatgtatgaaaatagaaaaaaaccatgctttttgtaaaaacccctaagatttgtatatgttcatctttaggcttctgaaagggagagaaatcatattggaaatcagtgttggtgttctgaaatctgcttgtaaaactctcatctcattttacattgatattaaaacattttaacagtgttggctagctgattacttgattaattatactcccatggccccataggaagctgttgtgggcctctgttcaaaagcacagaaaagagcagaaggaaatgtcttagaaagaatcaaagctgatgaaatcagcaaagattgggggaaaggaaggaagcctggtgtagattggattatatttttcctttggggactagaatactagaagaacttcagtatatttttccctttatttttgaatactgtcatataataaattgagattaataaattactcatattacagttcttccatggcaa

SEQ ID NO: 6226 - DNA, 3923 bp, Homo Sapiens
  NM_145059
aaagagcccgctccgccgagcgccgggcgacggcaggaagcccctccgcttggccagaatggagcagccgaagggagttgattggacagtcatcatcctgacctgccagtacaaggacagtgtccaggtctttcagagagaactggaagtgcggcagaagcgggagcagatccctgctgggacgctgttactggccgtggaggacccagagaagcgtgtgggcagcggaggagccaccctcaacgccctgctggtggctgctgaacacctgagtgcccgggcaggcttcactgtggtcacatccgatgtcctgcactcggcctggatcctcattctgcacatgggtcgagacttcccctttgatgactgtggcagggctttcacctgcctccccgtggagaaccccgaggcccccgtggaagccttggtctgcaacctggactgcctgctggacatcatgacctatcggctgggcccgggctccccgccaggcgtgtgggtctgcagcaccgacatgctgctgtctgttcctgcaaatcctggtatcagctgggacagcttccggggagccagagtgatcgccctcccagggagcccggcctacgctcagaatcatggcgtctacctaactgacccccagggccttgttttggacatttactaccagggcactgaggcagagattcagcggtgtgtcaggcctgatgggcgggtgccactggtctctggggttgtcttcttctctgtggagactgccgagcgcctcctagccacccacgtgagcccgcccctggatgcctgcacctacctaggcttggactccggagcccggcctgtccagctgtctctgttttttgacattctccactgcatggctgagaacgtgaccagggaggacttcctggtggggaggcccccagagttggggcaaggcgatgcagatgtagcgggttatctgcagagcgcccgggcccagctgtggagggagcttcgcgatcagccccttaccatggcctatgtctccagcggcagctacagctacatgacctcctcagccagtgagttcctgctcagcctcacactccccggggctcctggggcccagattgtgcactcccaggtggaggagcagcagcttctggcggccgggagctctgtggtcagctgcctgctggagggccctgtccagctgggtcctgggagcgtcctgcagcactgccacctgcagggccccattcacataggcgctggctgcttggtgactggcctggatacagcccactccaaggccctgcatggccgggagctgcgtgaccttgtcctgcagggacaccacacgcggctacacggctccccgggccacgccttcaccctcgttggccgtctggacagctgggagagacagggggcaggcacatatctcaacgtgccctggagtgaattcttcaagaggacaggtgttcgagcctgggacctgtgggaccctgagacgctgcccgcagagtactgccttcccagcgcccgcctctttcctgtgctccacccctcgagggagctgggaccccaggacctgctgtggatgctggaccaccaggaggatgggggcgaggccctgcgagcctggcgggcctcctggcgcctgtcctgggagcagctgcagccgtgcctggatcgggctgccacgctggcctctcgccgggacctgttcttccgccaggccctgcataaggcgcggcacgtgctggaggcccggcaggacctcagcctgcgcccgctgatctgggctgctgtccgcgagggctgccccgggcccctgctggccacgctggaccaggttgcagctggggcaggagaccctggtgtggcggcacgggcactggcctgtgtggcggacgtcctgggctgcatggcagagggccgtgggggcttgcggagcgggccagctgccaaccctgagtggatgcggcccttctcatacctggagtgtggagacctggcagcgggcgtggaggcgcttgcccaggagagggacaagtggctaagcaggccagccttgctggtgcgagcggcccgccactatgagggggctggtcagatcctgatccgccaggctgtgatgtcagcccagcactttgtctccacagagcaggtggaactgccgggacctgggcagtgggtggtggctgagtgcccggcccgtgtggatttctctgggggctggagtgacacgccaccccttgcctatgagcttggcggggctgtgctgggcctggctgtgcgagtggacggccgccggcccatcggagccagggcacgccgcatcccggagcctgagctgtggctggcggtggggcctcggcaggatgagatgactgtgaagatagtgtgccggtgcctggctgacctgcgggactactgccagcctcatgccccaggggccctgctgaaggcggccttcatctgtgcagggatcgtgcatgtccactcggaactccagctgagtgagcagctgctccgcaccttcgggggcggctttgagctgcacacctggtctgagctgccccacggctctggcctgggcaccagcagcatcctggcaggcactgccctggctgccttgcagcgagccgcaggccgggtggtgggcacggaagccctgatccacgcagtgctgcacctggagcaggtgctcaccactggaggtggctggcaggaccaagtaggtggcctaatgcctggcatcaaggtggggcgctcccgggctcagctgccactgaaggtggaggtagaagaggtcacggtgcctgagggctttgtccagaagctcaatgaccacctgctcttggtgtacactggcaagacccgcctggctcggaacctgctgcaggatgtgctgaggagctggtatgcccgacttcctgctgtggtgcagaatgcccacagcctggtacggcaaactgaggagtgtgctgaaggcttccgccaaggaagcctgcctctgctgggccagtgcctgacctcgtactgggagcagaagaagctcatggctccaggctgtgagcccctgactgtgcggcgtatgatggatgtcctggccccccacgtgcatggccagagcctggctggggcaggcggtggaggctttctctatctgttgaccaaggagccacagcaaaaggaggccttggaggcggtgctggccaagaccgagggccttgggaattacagcatccacctggttgaagtggacactcagggcctgagcctgaagctgctggggaccgaggcctcaacctgttgccctttcccatgaagctggcttctctctgcaacaggagaaaacctggagctacagtgtcccccaccttccttgccccatgggaacctccacctcctactccccacccacctctgcgaatctgctcccaaaggaagctgaccagagcaagatctgggcaagcagagagtgcctgggacaggactgtgacctggtggacaggggcctagatgtagcctctgttcctcctggacataggaaggtcccaagcttagtatcccacgtggcctttacaaatcctatggctggccttctcattccacaagggccctggaaagggttgacagccagccttggcatatggctgggagtcccttagcaaggccaaccctgaagaggccctttgaggcattccctatggcttagagttgtagacttacactcaaccctcatgtgagcgtgggagtgagggtggcggtcccttgccaagttggtagcagtgacccagtgattcactgccatcccaggccttaactagcaaaactacggagcgtgccaagtgacctggtgcctgtgggaagtgggttctcaggactggcattcttggaataaattcactctgtccttgcaaaaaaaaaaaaaaaaa

SEQ ID NO: 6227 - DNA, 2893 bp, Homo Sapiens
  NM_145060
agcctgcgcttcggaagcatggatgtgcgcctgcgctgcgctagggcgcggcgggcggtttgaattttgcttacagagtcccgtctcaccatcctgggcttccaacggagactgcggtatccgcagctggagacccagcggcgagtagccttttgctcccggacggacttgagaggcttaaaggatggcctcgtcagatctggaacaattatgctctcatgttaatgaaaagattggcaatattaagaaaaccttatcattaagaaactgtggccaggaacctaccttgaaaactgtattaaataaaataggagatgagatcattgtaataaatgaacttctaaataaattggaattggaaattcagtatcaagaacaaaccaacaattcactcaaggaactctgtgaatctcttgaagaagattacaaagacatagaacatcttaaagaaaacgttccttcccatttgcctcaagtaacagtaacccagagctgtgttaagggatcagatcttgatcctgaagaaccaatcaaagttgaagaacctgaacccgtaaagaagcctcccaaagagcaaagaagtattaaggaaatgccatttataacttgtgatgagttcaatggtgttccttcgtacatgaaatcccgcttaacctataatcaaattaatgatgttattaaagaaatcaacaaggcagtaattagtaaatataaaatcctacatcagccaaaaaagtctatgaattctgtgaccagaaatctctatcacagatttattgatgaagaaacgaaggataccaaaggtcgttattttatagtggaagctgacataaaggagttcacaactttgaaagctgacaagaagtttcacgtgttactgaatattttacgacactgccggaggctatcagaggtccgagggggaggacttactcgttatgttataacctgagtcccttgtgaacttttgaacataccaacagggtatagagtatagaggctatttctataattttcttatatataatttttttaacttttaatcttttttgtttccttttttttttttttgagacaggatcttgctttgtcacccaggggcttgctttgtcacgcaggctagagtgcagtggcgcaaacatggctcactgcagcctcaacctcccaggctcaagtgatcctcccacctcagccccctgaatggctgggactacaagcgtgcgccaccatgcctggctaatttttgtattttttggagagatggggtttcaccatgttgcctaggctggtcttgagctcctgagctcaaacaatccaccctcctcagcctcccaaagtgctgggattacaggcttgagccaccacacctgacctattcttgtttcttataaaaataaaacttttttggataaagcttatttcttgtttttttctttttctttttttttttttttgagacagtctcgctctttcacccaggccggactgcagcggcgctatctcggctcactgcaaactctgcctcccaggttcacgccatcctcctgcctcagcctcctgagtagctgggactacaggcacctgccaccacgcccagctaattttttgtatttttagtagagatggggtttcaccgtgttagccaggatggtctcgatctcctgacctcatgatccgcccacctcggcctcccaaagtgctgggattacaggcgtgagccaccgcgcccggccaacttatatattttcaagattcacctcctctcaccaaatatttaactacctgctgaatacgcctctgtactaggcacataatggaactaaaaaatgctcatgtccagtttttgtgttgagtgaacaatgctgcagaccctaataagattgggtacagatcggcatgcgcctgtagtcccagctactcaggagaattgcttgaacctaggaggtggaggttgcagtgagccgagatcgtgccactgcactccagtctgggcaacagagcgagactccatctcagaaaaaaagaaaaaaagactgggtacagatgtgatattggaagaaaaagatcaagctgatgaggttaggatacccaggccctttggacttaaagatcactagtgtctaaattccatcgatggcatttcagtctataggtaaacttcctggaagctggatttggagacagtttatcatctgattattgggctttcgtataggtccttagggagcagcttacctgaaatgcatttagtgtacaccagtctgtaaacttcaacctgtaatgaaagtgtaataaatgtacattgagttgatgtgataatgtgatataataagaaatatatatttgatcttcctatctagttccttgttcagagctcctaaaacccttgtaatttccaaagtgatggagtacatcttttgttctagtatttggtctttgaccccagttcctgacacaaagctcctaaattcctttaaatttcccagtgataggagaattttttgttctaatgaggtcactcttgatgggcacctggataactcaggatgggggctgctcacaaagaccacatcatgattggaagtttcaaactttcagtctcccacctccagagaggggagaggggctggagatttgtgtcaataatccatcaggcctatgtcaacaagacataatccgttaactatggagttcagggagcttcagggttggcaaacattttgatgtgccaggaaggtgacgcactccagctttatgaagtcagcaagtcctgtgctcaggatgcttctggaccttgccccaggtaccccttcatgtggctgttgttcatctgtatcctttgtagtagccttaaaataaactgttaaacacaaaaaaaaaaaaaaaaaaaaaa

SEQ ID NO: 6228 - DNA, 2226 bp, Homo Sapiens
  NM_145062
attctgggattacttcttttccgtgggagtaaggaagtgcttttgaatgaggtactgagggccaaggtgttggaagttcctaattctttcctcggttaactgtgaaactctgcgtattgggaaggcctggcctcagtcatcaggccaggagaggtactggacgccgcgcacgcactcgtctgccagcgaggcccaaaggggaagcctagcggagctcagtgtggcagctgctggcctctgggccgctacttgtcaataccatgctttcctgtaatatttgtggtgaaacagtaacctcagaaccagacatgaaagctcacctaattgttcacatggaaagtgaaattatatgtccattttgcaagttgtcaggtgtgaattatgatgaaatgtgttttcatatcgaaacagctcattttgagcagaatacacttgaaagaaactttgagaggataaatacagtacaatatggaacttcagataacaagaaagacaacaccctacagtgtggaatggaagttaattcaagtattctttcaggttgtgcatctaatcatccaaaaaattcagctcaaaacctgactaaagatagtactttaaaacatgaaggcttctattcagagaacttaactgaatctagaaaattcctgaaaagtagggaaaaacagtccagcctgaccgaaataaaaggatctgtttatgaaacaacatacagtcctcctgaatgtccattctgtggaaaaatagaggagcacagtgaagatatggaaactcatgtgaaaacaaagcatgccaatcttttagacattccattggaagactgtgatcaaccactctatgattgtcctatgtgtgggctcatatgtacaaattaccatattcttcaggaacatgttgacttgcatttggaagaaaacagctttcagcaaggcatggatagagtccagtgttctggtgatctacaattggctcaccagcttcagcaagaagaagacagaaagaggagatctgaagaatcaagacaagaaatagaagaatttcagaagctgcagagacaatatggtttagataattctggaggatacaaacaacaacaactacgaaatatggagatagaagtaaataggggaagaatgcctccatctgaatttcataggagaaaagctgatatgatggaatcattagctcttggttttgacgatggaaaaacaaaaacttccggaattattgaagcacttcataggtattatcagaatgctgccacagatgtgagacgggtgtggctttcttcagtggtggatcactttcattcatctttaggcgacaaaggttggggttgtggttacagaaatttccaaatgctactttcatcattattacaaaatgatgcttacaacgattgcttaaaaggtatgttgattccttgcattccaaaaattcaatctatgattgaagatgcatggaaggaaggttttgatcctcagggggcctctcaacttaataacaggttacagggaacaaaggcctggattggagcatgtgaagtatatatactcctgacctccctaagggtaaagtgtcatattgttgattttcacaaatcaactggtcctttgggtacacaccctcgcttatttgaatggatattgaactattattcttcagagggagaagggagtccaaaggtagtgtgtacatctaaacctcctatctatcttcagcatcaaggtcacagtcgaactgttattggaattgaagagaaaaaaaaccgaacattatgcttactaatacttgatcctggatgtccttctcgagaaatgcagaaattattaaagcaagacatagaggctagcagtctcaagcaacttcggaaatctatgggaaatttaaaacataagcaataccagatattggcagtagagggtgctctttctctagaggagaaacttgccaggagacaagcttctcaagtctttacagccgagaagattccttgaagaatcaagcatttaagcatttcagtgattgagaacaatactttgttttctaaatgtagatattgaactccttaatacaattatgaatctgtgaattctcttaagtcttaacatataatttaatttctaaaatgcctgtgttaattgaattatacctatcatacttcattgtttggtaaattatttcaataaaatgtcttgtttttgcattgtgaaaaaaaaaaaaaaa

SEQ ID NO: 6229 - DNA, 1202 bp, Homo Sapiens
  NM_145063
ctttggcgggattggctccgcgtttgggctggtccgctgctccccacctaccagggtcggatccggagcccttccccgcggggcggggacctccaaacaaccgactcctttccaggtgaagggtgacttggctgaagaaacacttaaattctggaaatagcgactcagtatcatggccagcagccttaatgaagatccagaaggaagcagaatcacttatgtgaaaggagacctttttgcatgcccgaaaacagactctttagcccactgtatcagtgaggattgtcgcatgggcgctgggatagctgtcctctttaagaagaaatttggaggggtgcaagaacttttaaatcaacaaaagaaatctggagaagtggctgttctgaagagagatgggcgatatatatattacttgattacaaagaaaagggcttcgcacaagccaacttatgaaaacttacagaagagtttagaggcaatgaagtctcattgtctgaagaatggagtcactgacctctccatgcccaggattggatgtggtcttgatcgtctgcaatgggaaaatgtatctgcgatgatcgaggaggtatttgaggcaacagacatcaaaattactgtgtacacactctgaaccagtgaacattttggatgtttccgtgttctcctgtgtcatctctactgggccataggaccgggcaaacctaccttaaaataggcagaggaaagtttcatgagaagtagtgtgtttaacaagacagactttggttgctgtattcaagtatttggattatgactgtggaggagggcttgcttaagatatgtggttgtgtttttttgtggaaaagtaaggagttaggtggcttgataataggcagggaaaccagattgtcgggactatgacctttttctccagtatgctacctgatttgtttggctggccactaggtggcagcattggttctacttctctgctttttaagagaaatttcaggaaggatgatcattccagttagtttggcattttttgtcgtttgtgcacataacttggtgttatccttatgtcatcagattcctcctaggggagagtttttgttttaattacaaaattaaattctacattgttaccaagaaatttgtggtgataaaaatggaaaaataaaaatttggggagttaaaaaaaaaaaaaaaaaaaaaaaaaaaaa

SEQ ID NO: 6230 - DNA, 1079 bp, Homo Sapiens
  NM_145080
gttcgcgttcgccccgcctcaaaggaagaagagtccaccttgcgaccgtatccgctagcgcggcctgggatgcgcttgggctccctgttcgttcccacatgcagggcagcacaaggagaatgggcgtcatgactgatgtccaccggcgcttcctccagttgctgatgacccatggcgtgctagaggaatgggacgtgaagcgcttgcagacgcactgctacaaggtccatgaccgcaatgccaccgtagataagttggaggacttcatcaacaacattaacagtgtcttggagtccttgtatattgagataaagagaggagtcacggaagatgatgggagacccatttatgcgttggtgaatcttgctacaacttcaatttccaaaatggctacggattttgcagagaatgaactggatttgtttagaaaggctctggaactgattattgactcagaaaccggctttgcgtcttccacaaacatattgaacctggttgatcaacttaaaggcaagaagatgaggaagaaggaagcggagcaggtgctgcagaagtttgttcaaaacaagtggctgattgagaaggaaggggagttcaccctgcacggccgggccatcctggagatggagcaatacatccgggagacgtaccccgacgcggtgaagatctgcaatatctgtcacagcctcctcatccagggtcaaagctgcgaaacctgtgggatcaggatgcacttaccctgcgtggccaagtacttccagtcgaatgctgaaccgcgctgcccccactgcaacgactactggccccacgagatcccaaaagtcttcgaccctgagaaggagagggagtctggtgtcttgaaatcgaacaaaaagtccctgcggtccaggcagcattagccatcgtgccctgctgaggggctggctgccttgagtggcctgatcgccacagcccttcttggaagaaaggcgtccgtgtttcaggttccacgcgagtcacctctttcgtcttaatgttcaccgtccacagctttggaataaaccatcctgggaagttgctgcaaaaaaaaaaaaaaaaaa

SEQ ID NO: 6231 - DNA, 942 bp, Homo Sapiens
  NM_145114
ggtggttcttgcccgtgttgtgtgtgtgtgtgagtgagagagcgagtgagtgagtgagtgagtgtgtgtgtgggggggactcggcttgttgttgtcggtgacttccccctccccttcaccccttcccctccccgccgccgctgcagtggccgctccctgggccgtaggaaatgagcgataacgatgacatcgaggtggagagcgacgaagagcaaccgaggtttcaatctgcggctgacaaacgggctcatcataatgcactggaacgaaaacgtagggaccacatcaaagacagctttcacagtttgcgggactcagtcccatcactccaaggagagaagctctatttcctcttttggaaattgtgtactcctgtccttcatcgtcaaagtttgatgcagaaatgccacaccttcatttcaagctaccaagtgcacaagaaaaaagaatgcaagatttaaaaaatgattgttttgaccccttacacaaatgtcttactcctggctttaattaagctgcttgagggctgatagctctgccttaccctggtaatcagcaaaatggtcctgtggctggggaggccctggcagcaggaagccttcaaggagccatgggtctgtgctgactctggccttacaaccttccagcctcctttgctggcattgatggggttccatttttgaatgaactagtttaatgtggatccaaatttattgtgcatattctttcgttttggttttcaaaagatggcttattcacatggaaatgtacaccagtttagccctgggccctccctttaccttcatatgtgtaaaagcttacacaggtttcagaaaataaatggtttcattttctctaaaataactagtacaaaataaaacagatgtcagttgttgaaaaaaaaaaaaaaaaaaaaaaaaaaaaaaaaaaaaaaaaaaaaaa

SEQ ID NO: 6232 - DNA, 2880 bp, Homo Sapiens
  NM_145119
cacaatcacttccgccgccgcagtcgccgcccgccccgctgctgtctggcgggggaggagctcgggaccgggagcagcggctctggcggtcgtggcggtcggagatccgagagctctgcttctctgaaaagcgtgtggctttctggacttggtctacacctgacagtcactggaatgctactccaggccttagaagaaagtgaaactaattttaaaggccccttattctttctgttacctgcctgctgaagtgaaaataaatctccctgctcctttattctaaactgattttactttcccatctcaaaaacgtgtgcagggagcaggagccctcctacccgagccccagctgtattggaaaccctcctaagtcagagtgatgggtcaggaatctagcaagcctgtatggcccaatccaacaggagggtatcagtccaatacaggtaggaggtatggaagaaggcatgcttatgtcagtttcaggccacccacgagccagcgggaaaggattgccagccagagaaagacgaactccgaagtcccaatgcacagatcagcccccagtcaaaccaccaagaggagccgatcgccattttccactactcgtcgtagttgggacgacagcgagagttcgggaaccaacctgaatattgataatgaggactattccaggtatccgccaagagagtacagagcttcgggtagcagaagaggaatggcctatggacatattgactcttatggggcagatgatagtgaggaggagggggctgggcctgttgagcgaccgccagtgagagggaaaactggcaagtttaaagatgataagctgtatgacccagagaaaggggcaaggtctttggctgggccacctccacatttctctagttttagccgtgatgtgagagaggagcgagacaagttagacccagtccctgcagcaagatgctcagctagcagagctgacttcctgccacaaagtagtgtggcctcacagtcgtcttctgaaggcaagctggctacaaaaggtgacagctcggagagggagagaagggagcaaaatttacctgcacgtcccagcagggctcctgtgagtatttgtggtggtggggaaaacacctcaaagagtgcagaggaacctgtggtcaggcccaaaatcagaaacctggcaagtccaaactgcgtgaaaccaaaaattttttttgatactgatgatgatgacgatatgccacacagtacttccaggtggagggataccgccaatgacaatgagggccactcggatggcctggcaagaagagggagaggcgagagttcaagtggctatcccgagccaaagtaccctgaagacaaacgggaagcgaggagtgaccaagtgaaaccagaaaaggtgccgagacgacgacgcaccatggccgaccctgacttctggacgcacagtgatgattactacaaatactgcgacgaagactctgacagtgacaaagagtggattgctgctctgcgtcggaaatatcgaagccgagagcaaaccctgtcctccagtggcgaaagctgggagactctgccggggaaagaagagcgggaacctccacaggctaaggtgagtgccagcactggcaccagccctggccccggtgctagtgccagtgccggggctggcgccggggccagtgctggcagcaatggcagcaattaccttgaagaagttcgagaaccatctcttcaggaagagcaggcatccctggaagaaggagaaattccttggctccagtaccatgagaatgacagtagcagtgagggggataatgattctggtcacgagttgatgcaacctggggtattcatgctggatggaaacaacaaccttgaagatgactccagtgtgagcgaagacctagaagtggattggagcctctttgatggatttgcagatgggttaggagtggctgaagccatttcctatgtggaccctcagttcctcacctacatggcacttgaagaacgcctggcccaggcaatggaaactgcccttgcgcacttggagtctctcgcagtggatgtagaggtggccaatccaccagcaagcaaggagagcattgacgctcttcccgagatcctggtcactgaagatcatggcgcagttggtcaggagatgtgctgccccatctgctgtagcgaatatgtgaagggggaggtggcaactgagctgccgtgccaccactatttccacaagccgtgtgtgtccatctggcttcagaagtcaggcacctgccccgtgtgccgctgcatgttccctcccccactctaaagaccaaggccgtttactcctggtctgattattttccccatctgaaatccacaatactgcaggagccctcttgaaattaacaatggaaataaaaccaatcagtcagttagcctaaacctattgattcctcgtgattatttccaatgtgaaaacagttgtgtatgattgcattaaaaatcatatcatcttttagaggttagaaaagggaaaactaaactttctaaatgctacttgagattgcagtaagaagatacgttttctaacctgaaagttaaatcgcatttgttttcttcagtagaatgggaatgtgttgctgttacttgtaatgtcaagtttatctgttaaatatgtccaaaaggcaaaatcatttttgttgcatgttatgggtcgatgttcctgtaattgcagtgccgtaaaagcttattaaagttgttcttttggttttacatggtataatggaattttttggttttgtctgaagcagtggtactgaatgactttataattgatcccttgcatttgcatcaaaagctttagtttcactggaaatgctgacttcaacaattgca

SEQ ID NO: 6233 - DNA, 2381 bp, Homo Sapiens
  NM_145160
ggagtaacagtgtcgccgccgccttcctcctcctcctctcgccgctaccgccgtcgccgccgccgcagccgccgccggtccgcgcggcctcgggtggccggagctcagcctgcgcgcgccgcgccctgtgtctccgggtggggcagaagactcgccccttgaacctcccgcggggactctccgtggtgtggcggccctggggctctttcttaatagccccggactgagtcccctccagtcgaggaccctctcctagtccactgacgagcggtggacacctgccgctgtatctcccccaaaccgagtccttgccctgctgcctcctcatacccacacggcggcagagaccttcaccatagcgttcgctcaactccagaaccttccgacctccgctagttcctgcgggcctttgcccgcttcccggtgcaccctccccgggagacacctcagacccccgacagcctgggcaggctcggtgcctgcgggtgcgttcctgatcacccctcccctcttccctccccctcatcctccattcccttgttttcaccctctgtcctctgcccgtcactccccttgtcacctcttggagccccctcctaaccagcggccagtgggtttcccataccccaggatgtgagcctctttaacctgtaatgctgtggctagcccttggcccctttcctgccatggagaaccaggtgctggtaattcgcatcaagatcccaaatagtggcgcggtggactggacagtgcactccgggccgcagttactcttcagggatgtgctggatgtgataggccaggttctgcctgaagcaacaactacagcatttgaatatgaagatgaagatggtgatcgaattacagtgagaagtgatgaggaaatgaaggcaatgctgtcatattattattccacagtaatggaacagcaagtaaatggacagttaatagagcctctgcagatatttccaagagcctgcaagcctcctggggaacggaacatacatggcctgaaggtgaatactcgggccggaccctctcaacacagcagcccagcagtctcagattcacttccaagcaatagcttaaagaagtcttctgctgaactgaaaaaaatactagccaatggccagatgaatgaacaagacatacgatatcgggacactcttggtcatggcaacggaggcacagtctacaaagcatatcatgtcccgagtgggaaaatattagctgtaaaggtcatactactagatattacactggaacttcagaagcaaattatgtctgaattggaaattctttataagtgcgattcatcatatatcattggattttatggagcattttttgtagaaaacaggatttcaatatgtacagaattcatggatgggggatctttggatgtatataggaaaatgccagaacatgtccttggaagaattgcagtagcagttgttaaaggccttacttatttgtggagtttaaagattttacatagagacgtgaagccctccaatatgctagtaaacacaagaggacaggttaagctgtgtgattttggagttagcactcagctggtgaattctatagccaagacgtatgttggaacaaatgcttatatggcgcctgaaaggatttcaggggagcagtatggaattcattctgatgtctggagcttaggaatctcttttatggagcttgctcttgggaggtttccatatcctcagattcagaaaaaccagggatctttaatgcctctccagcttctgcagtgcattgttgatgaggattcgcccgtccttccagttggagagttctcggagccatttgtacatttcatcactcagtgtatgcgaaaacagccaaaagaaaggccagcacctgaagaattgatgggccacccgttcatcgtgcagttcaatgatggaaatgccgccgtggtgtccatgtgggtgtgccgggcgctggaggagaggcggagccagcaggggcccccgtgaggctgccgcagggcactgaaagcccaggaccagtaaccaaggagaacaacccacccgtcgcccttctccgtatgctgcctgcgccagaagagctttgctgggccctggcttccctgccctcgccttcacctctgtcagcaggtggccttgcctggggagccccatgtgtggcccaccccaccaggccatccccataccttctggtttgaaggcgctgacactggcagagaggtaaagggtggggcattgagaatggaggctcccagggtccctgcccacttctgttttcctaatgtttttctctataaagggtcaggcccgtcagcatcactgatgggaataaaagtattaatgctttgtgacaaaaaaaaaaaaaaaaaa

SEQ ID NO: 6234 - DNA, 4322 bp, Homo Sapiens
  NM_145167
agcggaagcgagaccgtccatccagaggaaggcaagtttttggctcgggcggctgagaagaccgcgcggggctggagacaggtagcagtacgggggcggggcttcatgccggatgtgatagtctgcagtcgtttcggttggcagcctggcgggtgggagatgcggcggccacctgctgcaaagaaccgaagggaaggttagaagtacgaaggcagtttggagctggggctaagcagctgtcgcacggtcagatcatgggctccaccaagcactggggcgaatggctcctgaacttgaaggtggctccagccggcgtctttggtgtggcctttctagccagagtcgccctggttttctatggcgtcttccaggaccggaccctgcacgtgaggtatacggacatcgactaccaggtcttcaccgacgccgcgcgcttcgtcacggaggggcgctcgccttacctgagagccacgtaccgttacaccccgctgctgggttggctcctcactcccaacatctacctcagcgagctctttggaaagtttctcttcatcagctgcgacctcctcaccgctttcctcttataccgcctgctgctgctgaaggggctggggcgccgccaggcttgtggctactgtgtcttttggcttcttaaccccctgcctatggcagtatccagccgcggtaatgcggactctattgtcgcctccctggtcctgatggtcctctacttgataaagaaaagactcgtcgcgtgtgcagctgtattctatggtttcgcggtgcatatgaagatatatccagtgacttacatccttcccataaccctccacctgcttccagatcgcgacaatgacaaaagcctccgtcaattccggtacactttccaggcttgtttgtacgagctcctgaaaaggctgtgtaatcgggctgtgctgctgtttgtagcagttgctggactcacgttttttgccctgagctttggtttttactatgagtacggctgggaatttttggaacacacctacttttatcacctgactaggcgggatatccgtcacaacttttctccgtacttctacatgctgtatttgactgcagagagcaagtggagtttttccctgggaattgctgcattcctgccacagctcatcttgctttcagctgtgtctttcgcctattacagagacctcgttttttgttgttttcttcatacgtccatttttgtgacttttaacaaagtctgcacctcccagtactttctttggtacctctgcttactgcctcttgtgatgccactagtcagaatgccttggaaaagagctgtagttctcctaatgttatggtttatagggcaggccatgtggctggctcctgcctatgttctagagtttcaaggaaagaacacctttctgtttatttggttagctggtttgttctttcttcttatcaattgttccatcctgattcaaattatttcccattacaaagaagaacccctgacagagagaatcaaatatgactagtgtatgttccacaccctctgctactgtgttacattctgattgtcttgtatggaccagaagagagctttgggacattttttctgaacattctaagcattctagtgaaagttcccatgttccaacagaacttaaaagcaatgtttgccttatatataaaagggacacaataattgaggtccaccttctaggaaatcctaggactcgtttatttgggacatggtgggaataaaggtcacatattggaaaatggaaaggctgatgaaactatcagatactaaaacattcttaaaatagaggaatatagttagagacatcaggtttaagccagtatttgttcctgttttacaatgcttctgtcttaagctgtgtcttaacttttaacacccatcttttctttctaaagctttcctgacagctgtgaaaatccaaaaaatattcttaaactgtgtatggtggcccttgcctgtagtctcagcactttgggaggctgaggtgggagggtcgcttgagttcaggagttctagacccacctggggcaagatggtgagacctagtctcaaaaaaaaaaaaaaaaattagccaggtgttgtggtgcacccctgtagtcatagctgcatgggaggctgaggtgggagaattgcttgagcccagagcaagaccctgtctcaaaaaaaaaaaaaaaaaaaaaaaggaaaggacaactttttagatagaaaagtattaaataatactaagatgcttagtagtattattttagagagttttaaacttctatattaaatgtggggtcttacaagataatccaaagactttgggaggccaaggcgggcagatcacgaggtcaggagattgagaccatcctggctaacacggtgaaacccctctctactaaaaatacaaaaaattagccgggcgtggtgggtgcctgtagtcccagctactcctcgggaggctgaggcaggagaatggcgtgaactccggaggtggagcctgtagtgagccgagatggcaccactgcgctccagcctgggcgacagagcaagactccatatcaaaaaaaaaaaaaaaaaaagataatccaaagaatttaaattgtaatcatgtttcatgtatttgttttattacttacttttatagcacttagtcccagtggtattagactgctatttggtttcatacaaaaaggattaaatttaaattcattcatgtttagacttgagttattacatttttaaaactatcatcttgcctttaatgtttgtggtcctacacaaactattagtacatttcagtatcctcttacccctttgtttttaagtttttgattgctaaagcaagacttttttcttctagaatttaagtcaaccaagtgttatctatgttgtaaaaatggataatagtagattttaggtgataaaacaacttgttagtaagacatttcctagcttaaaaaaaaaaatcaaaaattccatgatagaaatgcagacctgtgagggaaactcctgaaaagcataagaagcatcccagagagccatgggttttctagaccagagaatttagagggagattgtggaactgaggcttaggtggtcagatcgtttcccttatcactgtaatatttctgggggaaaaatgctttctgagttgtttaaacaagcatccttacatttttttttttaattaaacagcctgtctaggcttgggattccctaatactacagtagcagtatatgaatatgattttgtgattgtgttttttaaaagataagtaatttgatgaactgttcttttgcagtcagaaaacactcacaaaaagacaaaaaaagttccacagtattatatttcatgtcagttcaggcctaaaatcctttgcaaataagatgtttataggctggtcacaattaacaatgttattattggcagcacttcttggatggataccttttgggacctttcattagaaagagggaaagaatggggtggttttgtatgggctcctgtttggggtaaaaatagcagagtcagttgctgaggacaatgaccttccttataacatttagtttcatacccatattaggtcttgtcttgaggaccctttatatgtgcttgtttactagtggccttccagccatagcattcttacctttttttcctattctaagaattaaaaaaaaaaattatagagccagcaagggaggaggcaggaaacagaaatcgaatttcatcattccagtatagttgtccctttttttgtatttctgacttggttttataattatatttacttactaattattgttttttaacattctttattgtggcttactcttcatacttagaattgaaattgttggacatcacatgtatattcacattataaatacatcattcttccactgttagacctttagattgcttccagtttttaatattctaaataagactttcaacattttctgtgttttagctcattctcttaggacattcttagaagttagaaacatttctgctgggatcgttggagggaacttcaaactttggaatctttcctgcaagaaattctttaccaaagaaaggcaggtgtttcttaaagggatgcaaaagatattttgcactttgtatgttccaaaacatttagtaagttaactaaaaaaatgagttaatttggtttcttgggggattttaattttttaatttgttttctggttatgtaaaaaaaatgttttttttttgcttcttatcacaatccttttgtttcctttttaatcctttaataacaccttcaaattttataag

SEQ ID NO: 6235 - DNA, 717 bp, Homo Sapiens
  NM_145169
gcacgagggctacggccctggaacggggccatggagaagctgcggcgagtcctgagcggccaggacgacgaggagcagggcctgactgcgcaggtcctggatgcctcatcccttagtttcaacaccagattgaaatggtttgccatctgcttcgtatgtggcgttttcttttctattcttggaactggattgctgtggcttccgggcggcataaagctttttgcagtgttttataccctcggcaatcttgctgcgttagccagtacatgctttttaatgggacctgtgaagcaactgaagaaaatgtttgaagcaacaagattgcttgcaacaattgttatgcttttgtgtttcatatttaccctgtgtgctgctctttggtggcataagaagggactggctgtgttattctgcatattgcagttcttgtcaatgacctggtatagcctgtcatacatcccatatgcaagggatgcagttattaaatgctgttcttctctcctaagttgaaaatcagaaacttgtggaaaagagcacttgaatgttggtactctatgtttggtgaagtttgcttttccccataaaacactccaggaacaactgacgtgacagttgaagaccgttttgtactaagtctcattttgtatactggtaaaaactacatgcttgattaaaccattaaatgcttgtaactttaaaaaaaaaaaaaaaaaaaaa

SEQ ID NO: 6236 - DNA, 725 bp, Homo Sapiens
  NM_145182
gtccaggttccgccccggagccgacttcctcctggtcggcggctgcagcggggtgagcggcggcagcggccggggatcctggagccatggggcgcgcgcgcgacgccatcctggatgcgctggagaacctgaccgccgaggagctcaagaagttcaagctgaagctgctgtcggtgccgctgcgcgagggctacgggcgcatcccgcggggcgcgctgctgtccatggacgccttggacctcaccgacaagctggtcagcttctacctggagacctacggcgccgagctcaccgctaacgtgctgcgcgacatgggcctgcaggagatggccgggcagctgcaggcggccacgcaccagggcctgcactttatagaccagcaccgggctgcgcttatcgcgagggtcacaaacgttgagtggctgctggatgctctgtacgggaaggtcctgacggatgagcagtaccaggcagtgcgggccgagcccaccaacccaagcaagatgcggaagctcttcagtttcacaccagcctggaactggacctgcaaggacttgctcctccaggccctaagggagtcccagtcctacctggtggaggacctggagcggagctgaggctccttcccagcaacactccggtcagcccctggcaatcccaccaaatcatcctgaatctgatctttttatacacaatatacgaaaagccagcttgaaaaaaaaaaa

SEQ ID NO: 6237 - DNA, 2727 bp, Homo Sapiens
  NM_145230
gttgctagagataccgcctggaggccactgatctgtaaaagggatctctacagaagatagggatttttgatcgccagagaagaagggatatgtgagatccaaacgccgaaggaggaaagcaggctccgtggtctcttccagccctgatggaagaaactaccgagccttattatactaggtgctttccacatgcctattcatttaatcctccagcaaccttgtaagaagggccatcccattttatatttaaacaaaccttaactactgacgcaaggagtcaaggatctaatcccaaagcctctgcctggttcgctgcagatggatgtccgcgaggacgccagccctccgcctcccgccgggtccctgaacgccggcccggccggtccaacctcattccgcttcccgccatcgaaacgcgaagcccccgccttcccccaaacgtctcagcgccgctggggcctttctggctgcgccgcctccgaccccaggccccggtccgcgcccgccgctcgctagtcctgggagtgaggagaacgcgtgctgaggacccggccagagggacagcggggaccgccctcccgctgcgtctctgaaagcgaggccgttcctcccgcgtccgacccccgcggggccgtcaggttcggggcggcccaggctgcgggtccgcagggcgcttcgggccgagccggcgcggcgcgtgaagggcaggggacgccccgaaagaccgctggggtgggaccccaagctccaggggtctttggaaataagaatgcggcgtgacgttggctgtgcgggcgcggggctgacgcggaccctataacccatcgccgaaaccgggcggccgcgcccctattcctcggcatttctctctgtccgcggccctgctcagccaatcagcgagtgggctcctaggcaggtcctgagtgacagcgcggcgggctggatcaggagatgcgcgtgcgcggcccggcccggctgatcgcttcgggtgctcgactcctgttgcgcatgctcagcgcgctgcccggctggggacccgcgcacctgcagcgcccgctgctcggccctgcatcctgcctgggcatcctgcgcccggccatgacggcgcactcattcgccctcccggtcatcatcttcaccacgttctggggcctcgtcggcatcgccgggccctggttcgtgccgaagggacccaaccgcggagtgatcatcaccatgctggtcgccaccgccgtctgctgttacctcttctggctcatcgccatcctggcgcagctgaaccccctgttcgggccccagctgaagaatgagaccatctggtacgtgcgcttcctgtgggagtgacccgccgcccccgacccaggtgcccagctctcggaatgactgtggctccactgtccctgacaaccccttcgtccggaccctcccccacacaactatgtctggtcaccagctccctcctgctggcacccagagacccggacccgcagggcctgcctggttcctggaagtcttcccagtcttcccagccagcccgggccctggggagccctgggcacagcagcggccgaggggatgtcctgctccaatacccgcactgctctggagtttgccctctttcccaaggagatgctgctggggagctggtatgggtggggtctttccctttacagacggggcagatgccaggactcagcccatcctgaggaggacacgtgtcctcatggagagggtgctccggcccaggcgggggagtcagtgcccagtcagcagctctgccaccatcctgctgggaactgggggggcctctattgggttataggcaaggccttttctctggcatggaattgttaattttctgacacgtctagatgtgaaatttctgaaaatgttgaagcagagaaacattcacacacaaaaagcaacatagtcatgtgggtccagatggcctcagtcctagatgttggcaccctttgctgtgtctcctcagagtatcctgttccgcctcctgccacctggacctccctcagtggatgtcttccctcccccgaccccagcctgtcagtccgagcacagtgcaggtttggctctgacttgggcttttggctgcagtgggggtggatttcagagcctctcatggcagcatctaagtgaccagagctgggatgagagaggggaaggggcaatgtgagtggcgctatgggacgggccagccctgctcctgagccagccccgccctctgccccctggccctgggctctgtgctagggatggtgaagaatgggggcgtgccagcctggcaggagtgggaagcaacacgcaggggtcccggacctctccagccttgccctcacgcttacccgagctcccagtgtggttagcacagagctcacccaccttgcctggctcccagctggggcctgtcctcactggtgctccaggggaagaaacgacagcctcacttctgtatggactgctgatgtggcctgccatcctgttcagcgggcattgtctttggagcagcaggagaataggatgcctctcactcacatgccagttcctggctggccagctgctcagggctcaggctggggcctcccattgacatcctccccctacactccctctctgagcctccgtcgcccctcctgttgggtaagggtgttgagtgtgacttgtgctgaaaacctggttcatatataataaataatggtgatgaaaagatta

SEQ ID NO: 6238 - DNA, 2606 bp, Homo Sapiens
  NM_145239
gtaacgcgtggctcccttgggctggcgggaggggccggaggctcgcgaggggcgggggcggcgacggcggcggagcgtaggggaggggaccggagaggaggggatgagcacacgggagaggagaagagggagacccgccgcctccctccctccctagctgacttgctccctcccgggctgcggctgctgcaaaagccagcagcggcagcgggagctgtccggaggccggcgtcgagggtttgccgctgtctctgctattccatcctccccataggggctctctcccctctcccatctcaagatggcagccagcagctctgagatctctgagatgaagggggttgaggagagtcccaaggttccaggcgaagggcctggccattctgaagctgaaactggccctccccaggtcctagcaggggtaccagaccagccagaggccccgcagccaggtccaaacaccactgcggcccctgtggactcagggcccaaggctgggctggctccagaaaccacagagaccccggctggggcctcagaaacagcccaggccacagacctcagcttaagcccaggaggggaatcaaaggccaactgcagccccgaagacccatgccaagaaacagtgtccaaaccagaagtgagcaaagaggccactgcagaccaggggtccaggctggagtctgcagccccacctgaaccagccccagagcctgctccccaaccagacccccggccagattcccagcctacccccaagccagcccttcaaccagagctccctacccaggaggaccccacccctgagattctgtctgagagtgtaggggaaaagcaagagaatggggcagtggtgcccctgcaggctggtgatggggaagagggcccagcccctgagcctcactcaccaccctcaaaaaaatcccccccagccaatggggcccccccccgagtgctgcagcagctggttgaggaggatcgaatgagaagggcacacagtgggcatccaggatctccccgaggtagcctgagccgccaccccagctcccagctggcaggtcctggggtggaggggggtgaaggcacccagaaacctcgggactacatcatccttgccatcctgtcctgcttctgccccatgtggcctgtcaacatcgtggccttcgcttatgctgtcatgtcccggaacagcctgcagcagggggacgtggacggggcccagcgtctgggccgggtagccaagctcttaagcatcgtggcgctggtggggggagtcctcatcatcatcgcctcctgcgtcatcaacttaggcgtgtataagtgaggggctctgccccgcatcccaagacttttcttcctgttgggagctgccttgggcccatccctcccctggggggagcccaactgatggccctggcccccacccctaaggaccaagggagcctgagcggccttgtttacagcttctgtcctgctcctgcatcttgccaggctcctctgccaactgtaggcctgcctcatccctgcactggttccaacctccctgcactaatgcctgcatcccctccggcctcttggccccctatccctgcacttctggaaacctccctgcactctggaaacctccctgaacacctccccaactctgcgctctcagcctccctgcatctctcctggcctccctgcacttcttccagccccccaaattctctggacctccaccctggccgcctcctcccaactttcattgtcttggcatctctcaaccctcagtcctctcttccttcccttctttatcatctcccctttcctctccacgtcccgcccccttcctcttcctgcctcctcatctcccttaagcatcctcttctccaacctcccgtcaccgtttactctgcaaaattgacagcacttagacgaggcttgggggcagggagcagtgttgggagagggctccccaaccccaggctcggactgttctctgctgggaccacccagggtcggacacccaagggtgcctggcaggtcgcagagttggcaagccgggcctcgtatggggactcgggtgagggtggcgagtactggttccgaacgcacgcaggggagaagggagggacgcggcgctgacccttccaggtcagctggagttgacccgcccacctgggcttttcaaccccagtccgcgagtttctttcttgaaggtgtgggggctagattcattcacgtgcttcgtaatgaaataatccaaaaaataggaccaaagcgcccactggcaggagcgagggcggggcgccgcgctctataattattttctaagatgatgggggaggtttgttgcacgcgacagcccgctgaggaggcggggaccgagctacaacgcggttcggatttggcgggggtttttttccttaaaaaaaaaaaaaaaaaaaaaaaaaaagtctgggggaagaaaaaaactaaaattcttaaaaaaaaaaaaaaaaggctattatcaaactgatttctccctttttgtatgccggatgctgcatgagtctgaaacaccaataaacggagactgcatgagaaaaaaaaaaaaaaaaaaaaaaaaaaaaaaaaaaaaaaaa

SEQ ID NO: 6239 - DNA, 1518 bp, Homo Sapiens
  NM_145247
agcggcgcctcgcgcgtcaggcaatctggccaattgcgcatcttttccgcctaccgcacggccccgcccctgccacaggatcgatttacggccgcagagaaaaaccaagatttcactttcaagatggaaagtccgtcagactcagctgtggttttacctagcactcctcaggcctctgcgaatccatcatctccctatacaaatagttcccgaaaacaacctatgagtgcaacacttagagaaagattaaggaaaacaagattttcatttaattcctcttacaatgtggtgaaacgtcttaaagtagagagtgaagaaaatgatcagaccttttcagagaaaccagcatcttccacagaggaaaactgtttggaatttcaagaaagttttaaacatatagacagtgaatttgaagaaaatacaaatttgaaaaatactttgaagaatctcaatgtctgtgaatctcagtcacttgattctggatcatgcagtgctctccaaaatgagtttgtgagtgagaagcttcctaaacaaagattaaacgctgaaaaagccaaattggtgaagcaggttcaggagaaagaagaccttcttcggaggctaaaactagtcaaaatgtatagatcaaagaatgatctgtctcagttacagttgttaataaagaagtggagaagctgtagccagctcttgctttatgagttgcagtcagctgtgtctgaagagaacaagaaactaagccttactcaattgatagaccactatgggttagatgataaattactacactataacagaagtgaagaagaatttatagatgtttaattcctgatttttgctccagaatatctttgagaatgacaacttaattaaaagatacttaggcactttttttttttttttgagactgagtttcgctcttgtcatcctggctggagtgtgatggtgcgatcttgactcactgcaacctctgcctctcgggttccagcaattctcctgcctcagcctcccgagtagctgagattacaggcgcccgccaccatgcccggctaatttttgcatttttagtagagactgggtttcaccacgttggccaggctggtctcgaactcctgacctcaggtgatccaccgcctaggcctcccaaaaccattagggctcagaggaaggtatcccaatgaatatcaattaagggcactttaatatataaattataaactaagttctaaaaggaaaattagtattttggatagatttgtcaaaacgacatttaagtcatgtttaaaaagtcatttgggcagttctggaaactagttttaatacatttgttttttatgacaaaaagttttattttaaatgttaaaaattgtccaatctggtgaatgtctaaccctaaagtttaaaaatttctgcctcctaagtttatgtaccttgtttccatccatttaccacatatttccatctgatagtctagcaggtaattaaacttatatgtccaaaaccataaaaaaaaaaaaaaaa

SEQ ID NO: 6240 - DNA, 1754 bp, Homo Sapiens
  NM_145255
actcggcttccgtccattcttccggtggagatggctgcggccgtggcggggatgctgcgagggggtctcctgccccaggcgggccggctgcctaccctccagactgtccgctatggctccaaggctgttacccgccaccgtcgtgtgatgcactttcagcggcagaagctgatggctgtgactgaatatatccccccgaaaccagccatccacccatcatgcctgccatctcctcccagccccccacaggaggagataggcctcatcaggcttctccgccgggagatagcagcagttttccaggacaaccgaatgatagccgtctgccagaatgtggctctgagtgcagaggacaagcttcttatgcgacaccagctgcggaaacacaagatcctgatgaaggtcttccccaaccaggtcctgaagcccttcctggaggattccaagtaccaaaatctgctgcccctttttgtggggcacaacatgctgctggtcagtgaagagcccaaggtcaaggagatggtacggatcttaaggactgtgccattcctgccgctgctaggtggctgcattgatgacaccatcctcagcaggcagggctttatcaactactccaagctccccagcctgcccctggtgcagggggagcttgtaggaggcctcacctgcctcacagcccagacccactccctgctccagcaccagcccctccagctgaccaccctgttggaccagtacatcagagagcaacgcgagaaggattctgtcatgtcggccaatgggaagccagatcctgacactgttccggactcgtagccagcctgtttagccagccctgcgcataaatacactctgcgttattggctgtgctctcctcaatgggacatgtggaagaacttggggtcggggagtgtgtttgtcacttggttttcactagtaatgatattgtcaggtatagggccacttggagatgcagaggattccatttcagatgtcagtcaccggcttcgtccttagttttcccaacttgggacgtgataggagcaaagtctctccattctccaggtccaaggcagagatcctgaaaagatagggctattgtcccctgcctccttggtcactgcctcttgctgcacgggctcctgagcccacccccttggggcacaacctgccactgccacagtagctcaaccaagcagttgtgctgagaatggcacctggtgagagcctgctgtgtgccaggctttgtgctgagtgctgtacatgtattagttcctttactgctgaccacattgtacccatttcacagagaaggagcagagaaattaagtggcttgctcaaggtcatgcagttagtaagtggcagaacagggacttgaaccaagccctctgctctgaagaccgcgtcctgaatttcttcactagagcttcctcatcaggttacccagaagtgggtcccatccaccatccaggtgtgcttggatgttagttctccaccctcgaggtgtacgctgtgaaaagtttgggagcactgctttataataaaatgaaatatattctacttcctttattttgtggtttacacggttgtcctccctctaaacttactctcaggggcttctctgtcatctgactttcctcactcttgcttcccttcctaggaaaatcctcttcccctatacctgttcccacaaatggcatcccgcgcatgcttgccctattaaaggcagctgacagctgtacccactaaaaaa

SEQ ID NO: 6241 - DNA, 1476 bp, Homo Sapiens
  NM_145261
acgacagttttccggcctagtttgcggctgctcctgccgtgttgcgtagggcgcctgtgcttgaggttgggggttgcgtcgctctctggtaaaggcgtgcaggtgttggccgcggcctctgagctgggatgagccgtgctcccggtggaagcaagggagcccagccggagccatggccagtacagtggtagcagttggactgaccattgctgctgcaggatttgcaggccgttacgttttgcaagccatgaagcatatggagcctcaagtaaaacaagtttttcaaagcctaccaaaatctgccttcagtggtggctattatagaggtgggtttgaacccaaaatgacaaaacgggaagcagcattaatactaggtgtaagccctactgccaataaagggaaaataagagatgctcatcgacgaattatgcttttaaatcatcctgacaaaggaggatctccttatatagcagccaaaatcaatgaagctaaagatttactagaaggtcaagctaaaaaatgaagtaaatgtatgatgaattttaagttcgtattagtttatgtatatgagtactaagtttttataataaaatgcctcagagctacaattttaaaaaatgatttagcacaagctaaatctcaaagccttggtataattttcttgtttaaatttggggattttaaatcagattatagtttagaatatttgcgtattaattatgggcaagcacacaccttctgaatagaaatattgttcattactcatttagcagataatttgggacctatgtctacttttcaaggcaaagtgaagatgacagtccttgctctcagggagcccccactttaatgggagactgataaactggtaattagactgtgataaatagtatgatggaaattagcttaagctgtttaagtagggactcttcttattcggtggaaaggctgttccaggtacaggcaactggcctggcaacttggatacttggaaccttgtatttaaaagtgaatttaaccacaactgagacctaagaaattgacctaggggtgtgtgtgtgtgtgtattctatgtacatataaaccatttttatttcatgcattaaaaatagtatgataaagatttcagagtacaggtctggtacaatcacagttcattgcagcctcaacctcctgggtttaagcagtcctcccgcctcagcctcccaaagtactgggattacaggcatgagtatttacattgtattcagctagccccttaaaggtaatgaccatttataaattattccttcagttggctatttcttgacataatcaaacttctgcaattgttatgattaagcttaaaccctgttagcaaaactgaaaactgaaatgttctcaatatcaacatatttaatttggactctttagaatttatacactaataaatttaaatgatgtttaaaggcaaaaaaaaaaaaaaaaaaaaaaaaa

SEQ ID NO: 6242 - DNA, 3798 bp, Homo Sapiens
  NM_145262
caccccctagtacttccgttctccagcgctgggcaccgcggccggagctgtgggctggcagccatgggtgccaggcagtgctgagagcagtggggcatggctgcagccctgcaggtcctgccccgcttggcccgagcccccttgcatccactcctctggcggggctcagtggcccgtctggccagcagcatggccttggcagagcaggccaggcagctgtttgagagtgctgtaggtgcagtgctgccgggccccatgctgcaccgggcactatccttggaccctggtggcagacagctgaaggtgcgggaccggaactttcagctgaggcaaaacctctacctggtgggctttggcaaggctgtgctgggtatggcagctgcagctgaggaactactgggccagcatcttgtgcagggcgtgatcagcgttcccaaggggatccgtgctgccatggagcgtgccggcaagcaggagatgctgctgaagccacatagccgtgtccaggtattcgagggtgcggaggacaacctcccggaccgcgatgcgctgcgggctgcactggccatccagcaactggctgagggactcacagctgatgacctgctgctcgtgctgatctcaggtgggggttcagctctgctgcctgcccccatcccacctgtcacactggaggagaagcagacactcactagactgctggcagcccgtggagccaccatccaggagttgaacaccattcggaaggccctgtcccagctcaagggtggggggctggctcaggccgcctaccctgcccaggtggtgagcctcatcctgtcagatgtggtgggggaccctgtggaggtgattgccagtggccccaccgtggccagttcccacaatgtgcaagattgcctgcatatcctcaatcgctacggcctccgtgcagccctgccacgttctgtgaagactgtgctgtctcgggccgactctgacccccatgggccacacacctgtggccatgtcctgaatgtgatcattggctctaatgtgctggcgctagctgaggcccagcggcaggccgaggcactgggctaccaggctgtggtgctgagtgcagccatgcaaggtgatgtaaaaagtatggcccagttctacgggctgctggcccatgtggctagaacccgcctcaccccatccatggctggggcttctgtggaggaagatgcacagctccatgagctggcagctgagcttcagatcccagacctgcagctggaggaggctctggagaccatggcatggggaaggggcccagtctgcctgctggctggtggcgagcccacagtacagctgcagggctcgggcaggggtggccggaaccaggaactggccctgcgtgttggagcagagttgagaaggtggccgctggggccgatagatgtgctgtttttgagcggtggcaccgatgggcaggatgggcccacagaggctgctggggcctgggtcacacctgagcttgccagccaggctgcagctgagggcctggacatagccaccttcctagcccacaatgactcacataccttcttctgctgcctccagggtggggcacacctgctgcacacagggatgacaggtaccaatgtcatggacacccacctcttgttcctgcggcctcggtgatggcataggtcacattttgggagttcagaggaggcctacaagggcaaggtcagatggcagagcaaggttggtcctcagggcctctctaagccttagggcccctcctctccttggccttggctgtttggttaactgtcaccttccactcagggcctctgctctatatctattcccttccagccagactggcagatgggggcttccccctacccctgaggatgaggacaagcccctcggccagttcagcgttcccgtgcttctcccttgggcagcctctctcttgagcccctcaccctgtttctttctgtgaagcgagaatgtctgaaaataaataggaccatgccatgggttctcagtgcgccttccctcagagtgaggcctcacgggggagccgctgggaggggagcgtggtacggctgcagccacagtaccagggcctggcaggactcttaacacccctctactgggctgggtacgtgcaggatgtgcctcgcataacgggagcctgtgcccatccctctggagtgtgtgagggttgagcttggctcctgacagctttgatgtgcgtgagcagagaccccagggaggacaggcctaaagactgcagtctggggtgaccagccacccacccacccaaccatgactccaccatggcactgtcaccatggcttctccagcctcagcttgtaggcctcgttggatggatgtcctttctgtctttggacagcccttagccacatactgcacttctggttgagctgaagtttgtcccaccccccagtgctgtttccttgtgacagcccttgtcctaggctgaacatccctagttccttcagccactcctctggggaccaagtccagaccctgaagtcagcccttcagtgggggtcccagcactgggatggtgggtccagccagtgatgaggtccagtgacccacacctcttcctgtgaccactggcgggagaagaggcaagtgggaatagaggaacggctgtgttggcctggccagcagcctgggttgagagagggaggtgccactgtcctgcctccttttgagcccccttgctcagtgtcagaaccctccgctggctgtccccgccgtgcgccacggctccaatccctatatgagtgagcagtagaatcacataggaataaaaagccatagagaacagcgaggcctggggctgctcttgcaggcacttcttccaccccaaccctcccctcctccctgagggtgtggaggggccctgggccagggctggcaggactttcccctgggaagggtttcccttccccacctgggctctgggcagcctagcttgcagacagttcatgacctgggggcctggctcacacagggcaggctggagattgggagggaggtaaacgtggtaagcgggctctggggaccagggaggtttaggaaaaggggagcttgcaccccactgggatgcgcaggcaccgcttcctttccttctgtgctggcatggagttcctgctgactagggtcacagtctctggggttatggtgatcctcgcatgatcctgtgccgtggtgctcctctggcagcgtctacatgtagcctgttcctgcctcagtccttgctcttgggagcatgagtattggcactgggttccaagttccaggcaaaagcaggataggagagctggggcaggggctgcaggagctgagggcctggcagccatgtccccagtgtgtgtgtgggtggtaggtgtgtgagtatacagacgttggtgttggcgtactcagagtgggaatgcatctctgagtgtacacatagatacttagtacagggcacatgactccctgcatccctgctgagggctttgggtatggataggatcttgcaggaggttccccctgctctacattgaccccttccctatacttctgtttgtaggggctgggaggccagggcccggattggaccccatagggccaaatggtctgtgagcctaacccgttagatttgctcactggataccccagagataagaaaggatgtatttggccacagtctaaatgctgagatgagaaaaccctgcacagtgaatgttttgataggattcattacttgctccataaatgtcaattttggatcattga

SEQ ID NO: 6243 - DNA, 1437 bp, Homo Sapiens
  NM_145265
ggtactgagtgggggcgccgcgcctgcgcaaagcggacccgcggacggtggcgttaagggaacgctgaggtcccgcgctccccgaccgaggtatatctccatgaataacctaaatgatcccccaaattggaatatccggcctaattccagggcggatggtggtgatggaagcaggtggaattatgccctgttggttccaatgctgggattggctgcttttcgttggatttggtctagggagtcccagaaagaagtagaaaaagagagagaagcctaccgtcggagaactgctgcttttcaacaggatctggaagccaagtaccacgccatgatctcagaaaatcggcgtgctgtcgctcagttgtccttggaactcgaaaaggaacaaaacagaactgctagttaccgagaagcccttatctctcagggacgcaagttggtagaagaaaagaagcttctggaacaggaacgggcccaggtgatgcaagaaaaaagacaggtgcagcctttgagaagtgcgtatttgagctgcctgcaaagggaagaaaactggcaaaggagagccaggcttttgctgaaagaatttgaagctgttctcacagaaagacagaatatctactgcagtctgtttcttcctcgcagcaagcggctggagatagagaagagcttactggtgcgagcgtccgtcgaccccgtcgccgctgacctagagatggcagccggtctcaccgacatatttcagcatgatacatactgtggtgatgtctggaacaccaacaaacgccagaatggcagactcatgtggctctatctcaaatactgggaactcgttgtcgaactgaagaagtttaagagagtagaggaagccatactagaaaagtaagacaagagtgaaatcaaactgcttttagtgactcgaggccaggcagtcatgcgccttctgggtctccggcgtcttccgttcccgtgctgcccgtgtcatggccacaccgtcacccttcagcagcgacctccactcccgccaccgtctgagcagaagtgcaccgaagcctcagagacagagggtctcctcccgatgctctgccgctgttggggatatggtttcttgaagcatttttaggctgccagtattgtattaagcagaacagtataacctcgtattttagctccagggtaaaaatggttttttaaaaagtcaaatacaatactggtccttaccacaagtaattttctgtctgtttcatcactccctaaatactttctcctcaaattatttttctctgtcaccagattacattaagaatttgtcagataatgtgtagaactgcataacaggtaataggaagtagtaatattatattatcaagggtttatattttaaagatctctctcactccataaaggggaaataccaagtgttaaaaaaaaaaaaaaaaa

SEQ ID NO: 6244 - DNA, 1839 bp, Homo Sapiens
  NM_145271
ttctaccgcgggtgtacacatggtttgccagggtgtgcgcgtcttcccaaggggtctggggaccaaattccagctcccgccatcgggaggcacggtaagagaccgtaggggacacaatcccgagcaccgcagatgccgaggtctccgctgcgctccagtctgtcaacagaggcttcaggaccgcggggtcccttcaaatgccccgccagtcccaggccaatcaccgcgcagcttcttccgggatcgtcgccaatcatcggccgttgcgtattgcgggtacagaggggtaagtgaagcttcgggcccttacatctttcttgaaggcaagaagcctctcctctacttcccagacaccccgcctcccccactagaaaaagcagccgaagcggctttatttaagggcaagtgggacgatgaggccagagaagtcagaaaggctccatatttgatatggtcaaataatggcgcccttaagagcagcctgtgacaattgaagggtggtcgccatattttcagaaggcaccttccgggtcccttaacccgggtgtctatgtccaagcggccatgaagtgaataaacactgaggaattatatttgtccctatcagaatcctcgaatccctagcagccagtccctgctacttcggttgcctcggctgcgttcggacgccacggctgggcggggccgcccttcctgtggacaacgacagctgaggccgggagcggggaggcggcggctccagggacctggcggccgccgatcggggctgcgaggccccatggcgccgcccccagccccgctcctggcgccgaggcccggggagacccggcctggttgcaggaagcccgggactgtgagcttcgcggacgtggccgtgtacttctccccggaggagtggggctgtctgcggcccgcgcagagggctctgtaccgggacgtgatgcaggagacctacggccacctgggcgcgctcggattcccaggccccaaaccagccctcatctcttggatggaacaggagagtgaggcttggagccccgccgcccaggatcctgagaagggggaaagactgggaggagctcggagaggagatgtcccaaacaggaaggaagaggaaccggaggaagtcccaagagccaaagggcctagaaaggctcctgtgaaggagagtcctgaagtgctggtggaacgcaaccctgacccagctattagcgtggccccggcacgggcacagccacccaaaaatgctgcctgggacccgaccacaggagcacagcccccggcacccatacccagcatggatgctcaggccggccagcggcgccacgtgtgcacggactgcggccgccgcttcacctacccctcactgctggtcagccacaggcgcatgcactcgggggagcggcctttcccctgccccgagtgtggcatgcgcttcaagaggaagttcgcagtggaagcgcaccagtggatccaccgctcctgctccggggggcggcggggccggaggcctgggatccgggctgtgcctcgggcccccgtccgaggtgaccgggacccgcctgtgctcttccggcactacccagacatcttcgaggagtgcggctgagcggcaccgcaggctggagttgagcctgaccttggcacgaaggactgacggatccctgaggtgggccactgagtcggggactccggaactgaaattcatgccctgggctttcctcaaggatccctcaagtttccaacttgtaaaaagaaaagtgcctgtaaagattcgaatagattagacttgccacccatctccccagtcttttgtttaacaaaaaaaaaaaaaaaaaa

SEQ ID NO: 6245 - DNA, 2799 bp, Homo Sapiens
  NM_145273
aaagacccgtgtgactgaagaggagctcacagttcccagcgtctgctcccacggtgtccagcgcccagaatgcggcttctggtcctgctatggggttgcctgctgctcccaggttatgaagccctggagggcccagaggaaatcagcgggttcgaaggggacactgtgtccctgcagtgcacctacagggaagagctgagggaccaccggaagtactggtgcaggaagggtgggatcctcttctctcgctgctctggcaccatctatgcagaagaagaaggccaggagacaatgaagggcagggtgtccatccgtgacagccgccaggagctctcgctcattgtgaccctgtggaacctcaccctgcaagacgctggggagtactggtgtggggtcgaaaaacggggccccgatgagtctttactgatctctctgttcgtctttccaggaccctgctgtcctccctccccttctcccaccttccagcctctggctacaacacgcctgcagcccaaggcaaaagctcagcaaacccagcccccaggattgacttctcctgggctctacccggcagccaccacagccaagcaggggaagacaggggctgaggcccctccattgccagggacttcccagtacgggcacgaaaggacttctcagtacacaggaacctctcctcacccagcgacctctcctcctgcagggagctcccgcccccccatgcagctggactccacctcagcagaggacaccagtccagctctcagcagtggcagctctaagcccagggtgtccatcccgatggtccgcatactggccccagtcctggtgctgctgagccttctgtcagccgcaggcctgatcgccttctgcagccacctgctcctgtggagaaaggaagctcaacaggccacggagacacagaggaacgagaagttctgcctctcacgcttgactgcggaggaaaaggaagccccttcccaggcccctgagggggacgtgatctcgatgcctcccctccacacatctgaggaggagctgggcttctcgaagtttgtctcagcgtagggcaggaggccctcctggccaggccagcagtgaagcagtatggctggctggatcagcaccgattcccgaaagctttccacctcagcctcagagtccagctgcccggactccagggctctccccaccctccccaggctctcctcttgcatgttccagcctgacctagaagcgtttgtcagccctggagcccagagcggtggccttgctcttccggctggagactgggacatccctgataggttcacatccctgggcagagtaccaggctgctgaccctcagcagggccagacaaggctcagtggatctggtctgagtttcaatctgccaggaactcctgggcctcatgcccagtgtcggaccctgccttcctcccactccagaccccaccttgtcttccctccctggcgtcctcagacttagtcccacggtctcctgcatcagctggtgatgaagaggagcatgctggggtgagactgggattctggcttctctttgaaccacctgcatcccagcccttcaggaagcctgtgaaaaacgtgattcctgggccccaccaagacccaccaaaaccatctctggggcttggtgcaggactctgaatttctaacaatgcccagtgactgtcgcacttgagtttgagggccagtgggcctgatgaacgctcagacccctccagcttagagtctgcatttgggctgtgacgtctcccacctgccccaataagatctgctctgtctgcgacaccaagatccagctggggactcccctgaggcctgcctaagtccaggccttggtcaggtcaggtgcacattgcagggataagcccaggaccggcagagagtggttgcctttccatttgccctccctggccatgccttcttgcctttggaaaaatgatgaagaaaaccttggctccttccttgtctggaaagggttacttgcctatgggttctggtggctagagagaaaagtagaaaaccagagtgcacgtaggtgtctaacacagaggagagtaggaacagggcggatacctgaaggtgactccgagtccagccccctggagaaggggtcgggggtgggggtaaagtagcacaactactattttttttctttttccattattattgttttttaagacagaatctcgtgctgctgcccaggctggagtgcagtggcacgatctgcaaactccgcctcctgggttcaagtgattcttctgcctcagcctcccgagtagctgggattacaggcacgcaccaccacacctggctaatttttgtacttttagtagagatggggtttcaccatgttggccaggctggtcttgaactcctgacctcaaatgagcctcctgcttcagtctcccaaattgccgggattacaggcatgagccactgtgtctggccctatttcctttaaaaagtgaaattaagagttgttcagtatgcaaaacttggaaagatggaggagaaaaagaaaaggaagaaaaaaatgtcacccatagtctcaccagagactatcattatttcgttttgttgtacttccttccactcttttcttcttcacataatttgccggtgttctttttacagagcaattatcttgtatatacaactttgtatcctgccttttccaccttatcgttccatcactttattccagcacttctctgtgttttacagacctttttataaataaaatgttcatcagctgcataaaaaaaaaaaaaa

SEQ ID NO: 6246 - DNA, 2075 bp, Homo Sapiens
  NM_145274
gccgccgaaacttccgccgccgcgtccgccgcctccggaactaaacggggtgaggtcacattcggttatctctaacgttggaaaacgatggagctaacacccattatggagattaaccacttttcatcaggtttttaacttaagtcgtgaggaatacaacggtgaacacaagattcattttattttcatcaccatgggacgtatcctgttgttgagttctctgggtcagacctctgaagacttctcagatggatcctagtctctgggcttgccctgaaattactcgctgctcagggagagagttgaaatggttggcatcctcccactctgttgctccggctgtgtcccctcgctctgttgttccagctatgtgccctctgttgctccaactgcagctcattctgttagagttcctcattcagctggtcactgtggccagagggtgttggcctgctcccttcctcaagtattcttaaagccatggatttttgtggagcatttttcttcctggctctcccttgagttattttcctttcttcgctatcttgggactcttctttgtgcttgcggtcatcggttgagagaaggacttcttcttccttgtctccttggtgttggctcgtggttgctcttcaacaactggactggaggctcttggttttctcttcatcttcaacaagtcagtctctctcaagggtctcacgttgcagcattcttaccagaggccattgggcctggagttccagttccagtgtctggagagtccacctcagctcagcaatctcatgccggttggcaattgtcagcagaagccgatgcctgcccatcagttctttactctgaggtgttagagtggaataaaaatataaatacttatactagttttcatgacttctgcttaatattgggtatttttttgttttgttttgttttggcggtgataggcttaccttacattaaaccaggccttagcctttctgtggctttgttatggcaaagcctcatattactctctagtctggttcagcaggacagtcaggtccacacctggggctgtttgttttctacgtttacctcaacataaggtaccttatcattgtcagccttcatctcctgatccaaaataaaataaaatgccacaggttacttgattttgcatctggaatatgattatttaaagaaattaaaaatttaaaactgaaaatgtagagtttagaaatcttttttaaggtttcaaaaaaatttctaggagacaacaaaatagtgttactagatttagcaaataaaatacagaatgccaattaaatttgaatttcaaatgaacattgaatactttttttggtataactatattccatgcaatatttgggacatatctgttatattattcattgtttacctgaaattataatttaaactgagagttctgtattttatctggcaaccttattatgaaaatatttaggatcaatataaaggaataatatttttaatttttacaaactattttaatataagtaatttatttgattttcattgtcatcctgagagttaagttttgccttacagtctatgttactttacctgtgttttatgaaaagactgtctcttataatgatagccaccaccaccatatcttgacaagtattgacatactgaaactttaaattcattttgtgtagttcccgcctcttcatgattgtttctgaggtaattcagcttctccgtctggctttccattttcaactctaggttagtcttgttcaaagtcaactcatctaagacacttcgcaggcccttgctatcagcctcaacacagtgataaaggacaactttactctggcatctgaacagagcccaattggaagaatcaatacagcttagatggaggtctcctcatccagtggtaataaaacatcccacatagtggagcttagagagcacagcactgggatgtgaagacatgggttcaaattgcacctctgccatgttcagctgtcaccttgggcaaattacttctctgaaccttagttttctcatcattaaaatgggaatattggtttttaaaaaaaaaa

SEQ ID NO: 6247 - DNA, 2804 bp, Homo Sapiens
  NM_145279
agtgtgagggattttggaagcacttgccccaagcagagtttaaaatggagatggcaaatgaagcgcagaaatctctttgctctggaaactggggtcccaccctggggacttctttgggtgagaagtcgaagagtcgggatggatgagatgacctttcacatctggtatcctcaggtccgagcccctggacagcagccccaggcccagctggccatggccctgtgcctgaagcaggtgttcgccaaggacaagacgttccggccgcggaagcgctttgagccgggcacacagcgctttgagctgtacaagaaggcacaggcctctctcaagtcgggcctggacctgcgcagtgtggtgaggctaccacccggggagaacatcgacgactggatcgccgtgcacgtggtggacttcttcaaccgcatcaacctcatctacggcactatggcggagcgctgcagtgagaccagctgcccggtcatggccggcgggccccgctacgagtaccgctggcaggacgagcgccagtaccggcggcccgccaagctctctgcgccgcgctatatggcattgctcatggactggatcgaaggcctcatcaacgacgaagaggtctttcccacgcgtgttggagttcccttccctaagaacttccagcaggtctgcaccaagatcctgacccgcctcttccgagtctttgtccatgtctacatccaccacttcgatagcatcctcagcatgggggcagaggcgcacgtcaacacctgctacaagcacttctactacttcatccgcgagttcagtctggtggaccagcgggagctggagccactgagggagatgacagagcggatctgccactgagcccaggtctggacttttttggccatcagatggacgatctgaacatagggtggctggcagaggggacccccaggagcctgaaggaatctgaaggcactggaatcactccacacacccaaagcctctggacttctggttctcaggagtctgcctacctgtcgccctgaccgcttgtggatggagaaggggagagcatctaggcaggcaaacagaagggaagtggagttaaacctctggcatgaagtctgggagtagggtaggctagggggtttcttctatgacacttgacccttccatgctggttcccaagcctattggaggaatgtgggtgtggccgaggtgatggcaagaaaggtgcaagaaagtgagcagtctgcctgtgagtgagcacagatgccggggtgtgtgtgtgtgtgtgtgattttcactgtggggtgtgtctgtgagagctagctgccttacccctccttggcacatagtaggccttccataaatgttggatggatggataaatagattgggaccatcagaccatgggaccatcagaccatgaccactgtaggagtgatgacagctcagcgtccccactcagtgtatctgaccatgtgtgtaagtgcacaaaaatgtggttgtagatgttgctctacattcaaaccttccaggctacactcttccatcagcatgagtcctggagagctgggggaacgtaggaagaggagccttgccttgagttcctaaaccgacccactgcagacacaggctctgattctcttacccagagatgcccatgagctgacattttactcatccctctgcctccaagaaggcctgtattatacgtgtcctcctgggggttggagatgatccctcaagtacacaaaggtcccctggcccttcatctgggaatcatatactccactctagctcccagaatctacagacctggctcctcggatctgaagcccagcacaaaataatctccccgtccaaggagcttgtggaacttgaattgggaactttggagtcttgtctcccatcccagcacattgaggatgtagttggtgaatggactcttccaggcatggagatcctccatcctaaaagtacctgcctccttcccagccatccctgacacattccagccagttggatctcacagcacagctatccacagggagactgggatgttcacgcagcactccattactcagtacctccatacccagccctatacgcagacccacaggtggggaaactgaggcaggaacagggttctgccctcccagagcctccactctgggatgccagaatggaaagccagagggaacctgagaatcatccagtcttactgtctcaatgtacatacggggaaactgaagccaggagaagaagagggagaaactgtccagggcctcacagggaggcattcatggagctggagaaaccagggatcctgaccgcagggcccatcaattgctacatagagatacacatggaaagagggtttaacagaccctctctaggacacaactgtttctgctttgagcaataatttctaacctgaggccaacatgtcccactgccccttgggttggctggggttgtttcctgagccaagcatccaatatcatgccccactcaatggcctagaagctgcctgtactttggggaaacagatggagctcttgggcccagccagctgggcctgggacttctgcctctgccgcctccagagtggcctggcagctttgccagaggctgtggagcgagggtagtaggagcttttcccagagtgctgtgacttgcatgatggattctaggctgtggcaagggctgatttctgggatagggggagggttggaaaatttatttttatgaaacagagggaagactttattgttgttatttttggtaaaataaaaggcaaactaaagcagcca

SEQ ID NO: 6248 - DNA, 1604 bp, Homo Sapiens
  NM_145288
cctccgcccgcccgcctgcctgcctgcccgcccgctcgctcgcccggcccgcgactcatgtcccgccgcaaggccggcagcgcgccccgccgagtagagcccgcgcccgccgccaacccagacgacgagatggaaatgcaggacctcgtcatcgaactcaagcccgagccagacgcgcagccccaacaggccccaaggctggggcccttctccccgaaggaggtgtcctcggcggggcggttcggcggcgaaccccaccactcccctggccccatgcccgccggggccgccctcctcgccctcggcccgcggaacccgtggaccctgtggacgccgttgaccccgaactatcccgaccgccagccctggaccgacaaacacccagatctgttgacctgcggccgctgcctgcagaccttcccgttggaggccatcactgccttcatggaccacaagaagctgggctgtcagctcttcagaggccccagccgcggccagggctcagaacgagaggagctgaaggccttgagctgcctgcgctgtggcaaacagttcacagtggcctggaagctgctgcgtcacgcccagtgggaccacggactgtccatctaccagacagaatcagaggccccggaggccccgctcctgggcctggccgaggtggctgcagccgtgtcggcagtggtggggccagcagctgaggccaagagcccccgtgcaagtggcagcggcctcacccggcggagccccacctgtcctgtgtgcaagaagaccctcagctccttcagcaacctcaaagtgcacatgcgctcacacacaggcgagcggccctatgcttgcgaccagtgtccctacgcctgcgcccagagcagcaagctcaaccgccacaagaagacccaccggcaggtgccgccccagagccccctcatggccgacaccagccaggagcaggcctctgcagcccctccggagccggctgtccatgctgctgcccccaccagcacccttccatgcagcggtggtgagggggctggagccgccgccacagcaggtgtccaggaacccggggctcctggcagtggggctcaagccggccctggtggagacacttggggagccatcaccacggaacaaagaactgaccctgcaaacagccagaaggcatcacccaaaaagatgcccaagtcagggggcaagagccgcgggcccgggggcagctgtgagttctgcgggaagcattttaccaacagcagcaacctgacggtgcaccggcgctcacacaccggggagcgcccctacacctgtgagttctgcaactacgcctgcgcccagagcagtaagctcaaccgccaccgccgcatgcacggcatgacgcctggcagcacccgcttcgagtgcccccactgccatgtgcccttcggcctgcgagccaccctggacaaacacctgcggcagaagcaccctgaggcggccggcgaggcctgagcccaggaaagcccccctcactgtccctggtaccgctgccaacacccattgacctcctcgtttttgcccgccttctccaagtaaattttcccttttatttaaaaaaaaaaaaaaaaaaa

SEQ ID NO: 6249 - DNA, 5541 bp, Homo Sapiens
  NM_145294
gtactctgcgctgggcgcgcggaggcctaggcgggaagctcgagcggcggcgccatggcccgagcgtggcagcacccgttcctcaacgtcttcagacacttccgggtggacgagtggaagcgctccgccaagcagggggacgtggccgtggtcacggacaagaccctgaagggcgccgtgtatcgcattcggggctcagtctctgccgccaactacatccagctccctaagagcagcacccagtctctggggctgacgggacgatacctgtatgtgctctttcggcccctgcccagcaagcacttcgtcatccacctcgatgtgtcctccaaggacaaccaagtcatccgtgtgtctttctccaacctcttcaaggagtttaagtctacggccacgtggctccagtttcccttggtcctggaggccaggacacctcagagagatctggtgggtttggccccctccggagcccgctggacctgcctgcagctcgatctgcaggacgttctcctggtctacctgaaccggtgctacggccatctcaagagcatcaggctgtgcgccagcctgctggtcaggaacctgtacaccagtgacctgtgctttgagcctgccatctctggggcccagtgggcaaagctgcccgtgactcctatgcctcgggaaatggcattccctgtgcccaagggagagagctggcatgaccgctacatccacgtccggtttccaagtgagagcttgaaagtgccttccaagccgattgagaagagctgttcccctcctgaggcagtcctcctggggccggggccacagcctctcccttgcccggtggcctccagcaaacctgtgcggttcagtgtgtctccagtggtccagacgcccagccccacagcctccggccgggccgccttggcacccaggcccttcccggaggtcagcctgtcccaagagcgctcagacgcctccaacgcggatggccccggtttccatagccttgagccctgggcccagctggaggcctctgacatccacacggctgctgccggcacccacgtgttgactcacgagtcggctgaggtgcccgtggcccgcaccggctcctgcgaaggcttcctcccagacccagtcctgaggctcaagggcgtcatcggctttgggggccacggcaccagacaggccctgtggaccccagacggggcggctgtcgtgtacccctgccatgcggtcatcgtcgtcctgctcgtggacacgggggagcagcgcttcttccttggccacacagacaaggtctccgccctggcgctggatggcagcagctcactattggcctcggcccaggcaagggcccctagtgtgatgcggctctgggacttccagaccgggcggtgcttgtgcctgttccggagcccaatgcacgttgtctgctctctcagcttctctgacagcggggcccttctctgcggggttggcaaggaccaccacgggaggacgatggtggtggcctggggcaccggccaggtgggcctcggtggcgaggtggtcgttctggcaaaggcgcacactgactttgacgtccaggccttccgggtcaccttttttgatgaaaccaggatggcgtcgtgcgggcagggcagtgtgcggctctggcggctgcgtggcggggtgctgcgttcctgccccgtggacttaggggagcaccacgcgctgcagttcaccgacctggccttcaagcaggcccgggacggctgcccggagccctcggctgccatgctcttcgtgtgcagccgcagtggccacatcttggagattgactgtcagcgcatggtcgtgcggcatgcccgccgcctgctccccacacggactccaggcggtccccacccacagaagcagaccttcagctcaggccccggcattgccatcagcagcctcagcgtctccccggccatgtgtgctgtgggctctgaggacggcttcttgcggctctggcccctggacttctcctcggtgctcctggaggcagagcacgagggccccgtcagctcagtctgtgtcagccccgatggcctccgtgtgctgtctgccacctcctcgggccacctgggcttcctggacacgctgtcccgggtgtaccacatgctggctcgctcccacaccgccccggtgttggccctcgccatggagcagaggcggggacagctggccaccgtgtcccaggaccgtaccgtccgcatctgggacctggccaccctgcagcagctatacgacttcacatcatcagaggacgccccgtgcgctgtcaccttccaccccacaaggccaacctttttctgtggctttagcagtggggccgtgcgctccttcagcctggaggccgctgaggtcctggtggaacacacgtgccaccgaggagctgtcaccggcctgaccgccacccctgacggccgcctgctcttcagctcctgctcccagggctccctggcccagtacagctgtgcggacccccagtggcatgtcctccgagtggcagcggacatggtatgcccggatgcccccgcgagccccagcgccctggcagtcagcagggatggccgcctgctggcctttgtgggaccctccaggtgcacagtgacagtcatgggctcggcctcccttgatgagctgctgcgagttgacatcggcactctggacctggccagcagccgcctggactcagccatggctgtgtgctttggccctgcagctctgggccacctgctggtgtccacctcgtccaacagagtcgtggtgctggatgctgtgtcgggccgcatcatccgggagctgcccggtgtccaccctgagccctgcccctccttgacgctcagtgaggacgcccgcttcctgctgattgccgccggccggaccatcaaggtgtgggactacgccacacaggccagcccaggcccccaggtgtacatcggccactcggaacccgtgcaggctgtggccttctctcctgaccagcagcaggtcctcagcgcaggggacgccgtcttcctctgggatgtcctggcccctactgagagcgaccaaagcttccccggggcccccccagcctgcaagacaggcccgggcgcaggaccgctggaggacgcagcgtccagggccagcgagctcccccggcagcaggtccccaagccatgtcaggcatctccaccacggctgggcgtctgtgccaggcctcccgaaggtggcgatggcgccagggacaccaggaattcgggggccccacgcaccacctacctggcttcctgcaaggccttcacgcctgccagggtcagctgcagcccccactctgccaagggcacttgcccgcctcccgccagcggtgggtggctgcgtctgaaggctgtcgtcggttacagcgggaatgggcgggccaacatggtctggaggccggacacaggcttctttgcctacacgtgcggccgcctggtggtggtggaggacctgcactctggcgcccagcagcactggtccggccactctgcggagatctccacgctggccctcagccacagtgcccaggtcctggcctctgcctcgggccgaagcagcacgaccgcccattgtcagatccgcgtctgggacgtgtctggcggcctctgccagcatctcattttcccccatagcaccaccgtgctggccctggccttctcaccagatgacaggcttcttgtcacactgggggaccacgatggccgcaccctcgccctgtggggcacggccacctatgacctcgtgtcctccacccgcctcccggagccggtgcatggtgtggccttcaacccctgggacgccggcgagctcacctgtgtgggccagggcactgtcaccttctggctccttcagcagcgtggggcagacatcagccttcaggtgcgtcgagagccagtcccagaggcagtgggggctggagagctgacctcgctctgctacggggcacctcccctgctctattgtggcaccagctctggccaggtctgtgtctgggacacgcgtgccggccgctgcttcttgtcctgggaggcggatgacggtggcattgggctgttgctgttctcgggttctcgattggtcagcggcagcagcacggggcggctgcgcctgtgggccgtgggggctgtgtcggagctgaggtgcaagggctcaggcgccagttctgtgttcatggaacacgagctggtgctggacggggctgtggtgagtgccagcttcgatgacagcgtggacatgggcgtcgtgggcaccacggcgggcacgctgtggtttgtcagctgggccgagggcaccagcacacgtctcatcagtggccacaggagcaaggtgaacgaggtggtcttcagccccggggagtcccactgcgccacatgcagtgaggatgggagtgtgcgggtgtgggccttggccagcatggagcttgtgatccagttccaggtgctgaaccagagctgcctctgcctggcatggagccccccgtgctgtggccgccctgagcagcagcggctagcggctggctacggtgacggctccctgcgcatcttcagcgtctcccgcacggccatggagctcaagatgcacccccacccggtggcgctgaccactgttgccttctccaccgatggtcagactgtcctctctggagacaaggatgggctcgtggctgtgagccacccctgcacagggacaaccttccgtgtgctgagtgaccaccagggcgccccaatctctaccatctgtgtcacgtgcaaagagtgtgaagacttaggggtggagggcacagacctatggctggctgccagtggggaccagcgggtcagcgtctgggcctccgactggctgcggaaccactgtgagcttgtggactggttgagtttcccaatgcctgccaccacggagactcagggccacctgccaccctccctcgctgccttctgcccttgggatggggcgctcctgatgtacgtgggccccggtgtttacaaggaggtgatcatctacaacctctgccagaagcaggtggtggagaagataccactgcccttttttgccatgtccctgagcctgtcccccgggacccacctcctggctgttggctttgctgagtgcatgctgaggctggtagactgtgccatggggactgcccaagactttgccggccacgacaacgcagtgcacctgtgcaggtttacaccgtccgccaggctgctcttcacggccgcccgcaacgagatccttgtgtgggaggtccccggcctctgagatgcagcagggactgtggtggtgggcatcacgcctggtcatgccaggcacctggacacaggcttggcagaggcgccaggttgtcaatggcctcatgctgggacaggccaggattcacgtaaatcgcctggagcaagctgttgtaaatttggcgccctgtgaatactttcatacctgttgcccttttgcctaagaaatctttaatgtttctatcttgtaataaacatgggcatttattgc

SEQ ID NO: 6250 - DNA, 2864 bp, Homo Sapiens
  NM_145295
aactgtccattcagatgggcccgggagaggagggcagggcctgcgcctccctacggagcctttgtttctggcgaccgtccccacccgggctcgcgtctccgtttctccgagaggcccaaggtgtctccgccgcagcctctgtcgcgccgtgacctgtacaggtcgcgggagtcgtagggaggacgccgggacacctggaagccgagaaatggattcagtggcctttgaggatgtggctgtgaacttcaccctggaggagtgggctttgctggatccttcccagaagaatctctacagggatgtgatgcgggaaaccttcaggaacctggcttctgtaggaaaacaatgggaagaccagaacattgaagacccattcaaaattcccaggagaaatataagtcatattccagagagactctgtgaaagtaaagaaggtggtcaaggtgaagaaaccttcagccagattccagatggtattctgaacaagaaaactcctggagtaaaaccgtgtgaaagcagtgtgtgtggagaagttggcatgggtccttcatcacttaataggcacatcagagatcacactggacgtgaaccaaatgaatatcaggaatatggaaagaagtcatatacacgtaaccagtgtggacgagccttgagttatcatcgctcttttccagtacgtgaaaggactcatcctggaggaaagccctatgattgtaaggaatgtggagaaacctttatttctcttgtaagcattcgaagacacatgttaacgcataggggaggtgtaccttacaaatgtaaggtgtgtgggaaagcctttgattatcccagtttatttcgtatacatgaaagaagtcacactggagagaaaccttatgaatgcaagcaatgtgggaaagccttcagttgttccagttacattagaatacatgaaaggactcacactggagataaaccctatgaatgcaagcagtgtgggaaagctttcagttgttccaagtacattcgaatccatgaacgaactcacacaggagagaaaccctacgaatgtaaacagtgcggtaaagcctttaggtgcgccagttctgttcgaagtcacgagaggactcacaccggagagaaactttttgaatgtaaggaatgcgggaaggctttgacttgtcttgcaagtgttagaagacacatgataaagcacactggcaatggaccttataaatgtaaggtgtgtgggaaagcctttgatttccccagttcatttcgaatccatgaaaggacccacactggagagaaaccctatgattgtaagcaatgtgggaaagccttcagttgttccagttcgtttcgaaaacatgaaagaattcacactggagagaaaccctataaatgtacaaaatgtgggaaagccttcagtcgttccagttacttccgaatccatgaaagaactcacactggagagaaaccctatgaatgtaagcaatgtgggaaagccttcagtcgatccacttactttcgagtacatgaaaaaattcatactggagagaaaccctatgagaaccctaaccctaacgcttcagttgtcccagttctttcatgagcatgaaaggagtcacatagagaaaccccatgaaagtaagaaatttgggaaagccttcagtcctttctgtttctttcaactacgtgaaaggattcacagtggagaaagaccctgtaagataattggctttaaattacgagagacttgtgataggacagtaaaacctagagttggagttggatctctggattgtgttatgtcagtgttggtaggttaggaactagatttcccagaatccattccatttgtgattccatgatacaattcaccagtaacctatcttacatgagattcggaagtaagttaagaaggcattagtcatggtttggaagcaccatacagggagacagctgtgtgaatacaggctgtatggacacttgcttccatcccattttcctgcttctttgggttgccaatcaagagtatcctcaaaacgacttgactttaattttctcggaggtgataggcttccacacaggtctccagaagccctgcattgaatatccatccacactttggttttccttcagacattattatgtctgtactaggcaactaattcagactgtcctggttgggaatattctgtgatgctctgactcccctagtctgtagacggaattggcatacggtctaatttgtgtagtaagcacctttgttcatactagtagtgactgtattcttgattcagcctgatagctaccatgctgctgtcaaaaccaaccagaggggagcttgttcttctgctgtagtgtgcagtgactggcctcacccaggactttgatgtgagaatgagcactttcctctatcaggaaatttcaagtgtttcctgttattcgtagctcaatgtaatgcctcagttcattttcagttgtttgattatatgtgactaatatgtattttttattcaaacaagacttctgtacatgtttcttcaaaacagtttattaactgtcttcagtcttggattacatcaagtttataattttggcaaattgttaagacactgtgaagtcagcgttaaccatgtgcatacaacttaaggaattttttcctcctcatgtaaattttacttttcatgcttatatagtttcaacttttatcttcatagtaatttctcatctactcataataccaaaagttaagtcatgctgttttgtgtgctctcttgctaaagaccgcagagaccatacctgttgtcaaagagggtgtaataaactgtaataataatcatgaccacaaaccataaaggactgtgtgatgtatcagt

SEQ ID NO: 6251 - DNA, 4706 bp, Homo Sapiens
  NM_145298
ttccctttgcaattgccttgggtcctgccgcacagagcggcctgtctttatcagaggtccctctgccagggggagggccccagagaaaaccagaaagagggtgagagactgaggaagataaagcgtcccagggcctcctacaccagcgcctgagcaggaagggggaggggccatgactacgaggccctgggaggtcactttagggagggctgtcctgaaacctggagcctggagcagaaagtgaaaccctggtgctccagacaaagatcttagtcgggactagccggccaaggatgaagcctcacttcagaaacacagtggagcgaatgtatcgagacacattctcctacaacttttataatagacccatcctttctcgtcggaataccgtctggctgtgctacgaagtgaaaacaaagggtccctcaaggccccgtttggacgcaaagatctttcgaggccaggtgtattcccagcctgagcaccacgcagaaatgtgcttcctctcttggttctgtggcaaccagctgcctgcttacaagtgtttccagatcacctggtttgtatcctggaccccctgcccggactgtgtggcgaagctggccgaattcctggctgagcaccccaatgtcaccctgaccatctccgccgcccgcctctactactactgggaaagagattaccgaagggcgctctgcaggctgagtcaggcaggggcccgcgtgaagattatggacgatgaagaatttgcatactgctgggaaaactttgtgtacagtgaaggtcagccattcatgccttggtacaaattcgatgacaattatgcattcctgcaccgcacgctaaaggagattctcagaaacccgatggaggcaatgtatccacacatattctacttccactttaaaaacctacgcaaagcctatggtcggaacgaaagctggctgtgcttcaccatggaagttgtaaagcaccactcacctgtctcctggaagaggggcgtcttccgaaaccaggtggatcctgagacccattgtcatgcagaaaggtgcttcctctcttggttctgtgacgacatactgtctcctaacacaaactacgaggtcacctggtacacatcttggagcccttgcccagagtgtgcaggggaggtggccgagttcctggccaggcacagcaacgtgaatctcaccatcttcaccgcccgcctctactacttctgggatacagattaccaggaggggctccgcagcctgagtcaggaaggggcctccgtggagatcatgggctacaaagattttaaatattgttgggaaaactttgtgtacaatgatgatgagccattcaagccttggaaaggactaaaatacaactttctattcctggacagcaagctgcaggagattctcgagtgaggggtctccccgggcctcatggtctgtctcctctagcctcctgctcatgttgtgcaggcctcccctccatcctggaccagctgtgcttttgcctggtcatcctgagcccctcctggcctcagggccattccatagtgctcccctgcctcaccacctcctctccgctctcccaggctcttcctgcagaggcctctttctgcctccatggctatccatccacccaccaagaccctgttccctgagcctgcatgcccctaacctgccttttcccatctccccagcataacctaatattttttttttttttttgagacggaatttcgctctgtcacccagactggagtgcaatggcttgatcttggctcactgcaaactctgcctaccaggttcaagcgattctcctgcctccgcctcccgagtagctggaattacagacgcctgccaccacgcacagctaactttttttttttttgtatttttagtagtgactgggtttcaccatgttggccaggctggtcttgaactcctgacctcaggtgatccgcctatctcagcctcccaaagtgctgggattacaggcgtgagccactggcccggcggcacaaccaaatcttattaaactcaccctaggctggccgcggtgactcatgcctataatcccccagcaatttgggaggcagaggtgagagaatcgcttgagcccaggaattcgagaccagcctgggccacatgacaaagccccatctctacaaaaaaattacaaaaaaaaaaaaaacaggtgtggtggcatgcacctgtagttgaagctacttggaaggatgaagtgggaggattgcttgagccggggaggtggaggctgcagtgaactgagatcacgtcactgaactccagtctgagcaacagatcgagaccctgcctgaaaataaatcaataaataaactcaaccgaaatgggtatgaaagttgaaatgggtatgtaagttgaaaaccagaagttttgagaaacatcctttgttaactttcatcctacaaattgggtcattcatgtcctacgcagctaaaacagagcccaggagccagggaggaaaagcagtcaggccacacaccattgctcccaaaatggacttctctgcaagcctgactcctgaaactgtgcattgtaccctgaaaccagctttatccatagcttctgcaataaatggctgtaagtcttggactccttgctataatcgcagctattcagcaatggaacctcccagttcccaacccttcctagtgcccatgggctttcccataggacaagagaacatttctccttttctttttttttttctttgaaatggagtctcgccctgtcacccaggctggagtgcaatggtgcggtctcggctcactgcaacctctgcctcccttgttcaagtgattctcctgtctcagcctcccgagtagctgggattacaggcgtccaccaccaaaccaggctaatttttgtatttttcataaaaacgggtttcatcatgtttcccaggctggtcttatttttattttattttttgagatggagtcttgctctgttgcccaggctggggtgcagtggtgcaatctgggttcactgcagcctctgccgcctgagttcaagctattttcctacctaagcctcccaagtagctgggattacatgcgcgtgccaccacgcctagctaatttttgtgtttttagtagagacggggtttcaacatcttgaccaggctggtcttgaactcctgacctcgtgatccacccgtctcggcctcccaaagtgctgggattacaggcgtgagccacctggccaggcttaggctggtcttaaactcctgacctcaagtgatccaacctccttggcctcccaaattgctgggattgctggtgtgagccacagcgcctagcccatttctccttttaataggacctgttgctgtctctgttctcccaacatggtgaacaccacccggactgcgtgtatgtcccaaattacaattctttctttgcaaatgaaatgtgaaatttagaggcccttctccacactttaaatttgacttgacattttctaggcagatataagttattagagaatgagattctctataaaaatgatcccttcatgctgtggcctccacagaagatgccctgggccaggtgcccacatgaataatgcgggccacaggcaggcatttattttctcacagatatggaggctacaagtccaaggtggaggggtcggcggggttgtttgctctgaggccgctcctcctggatggcagggatcccttctggctgtgtcctctgtggcctttcctctatgaacctgtactgtacctctggggtctctctgcttccaaatatcttttttttttttttcagacagttttgctcttgttttctaggctggagtgcaatggcacaatctcagctcactgcaacctctgccttccgagttcaagcgattctcgtgcctcagcctcctgagtagctgggactacaggcgtgtgccaccacgcctggctaattttgtagttttagtagagacggggtttctccatgttgctcaggctggtcttgaactcatgagctcaggcgatccactctcctcagcctcccaaagtgctgggattacagatataagccaccatacacaacttttttttttttttgagatggagtttcactctgttgcccaggctggagtgctaaatagcagaatcactgctcactgcaacctctgcctgctgggttcaagcaattctcccacctcagcctcctgagtagctgggattacagatgcccagaaccaatctctgctaatttttctattttttagtagagatggggtttcactgaggaaggagaccacctctctcattgtctcctatttcagaaggaagcaaaaagttagaaagatgcagaagtaagatcaatggccagactgtttggcgctgctacctgggcctggtagttaaagatcaactcctgacctgaccgcttgttttatctaaagattccagacattgtatgaggaagcattgtgaaactttctggtctgttctgctagcccccaccactgatgcatgtagccccccagtcacgtagcccacgcttgcacaatctatcacgaccctttcacgtggaccccttagaattgtaagcccttaaaagggccagggacttcttcagggagctccaatcttcagatgcaagtctgtcaacgctcccagctgattaaagcctcttccttcctaaaaaaaaaaaaaaaaaa

SEQ ID NO: 6252 - DNA, 1632 bp, Homo Sapiens
  NM_145301
gctcgccccgcccccgctcgccccgcccctggatttgctccctcaaagcggaggtgaggccggactgaggctcttacagtggtccctgctggcccttggtgacgggtcgcgtcagttccgacccggacccgtacgctgctgcgctgacgtggctcctggaagcagggctggcgtagggccgccatgttgcagcaggatagtaatgatgacactgaagatgtttcactgtttgatgcggaagaggagacgactaatagaccaagaaaagccaaaatcagacatccagtagcatcgtttttccacttattctttcgagtcagtgcaatcatcgtctgtcttctctgtgagttgctcagcagcagctttattacctgtatggttacaattatcttgttgttgtcgtgtgacttttgggcagtgaagaatgtcacaggtagactaatggttggcctacgttggtggaatcacattgatgaagatggaaagagccattgggtgtttgaatctagaaaggagtcctctcaagagaataaaactgtgtcagaggctgaatcaagaatcttttggttgggacttattgcctgttcagtactgtgggtgatatttgcctttagtgcactcttctccttcacagtaaagtggctgagacggtctcgccacattgcccagactggtctgaaagtcttgggctcaagagatcctcccgcttccgccttccaaagcgctgggataacaggcgtgagccgctgcccgggccatccctcgaggaagtttcatcaggtagacattaattctttcacgaggatcacggatcgagctctttactggaaacctgcgccccgccttagttctccacctcttcgtgcggctccaggcaactgccaacagatggcgcccgcccgcctatttctctccttgcggctttgggcctggaggggaggtggggagagtcccaatagcagaggaactggtgagcccgggccaaaatttcatctggcatccggaatgcattaaaaacaacccacaaatctgaagctcctcgcaggagagagagagagagagagagaggagagagaggagagaggagagagggagggaagagagtgacggagaaggagagaaagagacgggagagaggagagagaaagagagagagaggagagagagaaagaacgaacgaacagggaacttgtaaaactaaggggaaaagggcagaagagaggcagcagcgtggtccctgcaagcgtccgctttcctggccaagcagcccccagcacgcctgctttgtggggcagggccatgcggccccgaggaaggatgcggtgagccagagggttccagacaaaggaggggatccccaaggctctgggccagccagtccctgttttactggcaccacggtccctcctaggcgaggacgaagagggaaggggtggagacctccaccttctctgcgtgtggctgcgtccctttacagaatgacaggcccttacttccgagggcggggactaatgtgtaaggcttaacagatccaattccagaaattatctgtgtttttttcaatcaccctcttgtgcccccccaccccccattaaatttcatcttttatcttttaaaaaaaaaaaaaaaaaa

SEQ ID NO: 6253 - DNA, 1226 bp, Homo Sapiens
  NM_145303
acactttggtcagccggaggccactgtaggagcctccagggagttctctttgaggctggaatgcagtagcgtgatctctactcactgcagcctcaatctcctggtctcaagccattctcccacctctgtccttcaggtagctgagactacaggcgtgcaccatcacacccagtgctcgaatgtcccaacctgaagctgaagaagccgccctggctgcaagtgctgtcggccatgattgtgtatgctctgatggtggtgtcttacttcctcgtcactggaggaataatttatgatgttattgttgaacctccaagcattggctctatgactgatgaacacgggcatcagaggccagtagctttcttggccaacagagtaaatgaacaatgtattatggaaggacttgcatccagcttcctgtttacaataggaggtttaggtttcatattcctggaccgatggaatgcaccaaatatcccaaaactcaatagatttcttcttctattcattggattcgtttgtgtcctattgagctttttcatggctagagtattcatgagaatgaaactgccgggctatctgatgggttagagtgcctttgagaagggctatctgatgggttagagtgcctttgagaagaactcaatggatactggatttgctcctgtcaatgaagtttaaaggctgtccaatcctctaatatgaaatgtggaaaagaatgaagagcagcagtaaaagaaataccgagtgaaaaaacaggaagtgtattgaagcttggactagaattccttcttggtattaaagagacaagtttatcacagtatttttttttcccctgctgacccattgctgtaccaacgatgttgagtggcattttcttcttagtttttcatttcttaaaaaaaaaagctccatatttacagctataatatcaaataaagtgattattttttacaacccccttaacaccttttggagatggcgtttctgttttcagaaattaacgtaaaatcaagaagcaagattccataagctgagaactctggacagctgatcaggtttacctatggtgctttgcctttaactagagtgtgtgacggtagattatttcagatatgtatgtaagactgtttcctgaacaataagatgtatgaaaggagcagaaataaataatttttctaattaaaaaaaaaaaaaaaaaaaaaaaaaaaaaaaaaaaaaaaaaa

SEQ ID NO: 6254 - DNA, 2557 bp, Homo Sapiens
  NM_145305
acgcgggcccgccccatgccgggcggggcctggggcccgccacctccgcccgtggccggagagccccaggcccgagccacgcggtcttccgggcccgggtcggggctcgatggctacgtggaggcgggacggccgactgacaggcggccaaaggctgctgtgcgctgggctggcggggacgctcagcctcagcctcaccgcgcccctggagctcgccaccgtgctggcccaggttggcgtcgtgcgaggccacgcccggggaccgtgggccacagggcaccgggtgtggcgggcagaggggctccgggccctgtggaaggggaacgcggtggcgtgcctgcgcctcttcccctgcagcgccgtgcagctcgccgcctaccgcaaatttgttgtgctgttcacagatgacctgggccacatttcccagtggagctccatcatggctgggagtctcgcaggcatggtttccaccattgtaacatatcctacagacctcatcaaaacccggttgatcatgcagaacatactggaaccatcgtacagggggctcctccatgctttttctactatttaccaacaggaagggttccttgccctttatcgaggggtttccctcactgttgtaggtgctctcccgttctctgctggctcccttcttgtttacatgaacctggagaaaatctggaacggaccccgagatcagttctctctcccacagaactttgctaatgtctgtctggctgctgcagtgacccagaccctctcctttccctttgagaccgtgaagagaaagatgcaggctcagagcccctacctcccacacagtggaggagtagatgtccatttctcaggagcagtggactgcttccggcagatagtgaaggcccagggggtcctggggctctggaatggattgacagccaatttactgaagatagttccatattttggaattatgtttagcacctttgagttctgcaagagaatctgtctttatcaaaatggttacattctgtctccactgagctataaattgaccccaggagtcgatcagagtttgcagccccaggaattacgagaattaaagaagttcttcaaaacgagaaaaccgaagcctaaaaaaccaactctataaaatggaatggaactagaagtgcactgactgacagcatgttgcaatcacagataaatgtagcctcataactgtgcacctgaggagggatgagaagctactgctatctgctgctctgggaaatgagatggtttggccatgcaccacctcagatctccaaactgatgtccctgtgaacacctgcactatgagaaggtttcccaacaagagtgtatcatgatggcattccacgagattttataaccagagtctagcagtgataaaatgtacaatttacgctctgaatagaaacatgacaccaaagaaagggcattgccatgacatctcaaagcaacaggtaattgaagtggctgagtggataccacgttgtgaggtcagccactgggtcacttgtagtcaatgcaaagcttgcacaaaccaacgtcagcctagtttcactcagtttgacctgagactttccaatacaatctgttgttttgttttgtttttagagacagggtcttgctctgtcacccagactggagtacaatgacacaatcatagctcactgcagcctttaactactgggctcaagacatcctcctgcttcagcctccagagagttgggaccataggtgcacaccaccacacctagctaattttttggggaggtcttgctatgttgcccaggctggtcttgaactcctgggctcatgcaatcctcctgccttggcctcccaaagcgctaggattagaggtgtgagccgctgcaccctgccccagtacaatcttttttgaactcaaatttttgctgacatctgagtgcacacaccacagtgtaaattatgccttatcagaatctaaatgaaaatagcgaacatttaaaagctatcaccattgtagtagaatcatccttcttttttgaaatttgaagcatcccaggcttaaaatcttgtgtttcagaaagacagtttataccatgactgcttaattatccccccaaagaccttctgattgaagtcatgtacagttcagtggcctaaattctctgcctttttaacttgctttgcaagcctactctgaaaataagttatttagtcaagttattctcaaagatgtcccagttgcctagaaaggatcaaatggaacatttgacacacatactcaaaaaaatgtaactgactataaacactttaacctaatcatctgtatcaaactttctaaaaatcaaatctcaggattgttccactttagagattctatgtaaagtttatataactatacttgtcaaatagcacctatctatgcatttaaaaatgcattaatatctaacataaaattgttaatttatacacacacatacactcatacatagagagagattttcggtatgttgcaagtattttttccgattaaatttattttccaaagaaaaaaaaaaaaaaa

SEQ ID NO: 6255 - DNA, 1092 bp, Homo Sapiens
  NM_145306
aggtgggaggaaaccgcctggagccgccgggagtggacgccgccgaggcccggagtcgcgcctgcagacacagcatctactcagcgtgggtcacctctgtgaacatcactgactgcaagcctccctcaatttctggtgcagcccatcagggacccacagcgcctgggaggatggtgcggatcttggccaatggggaaatcgtgcaggatgacgacccccgagtgaggaccactacccagccaccaagaggtagcattcctcgacagagcttcttcaacaggggccatggtgctcccccagggggtcctggcccccgccagcagcaggcaggtgccaggctgggtgctgctcagtcccccttcaatgacctcaaccggcagctggtgaacatgggctttccgcagtggcatcttggcaaccatgctgtggagccggtgacctccatcctgctcctcttcctgctcatgatgcttggtgttcgtggcctcctcctggttggccttgtctacctggtgtcccacctgagtcagcggtgacctctgagggctgataggggtgggtttgttgagagggacttgctgggccttggtgtgagagcaggcatatttggaggggatctggtggtgccttgaaggtatgatcagagaggggaccacaggtgtgtgtttcccctttgtgttaagcgtgaggcagagggagacgttagtccagcatttccaaagtgtgggtgggtccgttggttcccaagatacttttaggtggtatggggcctgcattaagtggcacaaaatcagagcaagaaagcgatgcccttcccaattctctcaatccttttatgccgagaagatctcagctggatgccaacatgttccgatgcctgtggaagacatgccgacgtctcctctgcctagggagcaggacttgggcttagggcaggtggaaaaaattccagacttttttagcactgtttttgttttaatggtatatttttattggctactttattgtttaggacaagtggtagtggcattctatttattgtgaccttttcaataaatagatttaagtaaaaatgaaaaaaaaaaaaaaaaa

SEQ ID NO: 6256 - DNA, 1979 bp, Homo Sapiens
  NM_145311
agcgggggcgggctctctgacgaaggactggaaggtggcggtggtgaaggtgcaggccgttggggcggctcagaggcaggtgactatgaaaggcttatatttccaacagagttccacagatgaagaaataacatttgtatttcaagaaaaggaagatcttcctgttacagaggataactttgtgaaacttcaagttaaagcttgtgctctgagccagataaatacaaagcttctggcagaaatgaagatgaaaaaggatttatttcctgttgggagagaaattgctggaattgtattagatgttggaagcaaggtatcattctttcaaccagatgatgaagtagttggaattttgcccctggactctgaagaccctggactttgtgaagttgttagagtacatgagcattacttggttcataaaccagaaaaggtcacatggacggaagcagcaggaagcattcgggatggagtgcgtgcctatacagctctgcattatctttctcatctctctcctggaaaatcagtgctgataatggatggagcaagtgcatttggtacaatagctattcagttagcacatcatagaggagccaaagtgatttcaacagcatgcagccttgaagataagcagtgccttgaaagattcagacctcccatagagaacagtacaattgcctgatttcctgtcctttacagcccgagtgattgatgtatctaatgggaaagttcatgttgctgaaagctgtttggaagaaacaggtggcctgggagtagatattgtcctagatgctggagtgagattatatagtaaagatgatgaaccagctgtaaaactacaactactaccacataaacatgatatcatcacacttcttggtgttggaggccactgggtaacaacagaagaaaaccttcagttggatcctccagatagccactgccttttcctcaagggagcaacgttagctttcctgaatgatgaagtttggaatttgtcaaatgtacaacagggaaaatatctttagtattccaagtgccttgcaagtattcatttaaacattaaaacagccttttgagatgtaagtactgttatcatccccatttcacaggtgaagaaacagaagcacagagatgttgatacagactcaaggacgcagcaagtggcggagcaagaatcacactcaggcagtctctctcctttctgaacagagatgagccctaagatacctggaagattttgtttttaacctcacattaaggaaagcacacatcaccttgaaaggttgcacacttactcctatgatggtgccattgcacagaaacatttcagaatacttttctaaattaaagagtttgtggagtgttttataaatatcaatgctaggaaatctttatcaaatgaagataggtttgactttttgaaacaaaagtcattcagagataagtctggtgtgattgaagccaaatcattccagttgagtaaaaataataaaaagtttggaatatacaaacaatttcaaaaagaaaggtgcaaacctctttagagtagggtcaacttaagaattccttttatttctaaaatgactggcttagaggcagcagcacttggtaaaagttttaatgtattggataaaaaaaaagttatcattacttgatagagcatatgtgtgtgtctgaagaaagatttacatagccttacacttctctctactgaatatcatacgttacttttcttaaatgtgtctagtcatatatgtgtgatatgtataaaggccagttccctccaggagcaatgacagtctttattcggagctttaaggtagttatgtaggccgggcatggtggcacatgcctgtaatcccagctactcatgaggctgaggcagaagaatcgcttgaacctgggaggcagaggtttcagtgagccaagattgcactactacactccagcctggtgacagagtgagactccatctc

SEQ ID NO: 6257 - DNA, 2072 bp, Homo Sapiens
  NM_145312
cacttccgcttccggtccagcctgtctccgcgtggtgcgagcgctgcaccagcccctggctggtggttactgtccgaacggcgtggtgtggtcgctgactctctgggcgtgcagctccgcagccctgccggctcggttcgattgacttacgcaggattctcagcccttgcctgggagaacagttcaggagacagatggccccaagagcccagatccagggaccgctgacatttggggatgtggctgtggcctttacccggattgagtggagacacctggatgctgctcagcgggccctgtacagggatgtgatgctggagaactatgggaatctggtgtctgtggggcttctctcttccaaaccaaaactaattactcagttggagcaaggggcagagccctggactgaggtgcgagaggctccatcaggcacacatgcagtcgaggattactggtttgaaacaaagatgtcagccctaaagcaaagcacttctgaagcatctgttctgggagagcgaacgaaaagtgtcatgatggaaaaaggcctggactgggagggcagaagctccacagagaagaactataagtgcaaggaatgtgggaaagtcttcaaatacaattcgtcctttattagccaccagagaaatcacaccagtgagaaaccacataaatgtaaagaatgtgggatcgcctttatgaacagttcatcccttttaaatcaccataaggttcatgcaggcaaacagccttatagatgtattgaatgtgggaagttcctgaagaagcactcaacgtttatcaaccatcagagaattcattctagggagaaaccccacaaatgcattgaatgtggaaaaactttcagaaagaactcaatccttttaagtcatcagagaattcatactggccagaaaccctacaaatgtaatgactgtgggaaagccttcgctcagaatgcagctcttactcgtcatgaaagaatacatagtggagagaagccttttaaatgtaacaagtgtgggagagctttcagggataattcaactgtgttggaacatcagaaaatccatactggtgagaagccatatcagtgtaatgaatgtggaaaagcctttaggaagagctcaactcttattagtcaccaaagaatgcatactggggagaaaccctatcactgcagtaaatgtggaaaatctttcaggtatagctcatcctttgctggtcatcagaaaactcacagtggaaataaaccgtatcagtgtcgtgactgtgggaaggcctttacaaagagctcaacccttactggacatcagagaattcatactggagaaaaaccctatcactgtaagaaatgtgggaaagcctttcggcacagctcaggccttgttgaacatcagagactccatactggggaaaaaccttataaatgtaatgaatgtgggaaagcttttccccgaagttcagcccttaagcaacataagaaaattcataataaagaaagagccatgaaatgtagttagtgtggcaaattgtgcagagtagtttattccttctgaccatcatagaggagacattaaataaattatgcatttaacagaaatactctgtacttctgagagaacacatcacttgtgaggatattcattgtgaggttctactagtgaaatatttgaagaaactaaatgtatgtcagtatggaagtagttatagcatactgtgtgctaattgaaaagaatgaggtggagctgtaaatactgtacaaagccaggcatggtggcatatgcctgtagtcccagttacttgggaggctgagacaggattgcttaagcccaggagtttgagtctgtaatgcactatgattgtgcatgtgaatagccactgcactccagcctgggcaacatagcaagactccatctctaagtaaaaaaatacaacagtagaaatatacccatgataatatacccaatatacccttgttaaagaagcaagtttcaggaaatctatattatatgcattcaaaaagacctggacaaataaagaccaatcttaacagcaaaaaaaaaaaaaaaaaa

SEQ ID NO: 6258 - DNA, 1590 bp, Homo Sapiens
  NM_145316
ggggaaggcggagcttggacgagccgagaggcggggctcaaagttcctacccgcgagagggaagaagcaggaggtctcagcatgaaacagcagcagtggtgtgggatgactgccaaaatgggcaccgtgttgtcaggggtcttcaccatcatggccgtagacatgtatctcatctttgaacagaagcacctagggaatggcagttgcactgagatcacaccaaagtacaggggtgcaagtaacatcataaataacttcatcatctgctggagttttaaaatcgtcctcttcctgtctttcatcaccatcctcatcagctgcttcctcctgtactcagtgtatgcccagatcttcaggggcctggtcatctacattgtctggatttttttctatgaaactgcaaacgtcgtaatacaaatcctcaccaacaatgactttgacattaaagaggtcagaatcatgcgctggtttggcttggtgtctcgtacagtcatgcactgtttctggatgttctttgtcatcaactatgcccacataacctacaaaaaccggagccagggcaatataatttcctacaagagacgaatttctacagcggagattctccacagcagaaataaaagattatcaatttcgagtgggttcagtggctcacacctggaatcccagtactttgagaggcagagcttccacactagcatatttacctgtctgtctccagtgccaagctcagcccccagcacctgtagatacacaatagatgtctgctgagaggtgctctggtaaaacaagtataaaatgaatgtcaggatgttctccctcatggtgggcatcttctctgtccttaataccacccagttcttcatctttgacctgaaccagaagacacacatttgctatgaggccaagttcagcatctacgtggactcaaagtcggagctagtcacttggaccctgttccacagggctaatatcagcactggcctctccctcaccaccatcatcatcggctgcttcctcttttattgtatccacaagaatatctacatggggctgctgatctatgccatgtggatcatcacttacgagctcatcaacttctccatagtcctgctcctcaacgggatcatcaaagatcacttcaagacgctgagttatttgcactggatcttccaaatctcacacatgctcctgcactttttctgtctgcccttcatcgtcaagcatgcatacaacctttacaaggaatcccagactgtgggcaggaaacgccgccacaggctctgctccaccattgcagtgaactcatgactacctgtccgtctgggaatgttgtaccggaagttaaactgaaccatgccagatgccaggaaaggtgggagggaatggtgttcctcaacaatggaaccctccctaccctgcctgtcttctgttgatgctgcttggtttgtcagggcttttgagttttacgcactgaggaatgattctcgggagagggcaggttgtgcggatcaattattttacagatgtgttgtgtgacttgttttagcagttaatgatatgtggccttgtgcttacttaaccatctca

SEQ ID NO: 6259 - DNA, 6622 bp, Homo Sapiens
  NM_145321
gctggtggcgcccgccagccggcccgggagaggggacttgagcgcttcgcggccggtgcgcagcgcggctccggccccgcagtctgtctgcaagtggccatccccgcccccgactcctgcggccggtgcgggagctgtcagctgcacgttgcgggggtaccggagaagccggggttgccttctcccggttctgtgcgctaaccccggagcccggccccggggaactagggagcgtctccggctgcacagcgctcaggttttagggtttcctttgggccacccaaaatgttttttaaatactttggataagagctaaaccacctgccactggggacttccatactctcggctcccttgtcatctgatggcattttgattgtctcgaggccaagtgacttgctgtccatgatgagtgatgagaagaaccttggtgtgtcccaaaaattggtatcaccttcaaggagcacaagtagctgctcttccaagcaaggaagtcgacaggacagctgggaagtggtggaaggactgaggggggagatgaattacacccaggagccaccagttcagaaaggatttttgctgaaaaagaggaagtggcccttaaaaggctggcataagagattcttctatctggacaaaggaatcttgaaatatgccaagagccaaaccgatatagagagagagaagctgcatggctgcattgatgtcgggctctcagtgatgtctgtaaagaagtcatcaaaatgcatagaccttgacaccgaggagcacatctaccatctgaaggtcaagtcagaagaagtctttgatgagtgggtatcgaaacttcgccaccacagaatgtatcgtcagaatgaaattgccatgtttccacatgaagttaaccactttttctcagggtccaccatcacagactcttcatctggggtgtttgactccatttcaagtaggaagcgtagcagtatatcaaagcagaatttatttcaaactggaagcaatgtatcattttcttgtggtggtgagacacgagttccattatggttacagtcttcagaggacatggaaaaatgctccaaagacctggcgcactgtcatgcctacctggtagaaatgagccagctcctgcaaagcatggacgtcctgcatcggacatactcggcaccagctatcaacgccatccagggtggatcttttgaaagtcccaaaaaggaaaaaagatcgcacaggaggtggcggtccagagctattggcaaagatgctaaaggaacactgcaggtcccgaaacctttttctggcccagtaagactacactcctccaatcctaatttgtcaacactagattttggagaagagaaaaattattctgatggctctgaaacctcatcagagttttctaaaatgcaagaagatctgtgtcatattgcccataaagtttacttcactttaaggtcagcttttaatatcatgtcagcggagagagagaaactgaagcagctgatggagcaggatgcctcctcctccccgtctgctcaggtcattggtctgaagaacgccctgtcatccgaaaactccagagatgaaaaccgagctctagttcatcagctttctaatgaaagtagactctccatcactgactccctttctgagttttttgatgctcaggaagttctgttatctccaagctcttcagaaaacgagatttctgatgatgactcatatgtcagtgacataagtgataatctttccttagataatctcagtaatgatttagataatgagagacagaccttggggcctgtccttgatagtggtcgggaagcgaagtcccggagaagaacgtgcctgccggcgccctgcccgagcagcagtaacatcagcctgtggaacatcctgaggaacaacatcgggaaggacctgtccaaggtggccatgccggtggagctgaacgagcccctgaacacgctgcagaggctctgcgaggagctggagtacagcgagctcctggacaaggccgcgcagattcccagccccctggaaaggatggtatatgtggcagcctttgccatatcagcgtatgcatctagctactaccgagctggaagcaagccatttaatccggttcttggagaaacatatgaatgtattcgggaggacaagggcttccagtttttttcagaacaggtcagccaccatccgcctatctctgcgtgtcatgctgagtctagaaattttgttttctggcaagatgtgagatggaaaaacaaattctggggcaaatccatggaaattgttccaattggcacaacccatgtgactctgccagtttttggggatcattttgagtggaacaaagtgacctcttgcatccataacatcttaagcgggcagaggtggattgagcactatggagagattgtcatcaagaacctgcatgatgattcctgctactgcaaagtgaattttataaaggcaaaatactggagcactaatgcccatgagattgaaggcacagtgtttgacaggagtggaaaagcggttcatcggctgtttgggaaatggcatgaaagcatctactgtggcggcggctcctcttctgcctgtgtatggagagcaaatcctatgccgaaaggctacgagcaatactatagcttcacacagtttgcgctggaattaaatgaaatggatccatcatcaaagtctttattgccacctactgacactcgatttaggccagaccagaggtttctagaggaagggaacttagaagaagctgaaatacaaaagcagaggattgaacaactgcagagagaaaggcggcgggtcttagaagaaaatcatgtggagcaccagcctcggtttttcaggaaatccgacgatgactcttgggtgagcaacggcacctatttggaacttagaaaagatcttggtttttccaaactggaccatcctgtcttatggtgaaaaagtaaagaagaaagataacattagtgtatttctcctgtgcttgccttctgaagtggcacaaacctgtgtttatatatttaaaagatactctaggatgatcacttgtgcttagcttagcattgtaactctttaagtctatattttcctcagtgcgtttctttacaatttcaaatgttaccctgattgtttatatgaatgtagaacaccttgacatttctttttatatataaactatttaataaaaatgaaagattgaatgttcatgtgtgggttaaaaaaagaagctttaacactaattttccaaaggttagggaagattccaattaaatttatgccttataaaattatgttgtagaaaaaaaatcaacctctcccaggtgcattaagaaataagaattcccagggttactcacccatgcgtaagctacccaagtttaatttggtagctgaaatatctttttgcctcagacagctcttgaattgctcatacagaacaattctgctggtgctggagtctgaagaatattttcatttgcattttagtggttagggagaggatataagattaatggaatgtatatttttatataagacgtatacggcaccttcttgaaaaggaagcatttgaacttgttcctccctatagttctattgccttatatgcaaaattgtaccctgttgctcagagaaattattcataagagaaaagaattccaattaattaaatatcacaatagcatcccagagagacagtaggaaatttctccttagtgagagctgagtccttgagaagttaagagactgtttcctgcttcccaccccaccccgttttttgtccctccgtttgatcacctccctgttgagtatggaatgtcccagtttaatataaaacatacagtttattccacacagcagtttgactttgtaaaagtttagcaaaataactgattgttttggataactcaacatgtttttcttaaatgctgttttagtattttctacctcttaataagcaccatattttagatcttgtataaaaagttgccatctgccttatagacaaatgtagagaattgatgttcttgctttgtgttgtgttctggtaaagctttaagtgagtgtcttacccctttcctatactttcttgttatccatatcattcttttgtgagttttgcagcagtcttgaataatacagattataactactgaaaggggaaccttcgtctttttaaatgtgtcatttcacattacaataatatgtgtagtagttgaattgtgttatcaaagcatgtccaacttctgtccagatgacattaaaaccaaagcctaattgttaagcctcttattctaaagtccatagcaatgctatggaatatcaagtataatgatgtagtaaaaagatttctccagaaaacactttgagatacttaaagaaattcagagcatatcgaatgttatgaatgaagagtaaaataattacaggaaaagaatgcatgatttttcattgtcacaccaaataaccagttggacaatattgcattttcaaaatggagagttatttaaagtggatgtgtagccttctggaatctgcacgtgactggcattttaaaacaactcattaaatattggattcattttatcgagatgccaagatgaacacaatgtgaatatcatttccatttctaagcagttgaatgacacagtcagattctttggtgtatgctttgttctttccatctcaagcatttatccaaattctgctcacagacatgaggaagcaggctgtagatttaagggcactcaaggggaaaacaaatgtagtttccacagtgtgaggataaatgtagaatcgtggtaatattggctgttaaattggcctgctccagagactggctcaaaaaagaaagaagcaacgaaaacaaaatgcacagcctgaatggacgtagcactgtcatgtggcatttggaaaatctttaattatcctaatgttatttcacttgcccttatgctttattttagagtcccagggacaactggatgaaacattacgtctgtagtcatcttatttgagatgggggtgggaacgaattaaaatatgatagagaactatatgcagattttaaaatctagtcagtactagcatctataaagggcttttctgaaatttaaacagcttggtgatgcatcctgatattataagcttaaaactatcttgagggggaaatgacttcttttctccttctgtcccttttctcaaaagcatctttcccccaaatgtatgtctctaggacattttatagttttaagaggaagaaaacagaaacgtggcatcatttgggaagaaccaaggtagaatttaattttctggactttaaatctcctggttaaataatgctaatcactgtaccatttgagttacatgttttaacctcttttttttttctaattattccatccaaaatttctggtgaattacacagaaatttttggaaatgggactttgtgcaggtaaccaccctgcacttcaggtaatgttcctgtcacagctgtcgactaccccacgctgcaggaaatccattcagaaatgagctaacagtctccagtgtagcaggagagccagtcacttccctccccaggccccaaagcaccccaaggctggtattccttgagtcataggtattaataataaaagcctcaatgcagcttctccatgtagttcctctcctacaagccaggtggattctggtcctaactaaagagatgggagttcacctgagggcaagaagtacccaggatgcccaaacagccgcacaggtgtcctgtgcttcctgtgagacttcctgggggaaatatacaaactaatatattttttaatgtttacgtcatttacactgctgcttttctcatattctgcttttaattacttgtagtaaatcatttgtttgggcttcaagcactgtcttccatctgcatcttccagatttatcatgagtgatcttgttctactgttaaagatgtcaagcctaaaaagtaataaagtttttatttggctgttgaaccttgatgtagcccctactacatacactacaagttatgccttctggctactacagaatctccgcagaccttttagttatgagtagaagcaataagaaggtgtccttatggtcttaggaataatagttccaatgtattggcataatttgtttgaatgtctttattttgatattaacaccggcataaatctatttttgctaccagatgatagctattttcatttgctctattttcctctgcattgtactaatctgttactcagtgttagtcttcatttttctgtgttggaaacctgcgtcatgtaaatatctgcaaatcatgacagtctaaagtgcaaaccattttcagagactttggggaatgcagtgatcagaagtggctaatttattttatttctgattattttatccagagggtacttttttaatggatatttgtaaatcttccacttaaccactgaaaattattttgttttaatcccacccttccatccatacctctgcctccccaaaaagctcctattaatttgcttatccccctcatgtagctagttgaatgtgaataaataacatggaaaaaaaaaaaaaaaaaaaaaaaaa

SEQ ID NO: 6260 - DNA, 6529 bp, Homo Sapiens
  NM_145322
gctggtggcgcccgccagccggcccgggagaggggacttgagcgcttcgcggccggtgcgcagcgcggctccggccccgcagtctgtctgcaagtggccatccccgcccccgactcctgcggccggtgcgggagctgtcagctgcacgttgcgggggtaccggagaagccggggttgccttctcccggttctgtgcgctaaccccggagcccggccccggggaactagggagcgtctccggctgcacagcgctcaggttttagggtttcctttgggccacccaaaatgttttttaaatactttggataagagctaaaccacctgccactggggacttccatactctcggctcccttgtcatctgatggcattttgattgtctcgaggccaagtgacttgctgtccatgatgagtgatgagaagaaccttggtgtgtcccaaaaattggtatcaccttcaaggagcacaagtagctgctcttccaagcaaggaagtcgacaggacagctgggaagtggtggaaggactgaggggggagatgaattacacccaggagccaccagttcagaaaggatttttgctgaaaaagaggaagtggcccttaaaaggctggcataagagattcttctatctggacaaaggaatcttgaaatatgccaagagccaaaccgatatagagagagagaagctgcatggctgcattgatgtcgggctctcagtgatgtctgtaaagaagtcatcaaaatgcatagaccttgacaccgaggagcacatctaccatctgaaggtcaagtcagaagaagtctttgatgagtgggtatcgaaacttcgccaccacagaatgtatcgtcagaatgaaattgccatgtttccacatgaagttaaccactttttctcagggtccaccatcacagactcttcatctggggtgtttgactccatttcaagtaggaagcgtagcagtatatcaaagcagaatttatttcaaactggaagcaatgtatcattttcttgtggtggtgagacacgagttccattatggttacagtcttcagaggacatggaaaaatgctccaaagacctggcgcactgtcatgcctacctggtagaaatgagccagctcctgcaaagcatggacgtcctgcatcggacatactcggcaccagctatcaacgccatccaggtcccgaaacctttttctggcccagtaagactacactcctccaatcctaatttgtcaacactagattttggagaagagaaaaattattctgatggctctgaaacctcatcagagttttctaaaatgcaagaagatctgtgtcatattgcccataaagtttacttcactttaaggtcagcttttaatatcatgtcagcggagagagagaaactgaagcagctgatggagcaggatgcctcctcctccccgtctgctcaggtcattggtctgaagaacgccctgtcatccgaaaactccagagatgaaaaccgagctctagttcatcagctttctaatgaaagtagactctccatcactgactccctttctgagttttttgatgctcaggaagttctgttatctccaagctcttcagaaaacgagatttctgatgatgactcatatgtcagtgacataagtgataatctttccttagataatctcagtaatgatttagataatgagagacagaccttggggcctgtccttgatagtggtcgggaagcgaagtcccggagaagaacgtgcctgccggcgccctgcccgagcagcagtaacatcagcctgtggaacatcctgaggaacaacatcgggaaggacctgtccaaggtggccatgccggtggagctgaacgagcccctgaacacgctgcagaggctctgcgaggagctggagtacagcgagctcctggacaaggccgcgcagattcccagccccctggaaaggatggtatatgtggcagcctttgccatatcagcgtatgcatctagctactaccgagctggaagcaagccatttaatccggttcttggagaaacatatgaatgtattcgggaggacaagggcttccagtttttttcagaacaggtcagccaccatccgcctatctctgcgtgtcatgctgagtctagaaattttgttttctggcaagatgtgagatggaaaaacaaattctggggcaaatccatggaaattgttccaattggcacaacccatgtgactctgccagtttttggggatcattttgagtggaacaaagtgacctcttgcatccataacatcttaagcgggcagaggtggattgagcactatggagagattgtcatcaagaacctgcatgatgattcctgctactgcaaagtgaattttataaaggcaaaatactggagcactaatgcccatgagattgaaggcacagtgtttgacaggagtggaaaagcggttcatcggctgtttgggaaatggcatgaaagcatctactgtggcggcggctcctcttctgcctgtgtatggagagcaaatcctatgccgaaaggctacgagcaatactatagcttcacacagtttgcgctggaattaaatgaaatggatccatcatcaaagtctttattgccacctactgacactcgatttaggccagaccagaggtttctagaggaagggaacttagaagaagctgaaatacaaaagcagaggattgaacaactgcagagagaaaggcggcgggtcttagaagaaaatcatgtggagcaccagcctcggtttttcaggaaatccgacgatgactcttgggtgagcaacggcacctatttggaacttagaaaagatcttggtttttccaaactggaccatcctgtcttatggtgaaaaagtaaagaagaaagataacattagtgtatttctcctgtgcttgccttctgaagtggcacaaacctgtgtttatatatttaaaagatactctaggatgatcacttgtgcttagcttagcattgtaactctttaagtctatattttcctcagtgcgtttctttacaatttcaaatgttaccctgattgtttatatgaatgtagaacaccttgacatttctttttatatataaactatttaataaaaatgaaagattgaatgttcatgtgtgggttaaaaaaagaagctttaacactaattttccaaaggttagggaagattccaattaaatttatgccttataaaattatgttgtagaaaaaaaatcaacctctcccaggtgcattaagaaataagaattcccagggttactcacccatgcgtaagctacccaagtttaatttggtagctgaaatatctttttgcctcagacagctcttgaattgctcatacagaacaattctgctggtgctggagtctgaagaatattttcatttgcattttagtggttagggagaggatataagattaatggaatgtatatttttatataagacgtatacggcaccttcttgaaaaggaagcatttgaacttgttcctccctatagttctattgccttatatgcaaaattgtaccctgttgctcagagaaattattcataagagaaaagaattccaattaattaaatatcacaatagcatcccagagagacagtaggaaatttctccttagtgagagctgagtccttgagaagttaagagactgtttcctgcttcccaccccaccccgttttttgtccctccgtttgatcacctccctgttgagtatggaatgtcccagtttaatataaaacatacagtttattccacacagcagtttgactttgtaaaagtttagcaaaataactgattgttttggataactcaacatgtttttcttaaatgctgttttagtattttctacctcttaataagcaccatattttagatcttgtataaaaagttgccatctgccttatagacaaatgtagagaattgatgttcttgctttgtgttgtgttctggtaaagctttaagtgagtgtcttacccctttcctatactttcttgttatccatatcattcttttgtgagttttgcagcagtcttgaataatacagattataactactgaaaggggaaccttcgtctttttaaatgtgtcatttcacattacaataatatgtgtagtagttgaattgtgttatcaaagcatgtccaacttctgtccagatgacattaaaaccaaagcctaattgttaagcctcttattctaaagtccatagcaatgctatggaatatcaagtataatgatgtagtaaaaagatttctccagaaaacactttgagatacttaaagaaattcagagcatatcgaatgttatgaatgaagagtaaaataattacaggaaaagaatgcatgatttttcattgtcacaccaaataaccagttggacaatattgcattttcaaaatggagagttatttaaagtggatgtgtagccttctggaatctgcacgtgactggcattttaaaacaactcattaaatattggattcattttatcgagatgccaagatgaacacaatgtgaatatcatttccatttctaagcagttgaatgacacagtcagattctttggtgtatgctttgttctttccatctcaagcatttatccaaattctgctcacagacatgaggaagcaggctgtagatttaagggcactcaaggggaaaacaaatgtagtttccacagtgtgaggataaatgtagaatcgtggtaatattggctgttaaattggcctgctccagagactggctcaaaaaagaaagaagcaacgaaaacaaaatgcacagcctgaatggacgtagcactgtcatgtggcatttggaaaatctttaattatcctaatgttatttcacttgcccttatgctttattttagagtcccagggacaactggatgaaacattacgtctgtagtcatcttatttgagatgggggtgggaacgaattaaaatatgatagagaactatatgcagattttaaaatctagtcagtactagcatctataaagggcttttctgaaatttaaacagcttggtgatgcatcctgatattataagcttaaaactatcttgagggggaaatgacttcttttctccttctgtcccttttctcaaaagcatctttcccccaaatgtatgtctctaggacattttatagttttaagaggaagaaaacagaaacgtggcatcatttgggaagaaccaaggtagaatttaattttctggactttaaatctcctggttaaataatgctaatcactgtaccatttgagttacatgttttaacctcttttttttttctaattattccatccaaaatttctggtgaattacacagaaatttttggaaatgggactttgtgcaggtaaccaccctgcacttcaggtaatgttcctgtcacagctgtcgactaccccacgctgcaggaaatccattcagaaatgagctaacagtctccagtgtagcaggagagccagtcacttccctccccaggccccaaagcaccccaaggctggtattccttgagtcataggtattaataataaaagcctcaatgcagcttctccatgtagttcctctcctacaagccaggtggattctggtcctaactaaagagatgggagttcacctgagggcaagaagtacccaggatgcccaaacagccgcacaggtgtcctgtgcttcctgtgagacttcctgggggaaatatacaaactaatatattttttaatgtttacgtcatttacactgctgcttttctcatattctgcttttaattacttgtagtaaatcatttgtttgggcttcaagcactgtcttccatctgcatcttccagatttatcatgagtgatcttgttctactgttaaagatgtcaagcctaaaaagtaataaagtttttatttggctgttgaaccttgatgtagcccctactacatacactacaagttatgccttctggctactacagaatctccgcagaccttttagttatgagtagaagcaataagaaggtgtccttatggtcttaggaataatagttccaatgtattggcataatttgtttgaatgtctttattttgatattaacaccggcataaatctatttttgctaccagatgatagctattttcatttgctctattttcctctgcattgtactaatctgttactcagtgttagtcttcatttttctgtgttggaaacctgcgtcatgtaaatatctgcaaatcatgacagtctaaagtgcaaaccattttcagagactttggggaatgcagtgatcagaagtggctaatttattttatttctgattattttatccagagggtacttttttaatggatatttgtaaatcttccacttaaccactgaaaattattttgttttaatcccacccttccatccatacctctgcctccccaaaaagctcctattaatttgcttatccccctcatgtagctagttgaatgtgaataaataacatggaaaaaaaaaaaaaaaaaaaaaaaaa

SEQ ID NO: 6261 - DNA, 3728 bp, Homo Sapiens
  NM_145341
cttttcctcctcagctccggctccgccgccacgattggccagccgaccacccggcctcggccaataagcgccgccctctcgcccccgtgttactgggtagaagaaaacaaaaacaaacagagcgagaagggccagagactctccgaggcggcggcagagacagaagagcggggtcggggccggctgaccaggaacctgggcgagcagcggcgggggcccgagggattctgaaggaagatttccattaggtaatttgtttaatcagtgcaagcgaaattaagggaaaatggatgtagaaaatgagcagatactgaatgtaaaccctgcagggtattttccctaattctccatggtgcttcaatagcatgttattatcataaaaatgaacagttttgtggaatagatgaccaaatatcctgataacttaagtgactctctcttttccggtgatgaagaaaatgctgggactgaggaaataaagaatgaaataaatggaaattggatttcagcatcctccattaacgaagctagaattaatgccaaggcaaaaaggcgactaaggaaaaactcatcccgggactctggcagaggcgattcggtcagcgacagtgggagtgacgcccttagaagtggattaactgtgccaaccagtccaaagggaaggttgctggataggcgatccagatctgggaaaggaaggggactaccaaagaaaggtggtgcaggaggcaaaggtgtctggggtacacctggacaggtgtatgatgtggaggaggtggatgtgaaagatcctaactatgatgatgaccaggagaactgtgtttatgaaactgtagttttgcctttggatgaaagggcatttgagaagactttaacaccaatcatacaggaatattttgagcatggagatactaatgaagttgcggaaatgttaagagatttaaatcttggtgaaatgaaaagtggagtaccagtgttggcagtatccttagcattggaggggaaggctagtcatagagagatgacatctaagcttctttctgacctttgtgggacagtaatgagcacaactgatgtggaaaaatcatttgataaattgttgaaagatctacctgaattagcactggatactcctagagcaccacagttggtgggccagtttattgctagagctgttggagatggaattttatgtaatacctatattgatagttacaaaggaactgtagattgtgtgcaggctagagctgctctggataaggctaccgtgcttctgagtatgtctaaaggtggaaagcgtaaagatagtgtgtggggctctggaggtgggcagcaatctgtcaatcaccttgttaaagagattgatatgctgctgaaagaatatttactctctggagacatatctgaagctgaacattgccttaaggaactggaagtacctcattttcaccatgagcttgtatatgaagctattataatggttttagagtcaactggagaaagtacatttaagatgattttggatttattaaagtccctttggaagtcttctaccattactgtagaccaaatgaaaagaggttatgagagaatttacaatgaaattccggacattaatctggatgtcccacattcatactctgtgctggagcggtttgtagaagaatgttttcaggctggaataatttccaaacaactcagagatctttgtccttcaaggggcagaaagcgttttgtaagcgaaggagatggaggtcgtcttaaaccagagagctactgaatataagaactcttgcagtcttagatgttataaaaatatatatctgaattgtaagagttgttagcacaagttttttttttttttttttttaagcacttgttttgggtacaaggcatttctgacattttataaacctacatttaaggggaatttttaaaggaaatgttttttcttttttttttgtttttcgagggggcaaggagggacagaaaagtaacctcttcttaagtggaatattctaataagctaccttttgtaagtgccatgtttattatctaatcattccaagttttgcattgatgtctgactgccactcctttctttcaaggacagtgttttttgtagtaaaatcactggtttatacaaagctttatttagggggtaaagttaagctgctaaaaccccatgttggctgctgctgttgagatactgtgctttgggagtaaaaaaagaaagttatttctttgtcttaaagaatttttaaaaaattagtcatgagacttattcatctttccagggaacatactgattggtcttaaaagactagacagttaagtaaaaggtggctggaacatctatttttctacaaaactggaaaaatgaacctggttctagaagaatgtacaccaaaataaaacatgtgaagcagtattgattctttattgggagtacatttttttaggtctcttaaactttaatttcacacagtaaattttgaatctcataaggaagcatatttgaacctagtcaatttaatcttagtgttcccttgaaaactttttttccctacaaaattttaagtgaaaaatacaatagtaaattaagattacactggggaaaaaaatgcaggtatcactttactccattgttatctgacctagagcttaattaagttttagaaatatgtaataccttccatcattccatcatccttaaattctgttaccaaataatggctaatgttacaaaaagttatactccagagacccaaagcttgacatttacctaatgtatgagaaaatattaccaattaacaataaagaatgatcatatttttaacctcttttacatagcctaataactcagcaaggcctcaacgtctgtgctaatttaaactgccaaatattgactgcagcaaacaagaattatattcagaatttatgagggtactgttaggagtatactgcttacaggtttagatatagtctgttagaattaaaaccaagtttagtgttcatatttacctcatgggctttatcaagcccatattacctcagcttatatatagttaccatttttaggtttttaattgtttgacacttggatgataaatgcagtcattttattctcaagtgcttaaaattaatgtaattaaaagcttagctgactacagaataggtgagggtttcttaaaaatgagatttaagggctgggcacggtggctcatgcctgtaatcccagcactttgggaggccgaggtgggcggatcacttgaggttgggagttcatgaccagcttgaccaacatgaagaaaccctgtctctattaaaaatacaaaagtagccaggcatggtggcgcatgcgtgtaatcccagctacttgggaggctgaggcaggagaattgcttgaacctgggaggcagaggttgcagtgagtcgagatggtgccattgctctcgtttgggcaacaagagtgaaactcttgtctcaaaaaaaaaaaaaaatgaggtttaagacagttttgtcattactggtgggatctggtcacacaagatagcattaaacgtgacatggcacataaaattggttaaaaaattttgttttttaattacgtaatgtaaaagcccaacaaacactttatgcaagattggaatgtatcttcaaattcagatttaataaacatgtaaagatcctctgtaaaaaaaaaaaaaaaaaaaaaaaaaaaaaaa

SEQ ID NO: 6262 - DNA, 3693 bp, Homo Sapiens
  NM_145638
ctccctccgccgcgccctcgctccgcctcgcgcggggggaccatctgctggcatttcctgcagccaggcccgcgccgccagtggagcccccgcgcgcccggccggcccggagcaccgagctcgcggcacgaagcccccgagcgcccacagcatgaaggaggaggccttcctccggcgccgcttctccctgtgtccaccttcctccacccctcagaaagtcgacccccggaagctcacccggaacttgctcctcagcggagacaatgagctctacccactcagcccagggaaggacatggagcccaacggcccgtcgctgcccagggatgaagggcccccgaccccaagctctgccacgaaggtgccaccggcagagtacaggctgtgcaacgggtcagacaaggaatgtgtgtcccccaccgccagggtcaccaagaaggagactctcaaggcgcagaaggagaactaccggcaggagaagaagcgcgccacacggcagctgctcagcgctctgacagaccccagcgtggtcatcatggctgacagcctgaagggccccaaaggtgagagcgtgggctccatcacacagcccctgcccagcagctacctgatcttcagggccgcctccgagtcagatggtcgctgctggctggacgccctggagctggccctgcgctgctctagcctactgagactgggcacctgcaagccgggccgagacggggagccagggacctcgccagacgcatcaccctcatcgctctgtgggctgccagcctcagccaccgtccacccagaccaagacctgttcccactgaacgggtcttccctggagaacgatgcattctcagacaagtcggagagagagaaccctgaggagtcagataccgagacccaggaccatagccggaagacggagagtggcagcgaccagtcagagacccctggggccccggtgcggagagggaccacctatgtggagcaggtccaggaggagctgggggagctgggcgaggcgtcccaggtggagacagtgtcagaggagaacaagagtctgatgtggaccctgctgaagcagctacggccaggcatggacctgtcccgcgtggtgctacccacgttcgtactggagccgcgctccttcctgaacaagctctccgactactactaccacgcagacctgctctccagggctgcggtggaggaggatgcctacagccgcatgaagctggtgctgcggtggtacctgtctggcttctacaagaagcccaagggaatcaagaagccgtacaaccccatcctgggggagaccttccgctgctgctggttccacccgcagactgacagccgcacattctacatagcagagcaggtgtcccaccacccgcccgtgtctgccttccacgtcagcaaccggaaggacggcttctgcatcagtggcagcatcacagccaagtccaggttttatgggaactcgctgtcggcgctgctggacggcaaagccacgctcaccttcctgaaccgagccgaggattacacccttaccatgccctacgcccactgcaaaggaatcctgtatggcacgatgaccctggagctgggtgggaaggtcaccatcgagtgtgcgaagaacaacttccaggcccagctggaattcaaactcaagcccttcttcgggggtagcaccagcatcaaccagatctcgggaaagatcacgtcgggagaggaagtcctggcgagcctcagtggccactgggacagggacgtgtttatcaaggaggaagggagcggaagcagtgcgcttttctggaccccgagcggggaggtccgcagacagaggctgaggcagcacacggtgccgctggaggagcagacggagctggagtccgagaggctctggcagcacgtcaccagggccatcagcaagggcgaccagcacagggccacacaggagaagtttgcactggaggaggcacagcggcagcgggcccgtgagcggcaggagagcctcatgccctggaagccgcagctgttccacctggaccccatcacccaggagtggcactaccgatacgaggaccacagcccctgggaccccctgaaggacatcgcccagtttgagcaagacgggatcctgcggaccttgcagcaggaggccgtggcccgccagaccaccttcctgggcagcccagggcccaggcacgagaggtctggcccagaccagcggcttcgcaaggccagcgaccagccctccggccacagccaggccacggagagcagcggatccacgcctgagtcctgcccagagctctcagacgaggagcaggatggtgactttgtccctggcggtgagagcccatgccctcggtgcaggaaggaggcgcggcggctgcaggccctgcacgaggccatcctctccatccgagaggcccagcaggagctgcacaggcacctctcggccatgctgagctccacggcacgggcagcacaggcaccgaccccaggcctcctgcagagcccccgatcctggttcctgctctgcgtgttcctggcgtgtcagctgttcattaaccacatcctcaaataggagccctgagggcagagctcctggccggtcctgagccctccctcccaggcacccagcactttaagcctgctccatggaggcagagaggcccggcaagcacagccactgtgacggggagtccaggcgcaggagggacccggggccacaaggcgctgcgggcccaggtgtgctgggcccctctcaggggcactggcctctctgcagggccttccgcccagcgctggccttaatgctaaagccaaatgcagcttctgctgtgcgacgcactcctggccatcttgccgtgtcaccccctgtccggcctccacttgccatgggggatggatggatttagggtgggagggcctgtgggggccctggacagtcacaccccagcagcagtgagtgggcaggtttggaggagccccgagtggcccaggagtccccccacacacagatgcataggcctgccttccggagaccctgtccacattgccgggaccaccctggtggggccactggtgggtgccagggacaggttagggccactctggggaaggcattttggttttttattccacgctgtgctgtttggatgggagccccacagaggcaggtcctggaaccaccccacccccacacctggacgctcgctctggtgggggcacacgcaggtggaggtggttgtgggtgcaggtgtgtgcaggggtgtggggggcgcaggggtgtggcttagctggccccgcacccaggccggggaggctcaagttcgccactttactcagaccgatgcacagtcttcccattttacacttttttaataaacataattgcaatattttaggtgggctgcgagctgcagtcagccttcacgtctggcctcagtccccgtgtcagtgccgctctgcgtgtgcgtgtgcgcgtgtgtgagcctctacacatatatatacgtacagagccttaaaccacatcgtggcggtgccgtctgagctgtagcgggtggctttgtttccagtttttgtacccgtgtccttgtctcccctcctcccccatctggggatgtgtctgtgttccacaccttgaaataaacagacacatacgtgttctcttaaaaaaaaaaaaaaaaa

SEQ ID NO: 6263 - DNA, 3654 bp, Homo Sapiens
  NM_145641
actctggggaaaggagggtacaaccacatgtaaattttattataatgatggtataatgaacttggggtgacctgagggcatgtttttgtgttactgggcatgtgcccctttaggagacttccacctgtgccttactttctctttctttgggatgtgctggccacagactttaccaaaaactccatccattaggatggcattaggacggttctggggctaaacttaggtgggccaggggctgtttcactgtcagcctttctactctcttttcttacccactcctagctgctaatgtctatttaactacctaatatttccccctttagagaaaaaaagccaaatttttgggtagatcggtgacaattaatctggctacttcctgctgacaagaggcagtggtaataattgggttctcttttttgctctcttgtagctggtaggttgggcagagaaaagtggtggccatccaaggggcccacgtagatatcagacatggttgagacctcgcggtaaccttgtgtagaatcatttggagttttatggattctaggtgggaagaaacaaaacaaccttgtaaatcaaatgagcatcgtttgaaagctataagttgtataaagctgttttaggaccaagaaagggggctaaccaggaaaaccaggaccagttgttaaatttccaccagtcaaagcctcctgaaactctgttttccattaacttgttggccctgtctgtaatttttttaagttggtttgcactttacctgattggttgatgaaaacagcaatgtttatcaagtgttgcacaagctcccccttgattggctgtgagcaaattaaaagctcatcaatttcataagactatgcttgctaatgaagcaatttgttctgaaagggtattgacctggttagttagattaataatttgttgagtaatttttaagaagagtttctgggcagtaaaaatggagttaaggaggtcctccagttcccgtgccaataccagccagaacgccaattatagtcagtgctgttaaaactcctctttcagttttaccagattgagcgtgtatagggaggggaatgctatcgataagagtgagtttggggatgatgtaaactagggccaaatccccgtttaattagcagacaagcagagatatgccttgtttctatacaaaaatgtgatttgtcatgttaagacaaatatcaacagtgatactaaagtagggtttttccatgctgtgtaagtctgctttaataccctcagaagtggaagtcaaggctagttcatgtaatgggggaacacaggcagtacttgacagaatgaaagaggaatcaaaagcccaattagaggaaggagtgatgggatcccaaccaatattgtgaaattatggggagctgcagttttttgcaatgattttgcccgaagttgtgagactgaaaccagaagttgttatgtttaaaatgatattctggtgtgggtctggggaaaagggtagatccagaatagctggcttctttccacatagtggttctgttggggggcttgggaaatgaataaaacacaaagaagaattagaatatcaggtgaaggtagcaggtgctcctggcagaagaacccacataaggaagtgtccagaagccacacagggtatatctcagagcctggagaacgtgtctggttattatgcagatgcacggctggaggtgggatccacacagctcagaacagctggatcttgctcacactctttcaagagaagcttccttgaaaagaaacgctttactgaagaggccaccaaatacttccgggagagagtcagcccagtgcatctgcaaatcctgctgactaacaatgaagcctggaagagattcgtgactgcggctgaattgcccagggatgaggcagatgctctctacgaagctctgaagaagcttagaacatatgcagctattgaggacgaatatgtgcagcagaaagatgagcagtttagggaatggtttttgaaagagtttccccaagtcaagaggaagatccaggagtccatagaaaagcttcgtgcccttgcaaatggtattgaagaggtccacagaggctgcaccatctccaatgtggtgtccagctccactggcgctgcctctggcatcatgtcccttgctggtcttgttttggcaccatttacagcagggacgagtctggcccttactgcagctggggtagggctgggagcagcgtctgctgtgactgggatcaccaccagcatcgtggagcactcatacacatcatcagcagaagctgaagccagcaggctgactgcaaccagcattgaccgattgaaggtatttaaggaagttatgcgtgacatcacacccaacttactttcccttcttaataattattacgaagccacacaaaccattgggagtgaaatccgtgccatcaggcaagccagagccagggcccgactccctgtgaccacctggcgaatctcagctggaagtggtggtcaagcagagagaacgattgcaggcaccacccgggcagtgagcagaggagcccggatcctgagtgcgaccacttcaggcatcttccttgcactggatgtggtcaaccttgtatacgagtcaaagcacttgcatgagggggcaaagtctgcatctgctgaggagctgaggcggcaggctcaggagctggaggagaatctaatggagctcactcagatctatcagcgtctgaatccatgccatacccactgaccccagaccagtgcagccagcaggggaggtgagccatacacaggccacgacaaaatgcaggcattttattagggggataaagagggcaaggtaaagtttatggagctgagtgttagtgactttggcatttctgtagctgagcacagcaggggaggggttaatgcagatggcaagtgcaccaaggagaaggcaggaatgctggagcctggaataagggaggagaggggactggagagtgtggggaataggaagaagaaatttcctttagactaacgaatatattggggggaggaatagaggggaggtgtgcaggaaccagcaatgagaaggccaggaaaagaaagagctgaaaatgcagaaagccgaagagttagaacttttggatacagcagaagaaacagcggctccactaccgacctgcccccggttcgatgtccttccaagaatgaagtctttccctggtgatggtcccctgccctgtctttccagcatccactctgtcttgtcctcctggaagtgtatctcagtcagccagtggcttcttgatgatggcggtggaggtggtggttgtagtgtgatggatcccctttaggttatttaggggtatatgtcccctgcttgaaccctgaaggccaggtaatgagccatggccattgtccccagctgaggaccaggtgtctctaaaaacccaaacatcctggagagtatgcgagaacctaccaagaaaaacagtctcattactcatatacagcaggcaaagagacagaaaattaactgaaaagcagtttagagactgggggaggccggatctctagagccatcctgctgagtgccctgtgtgtaagtcctaataaactcacctactcaccaagctggaaaaaaaaaaaaaaaaaaaaaa

SEQ ID NO: 6264 - DNA, 1729 bp, Homo Sapiens
  NM_145645
ggaacatggggctgtacgctgcggtggcaggcgtgctggccggcgtggagagccgccagggctctatcaaggggctggtgtactccagcaacttccagaacgtgaagcagctgtacgcgctggtgtgcgaaacgcagcgctactccgccgtgctggatgccgtgatctccagcgccggcctcctcagtgcgaagaagctgcagccgcacctggccaagggtgctagtgtatgagttgttgggaaagggctttcgagggggtgggggccaatggaaggctctgttgggacggcaccaggcgaggtgttgagttggctcggctcaaggttcttcggggtgtgagctggcatgaggacctgttggaagtgggatccaggcctggtccagcctcccagctgcctcgatttgtgcgtgtgaacactctcaagacctgctccgtttatgtagttatttcaagagacaaggtttctcctatcagggtcgggcttccaggctggatggagtgccctggcgcgatctcggctcaccgcaacctctgcctcctgggttcaagcgattctcctgcttcagccttctgagcagctgggattatgaaggggtggcctgcccctccacatctgtgggatatctcatcagccttgatgacttacaagccctcaaggggaagcattttctcctggactccttgatgccggagctgctggtgtttcccgcccagacagatctgcatgaacacccactgtaccgggccggacacctcattctgcaggacagggccagctgtctcccagccatgctgctggacccccgccaggctcccatgtcatcgatgcctgtgccgccccaggcaataagaccagtcacttggctgctcttctgaagaaccaagggaagatctttgcctttgacctggatgccaagcggctggcatccatggccacgctgctggcctgggttggcgtctcctgctgtgagctggctgaggaggacttcctggcggtctcccccttagatccgcgctatcgtgaggtccactatgtcctgctggatccttcctgcagtggctcgggtgagatggtatgccgagcagacagctggaggatcccggggcagggacacctagcccggtgcgtctgcatgccctggcagggttccagcagcgagccctgtgccacgcgctcactttcccttccctgcagcggctcgtctactccatgtgctccctctgccaggaggagaatgaagacatggtaccagatgcgctgcagcagaacccgggcgccttcaggctagctcccgccctgcctgcccggccccaccgaggcctgagcacgttcccgggtgccgagcactgcctccgggcttcccccaagaccacgcttagcggtggcttcttcgttgctgtaattgaacgggtcgagatgccgacctcagcctcacaggccaaagcatcagcaccagaacgcacacccagcccagccccaaagagaaagaagagacagcaaagagccgcagccggtgcttgcacaccgccttgcacatagcagaggctccaggctgactccttcctggtgggaaaggaagatgcctgtcctctccgtggaggaccctgggccctcaccgcaggcagcagtttgcattttgaaaggttattgggtcccttcctcgggctgtgttcttgctggtgagcaaaagtgttgcctgcagaaataaaatgcagaacgtactct

SEQ ID NO: 6265 - DNA, 3520 bp, Homo Sapiens
  NM_145647
aaatttcccgggccgggagcgctgggcctgccgggaaggcgctgggacggttacccagcgggccgccggcggtcgtgggcaagcttcgccatgcagagcactgacctaggcaacaaggagagcggcaagatatggcaccgcaagccgtccccggccacgcgggacggaattatagtgaacattattcacaacacttccgattaccatccaaaagttttgcgatttttgaatgtggcttttgatggcacaggcgactgcttaattgctggggaccaccaaggaaatatttatgtttttgacttacatggaaacaggttcaatcttgttcagcgaacagcacaagcttgcacagctctggcctttaatcttcgtaggaaatctgaattccttgtggcattagctgattattctattaaatgttttgatacagtcaccaaggagctagttagctggatgagaggacatgaatcatcagtattttcgatctctgtgcatgcatcagggaaatatgccatcacaacttcttctgatacagcacaattatgggacttggatacctttcagagaaaaagaaagctgaatattcgccagtctgtgggtatacagaaggttttctttctaccattaagtaataccatcctcagctgttttaaagataattccatttttgcctgggaatgtgacacacttttttgcaaatatcaattgccagctccacctgaaagctctagtatattatacaaagtgtttgctgtaaccagagatggccgaatcctggctgctggaggcaagtcaaatcatcttcatttgtggtgcttggaagctaggcagctctttagaattatccagatgcccactaaagttcgagccattcgccatctggaatttcttcctgatagttttgatgctggttctaatcaggttcttggagtactaagtcaagatggtattatgagatttatcaatatgcagacttgtaaacttctctttgagattgggagcctcgatgaaggaattagctcatcagcaattagcccacatggacggtacattgcatctattatggaaaatggaagtctaaacatatattcagttcaggctttaacacaagaaataaataagccacctccgcctttagtgaaagttattgaagatttgcccaagaataaactgagttccagtgatcttaagatgaaagtaacatcagggagagtacagcagccagcaaaatctagggaaagcaaaatgcaaactagaatattaaaacaagacctgactggtgattttgaaagtaaaaagaatgaattaccagatggattaaacaaaaagcgtttacaaatcttattaaaaggctatggtgaatatccaacaaaatacagaatgttcatttggcgctctctgctacaactgcctgaaaatcatactgcgtttagtaccctcatagataaggggactcatgtggcatttctcaaccttcagaagaaataccccatcaaaagtaggaagctactcagagtattacagagaaccttatctgcattagctcactggtctgtcatttttagtgacacaccatatcttccactcttggcatttccatttgtaaaattattccagaacaaccaactcatctgttttgaagttattgctactctcataatcaattggtgtcaacactggtttgaatattttcctaatcctcctatcaatattcttagcatgatagaaaatgttttggcatttcatgacaaggaactgctgcaacacttcatagatcatgatataacctcccagctatatgcatggcctcttcttgaaactgtgttctcagaagtgctgacaagagaggagtggctgaaattgttcgataatatcttttccaaccatccttccttccttctgatgactgttgtagcctacaacatatgttctagaacgcctctgctcagctgtaatcttaaagatgactttgagtttttttttcaccatcggaataacctggatataaatgttgtgattagacaagtttatcatctcatggagaccacgcctactgacattcatccagacagcatgcttaatgtttttgttgcactgacaaaagggcagtatccagtatttaatcaatatccaaagtttattgtggactatcaaacacaggaacgagaaagaataaggaatgatgaattggattacttaagagagaggcagacagttgaagatatgcaagctaaagtcgaccagcaaagagttgaagatgaagcttggtaccagaaacaggagctgcttcgtaaagctgaagaaacaagaagagaaatgctcttacaagaggaggagaaaatgatacaacaaagacagaggctagctgctgtgaaaagagagctgaaagtaaaggaaatgcacttacaagatgctgcaagaaggcgttttctgaagcttcagcaagatcaacaggaaatggaactaagaagactggatgatgaaattgggagaaaggtatatatgagagatcgagaaattgctgccacagccagagacctagaaatgagacagctggaactcgaatcacaaaagagactttatgagaagaatcttactgaaaatcaagaagctcttgcaaaagaaatgcgagcagatgcagatgcctatagacgaaaagtggatcttgaagaacacatgtttcataagctgatagaagcaggtgaaacccagagccagaaaactcagaaggtgattaaagaaaatttggcaaaggctgaacaagcatgcctaaataccgactggcagattcagtctttacataaacaaaaatgtgatgatctacaacgaaacaaatgttaccaggaagtagccaaactccttagggaaaacagaaggaaagaaatagagataataaatgcaatggtggaggaggaagccaagaagtggaaggaagctgaaggaaaagagttccgtttgagatcagcaaagaaagcttctgctctttcagatgcgtctagaaagtggtttttaaagcaagagataaatgcggctgtagaacatgctgaaaatccatgtcataaagaagaacccaggttccaaaatgaacaggactcaagctgtttgcctagaacctcacaattaaatgactcttctgaaatggatccctcaacacagatttctttaaatagaagagcagtagaatgggacaccacgggacagaatcttattaagaaagtgagaaatcttcgccagagactcactgcccgggctcgtcacagatgtcaaacccctcatcttttggctgcatagaatgcatgtcaccttgagacggtcgagagagagacctattttgcaatcagtgacattgatttttagattatttatttaaaattcctataaagatcagccctttgtacagaaaaatgtgtctataaaaattatgtgttatttaattctgatactttttggcttgtaaatggcttcttgaactttttacaataaaaatgttttagaaactgttaaaaaaaaaaaaaaaaaa

SEQ ID NO: 6266 - DNA, 1436 bp, Homo Sapiens
  NM_145658
ctgcgcttgcgcgctggggacaaccgttgctgggtgtcccagggcctgaggcaggacggtactccgctgacaccttccctttcggccttgaggttcccagcctggtggccccaggacgttccggtcgcatggcagagtgctacggacgacgcctatgaagcccttagtccttctagttgcgcttttgctatggccttcgtctgtgccggcttatccgagcataactgtgacacctgatgaagagcaaaacttgaatcattatatacaagttttagagaacctagtacgaagtgttccctctggggagccaggtcgtgagaaaaaatctaactctccaaaacatgtttattctatagcatcaaagggatcaaaatttaaggagctagttacacatggagacgcttcaactgagaatgatgttttaaccaatcctatcagtgaagaaactacaactttccctacaggaggcttcacaccggaaataggaaagaaaaaacacacggaaagtaccccattctggtcgatcaaaccaaacaatgtttccattgttttgcatgcagaggaaccttatattgaaaatgaagagccagagccagagccggagccagctgcaaaacaaactgaggcaccaagaatgttgccagttgttactgaatcatctacaagtccatatgttacctcatacaagtcacctgtcaccactttagataagagcactggcattgggatctctacagaatcagaagatgttcctcagctctcaggtgaaactgcgatagaaaaacccgaagagtttggaaagcacccagagagttggaataatgatgacattttgaaaaaaattttagatattaattcacaagtgcaacaggcacttcttagtgacaccagcaacccagcatatagagaagatattgaagcctctaaagatcacctaaaacgaagccttgctctagcagcagcagcagaacataaattaaaaacaatgtataagtcccagttattgccagtaggacgaacaagtaataaaattgatgacatcgaaactgttattaacatgctgtgtaattctagatctaaactctatgaatatttagatattaaatgtgttccaccagagatgagagaaaaagctgctacagtattcaatacattaaaaaatatgtgtagatcaaggagagtcacagccttattaaaagtttattaaacaataatataaaaattttaaacctacttgatattccataacaaagctgatttaagcaaactgcattttttcacaggagaaataatcatattcgtaatttcaaaagttgtataaaaatattttctattgtagttcaaatgtgccaacatctttatgtgtcatgtgttatgaacaattttcatatgcactaaaaacctaatttaaaataaaattttggttcaggaaaaaa

SEQ ID NO: 6267 - DNA, 1044 bp, Homo Sapiens
  NM_145659
gaccaaagaggctgggccccgccatgggccagacggcaggcgaccttggctggcggctcagcctgttgctgcttcccttgctcctggttcaagctggtgtctggggattcccaaggcccccagggaggccccagctgagcctgcaggagctgcggagggagttcacagtcagcctgcatctcgccaggaagctgctctccgaggttcggggccaggcccaccgctttgcggaatctcacctgccaggagtgaacctgtacctcctgcccctgggagagcagctccctgatgtttccctgaccttccaggcctggcgccgcctctctgacccggagcgtctctgcttcatctccaccacgcttcagcccttccatgccctgctgggagggctggggacccagggccgctggaccaacatggagaggatgcagctgtgggccatgaggctggacctccgcgatctgcagcggcacctccgcttccaggtgctggctgcaggattcaacctcccggaggaggaggaggaggaagaggaggaggaggaggaggagaggaaggggctgctcccaggggcactgggcagcgccttacagggcccggcccaggtgtcctggccccagctcctctccacctaccgcctgctgcactccttggagctcgtcttatctcgggccgtgcgggagttgctgctgctgtccaaggctgggcactcagtctggcccttggggttcccaacattgagcccccagccctgatcggtggcttcttagccccctgccccccaccctttagaactttaggactggagtcttggcatcagggcagccttcgcatcatcagccttggacaagggagggctcttccagccccctgccccaggctctacccagtaactgaaagcccctctggtcctcgccagctatttatttcttggatatttatttattgtttagggagatgatggtttatttattgtcttggggcccgatggtcctcctcgggccaagcccccatgctgggtgcccaataaagcactctcatcca

SEQ ID NO: 6268 - DNA, 1552 bp, Homo Sapiens
  NM_145691
gcggaagatggcggcgtccaagggaggttgagggctctgaggaggcgttgagaggtttccgtacagcccgaccgtgcggctttggggatcccatcgctctgtgtttcctgctccaggtttcgcgtctcgcatcttcccagaccctcgggcgcgatgtggaggagctgcctccggctgcgggacgggggacgccgtctcctgaatcggccggcgggtggccccagcgcttctatgagtccggggccaaccatcccgtctccagcccgggcttacgccccgccgacagaaaggaagaggttttatcagaatgtcagcatcacacagggtgaaggtggctttgagataaacctggaccacaggaagctgaaaactccccaagccaagctctttaccgtccccagcgaggccctggccattgcagtggctactgagtgggattcccagcaggataccatcaagtactacaccatgcacctgaccacattgtgcaacacatcattggacaacccaacccagagaaacaaggatcagctgatccgggcagccgtgaagtttctggacaccgacaccatctgctacagggtggaggagcccgagacattagtggaacttcaaaggaatgagtgggatccaatcatcgaatgggctgagaaaagatacggcgtggagatcagctcctccaccagcataatgggacccagcatccctgccaaaactcgggaggtgctcgtcagccacctggcatcttacaacacatgggctttacaagggattgagtttgtagctgcccagctcaagtccatggtgctaaccttgggcctgattgacctgcgcctgacagtggagcaggccgtgctgctgtcacgcctggaggaggagtaccagatccagaagtggggcaacattgagtgggcccatgactatgagctgcaggagctgcgggcccgcaccgccgccggcaccctcttcatccatctctgctccgagagcaccacagtcaagcacaagctcctgaaggagtgaggcctgggcagagcacactcagcaggatagaggcagtgcagccacagctcccccggccttcagggctccccagcctgtggggctggcttccttggcttttggggactcggcctcagcgtcaccctgagattccccccgagacacagtgcgctagtacggctgtccggaggtcagcctgatttcaacccaggtgcccctggcctggccagcagtgaatgtaggagatgaattgtgcaagtgactttctctcgactctgattttattaaatatttctccaccctggaaatgtgctgagccctgttttcacgtatgcctctgcacttctccattcttcctgttttgtctaggttccagagggttaaacagcttatctcccatggcgtgtttggatatctgctgcctgtggtcaggaaccttgcactggggaaacaatcatgtaatccacagacaactctatttgtgttcttcagcctcagcctgaaggcttttttttggctggcttttaatcaaacaatcttttgaaacaat

SEQ ID NO: 6269 - DNA, 5363 bp, Homo Sapiens
  NM_145693
cagccggcggcgggctgggtgtttgcaatacaaaggcggccacgcgcggcgccgctcggtgcagaccatgaattacgtggggcagttagccggccaggtgtttgtcaccgtgaaggagctctacaaggggctgaatcccgccacactctcagggtgcattgacatcattgtcatccgccagcccaatggaaacctccaatgctcccctttccacgtccgctttgggaagatgggggtcctgcgctcccgagagaaagtggttgacatagaaatcaatggggaatctgtggatttgcatatgaaattgggagataatggagaagcattttttgttcaagaaacagataatgatcaggaagttatccctatgcacctggccacctcccccatcctgtcagaaggagcttcgagaatggaatgccagctgaaaaggggctctgtggacaggatgagaggcctggaccccagcacgccagcccaagtgatcgctcccagcgagacgccgtcaagcagctctgtagtaaagaagagaagaaaaaggaggagaaagtcacagctggacagcctgaagagagatgacaacatgaacacatctgaggatgaggacatgttccccatcgagatgagctcggatgaggccatggagctgctggagagcagcagaactcttcctaatgatatacctccattccaagatgatattcctgaggaaaacctctccctggctgtgatttaccctcagtcagcctcataccctaattcggatagagagtggtcacccactcccagtccttccggttcccgaccttcaacacctaaaagtgattcagaattggtcagcaagtccacggaaaggacagggcagaagaacccagaaatgctttggctgtggggagagctgccgcaggctgctaagtcttcttctccacacaagatgaaagagtccagcccattgagcagtagaaaaatttgtgataaaagtcactttcaggccattcacagcgaatcttcagacacttttagtgaccaatcgccaactctggtcggtggggcacttttggaccagaacaagcctcagacagaaatgcagtttgtgaatgaagaagacctggagaccttaggagcagcagcgccactcttgcccatgatcgaggagctcaaacccccctctgccagtgtagtccagacagcaaacaagacggattctccttccaggaaaagagataaacgaagccgacatcttggtgctgacggcgtctacttggatgacctcacagacatggatcctgaagtggcggccctgtattttcccaaaaacggagatccttccggactcgcaaaacatgcaagcgacaacggagcccggtcagccaaccagtccccgcagtcggtgggcagctcgggcgtggacagtggcgtggagagcacctcggacgggctgagggacctcccttccatcgccatctccctctgcgggggcctcagcgaccaccgggagatcacgaaagatgcattcctggagcaagctgtgtcatatcaacagtttgtggacaaccccgctattatcgatgaccccaatctcgtggtaaagattgggagtaaatattataactggacaacagcagcacccctcctcctggcaatgcaggccttccagaaacctttgccaaaggccactgtggaatctatcatgagggataaaatgcccaaaaagggaggaagatggtggttttcatggaggggaagaaacaccacaatcaaggaggaaagtaagccagagcagtgcttggctggcaaggcccatagcaccggagagcaaccgccgcagctcagcttggccaccagggtaaagcatgaatcatcctccagtgatgaggagcgcgcagctgccaagccatcaaacgcaggccacctccctcttctgcctaatgtcagctacaagaagactctccggctgacttccgagcagcttaaaagcttgaagttgaagaatggccccaacgacgtggttttcagtgtcaccacgcagtaccaaggcacgtgccgctgtgagggcaccatctatctgtggaactgggatgataaagtcatcatttctgatattgatgggacaattaccagatcagatactcttggccacattttgcccacccttgggaaggattggacccatcagggcatcgctaagctgtaccataaagtgagccagaatggatataaatttctctactgttctgcccgtgccatcgggatggcggacatgacgcggggctacctgcactgggtcaacgagaggggcacggtgctgccccaggggcccctgctgctgagtcccagcagcctcttctctgccctgcacagagaagtgattgaaaagaagccagaaaagtttaaagtccagtgtttgacagacatcaaaaacctgtttttccccaacacagaacccttttatgctgcttttggaaaccgaccagctgatgtgtattcatacaagcaagtaggagtgtctttgaatagaatatttaccgtcaaccctaaaggagagctggtacaggaacatgcaaagaccaacatctcttcgtatgtgagactctgtgaagtagtcgaccacgttttcccgttgctgaaaagaagccattcttcagactttccctgttcggataccttcagtaacttcaccttttggagagagccactgccaccttttgaaaaccaggacattcattctgcctcagcgtaaaatgtcccaagcagcctcttgccagcagtgcagagcctggttgtcacccattaaaggataggtctccccggagtgcacagctccacctgggagcctggcgcgtcatcattggcctgacagcagagagaattgagaagcatttctcccctgccccaccccggggctgacatttctaagcaagataggaagggagcactttctaggctaggagttgggtgcatttgtaccgtgaaaagcattcctcagttgtggcttaatgccagttacgacgctgcctttccggcctgctccagcaagtagctactggttcacgtgcagtttggggctgtgaaacctaggcagaaggcggctgtctgagggctgtccccgcctaggacagggtcaatcgaggaatgccagatgtgcacggtttttggcaaagtagggggcacatttccattatagcaatgttagtgccaccaccttctgaacacagtggggagggctgtgaaggctcatgtgacctggatctgaggtctctgatagaaatctggacgccaccgggtccaggcctggcctcagacttggccttgtggatgggccccttacagtatttgctgactagtctcatttttaggtgataaatttttctttaattcctttggttaaagatagtctatttcattggcatatctccccccagtttttgtggctcaaggctggaatatttatgccttaatatatctatggcagacatttaagaatgcgctttatctagctcatggtaactttgcaacgccttagattaaaatgacagtaaatattactaaggcagtattttgaatgagtttgacactgccggcttccttccatccagcgaggtggtgctgacagtgtggacttgagcacacttatgccaaatgataatgatactgacttctgttgggagctctccaaagaaactggttggttttaagaaaatagtttcaagaagttcaactatattcttttagatattatgtattgttttactctgattaggttactgtgataggcatttattcatattctttctataccactgtcattaatatattaaaaagatgtatgtgttagactatcgaaagggccttattctctctttctcatagactgaccttcttttggaatttctgagtcatttattttccttagctttttccactcaaattaagggcaagcgaaaaagtaataatttggcattctttaagcctacagaatgtgattctttcacttgtttattacactggctcgtggacagaacaatttgaaaagtgaaagaattattttggtaaaagattttgctttacttttcgaagcattatttttttaaagagtgttttactccaacgattgaaacattttcctatttaaatttcattgttagaatcacaggaggcaaaaaatggaacggttgaatgaaattttactctttctgtgaaagaaaatccacagagttgttgcctccgttgtagttggtgggccccgttagcattggatgcctttgccaaatggttcatgtggacacacaaaggcaaacagatctgccatcgatcgcagatttctgtagaaacacggatgtgcatgtgcagattcccttttgcaggtattaaaaataattaaaaatagtcctgcctgaggttgcagtgagccgagcttgcactactgcactccagcctgggtgacagagtaagactccatgtcaaaaaaaaaaaaaaaaaaaaaaaagtcctgccttaactaactcctctgcgcttgttcactagtaacctaaagaggctatattcattctttatgcaatgagggtatttttgagtgaattttaactgctctgaactaagtataagctcatgggcctgcaaaggttcagacggtttctcctttgcacccaggaggaactttggctgcgagaatggggggatgtatccctcatgcagttggcatccaggcagccctctgcagcagcacaccctgcaggcggagttttcagaggatgcaattttggatcccgaattttgatgtaccttaaacttccacatcactgcaccctgaaacagagcatgctttccagaaagtcacactctcagatctgtgtcaagttcaatgtgagccctggcaaggctggcatattaacacctgccttctggcttctgaaagtgagatttgtatatgggctgcactcacgcatatacgagttggtttatctttgtgtacatgactataacccagtgatgctgaggtcatgtgctggaatgctgtatttggaccacacatttcaaagttgccctatggaaatgaatcctacttagtgacaagtcatcaaatgtttgtcacatgtgatgaagacaaatatgtatacctggcatagagaaaaatatatacctggtacattggagaaaaataattacactttcaaagagaattccctttgcaattttatgtttggatcaccactgtaagcacactttatttgcatttgatctgtatttgtatatgctgatgcaatgataaaaatcactgtaatacttcattgtgttgtactggatgcaaagctagaaaatattgcaataaatgagaccgatgaaagacttctctgaaaaaaaaa

SEQ ID NO: 6270 - DNA, 2101 bp, Homo Sapiens
  NM_145715
gattcacgtagaccttgtcaggaaattggtcactatccatctaggccctagaagtgagaggaggaatcttacgaactcattttctagttgctttgtattcaaatcttagttgttaattatcttgttctagtaatcacctaaaatattagacacttaaaatgttggggaaacgtaagcgtgtggtgttgacaattaaggacaagcttgacattattaagaaacttgaggaaggcatctctttcaaaaaactttccgtggtgtacggaattggtgaatccacagttcgtgatattaaaaagaacaaagaaaggattataaactatgcaaacagttcagatcctaccagtggagtatccaaacgtaaatctatgaagtcatcaacatacgaggagcttgatagagttatgatagagtggtttaaccaacagaaaacagatgggattccagtgtccggaacgatttgtgcaaaacaagccaagttcttttttgatgctttgggaatggaaggtgattttaatgcatcgtcaggctggctaactcgatttaagcagcgccatggtattccaaaggctgctggtaaaggaacaaaattaaaaggagatgaaactgctgccagagaattttgtggtagctttcaggaatttgttgaaaaagagaatctacaaccagagcaaatttatggtgctgatcaaactggattgttttggaaatgtctaccatcaaggacattaactcttgaaactgaccaaagtacttctgggtgtaggtcaagcagagagagaatcatcattatgtgttgcgcaaatgccacaggtttacacaaacttaatctttgtgttgtggggaaggccaaaaagccccgagcattcaaaggcactgacctttcaaaccttcctgtgacatattacagtcaaaaaggtgcatggatagaacagtctgttttcagacagtggtttgaaaagtactttgtgccacaggtacagaagcatttgaaatccaagggacttttagaaaaagcagtgcttcttttagatttccccccagcacgtccaaatgaagaaatgttgagttcagatgatggcagaataattgtgaagtatttgccaccaaatgtcacaagtctgattcaaccaatgagccagggagttctagccactgtaaaaagatactatcgagcaggacttctccagaaatacatggatgaaggaaatgacccaaaaatattttggaagaacttgacagtgttggatgcaatttatgaagtgtcaagagcttggaacatggtaaaatcaagtaccataaccaaagcatggaaaaaacttttccctggcaatgaagagaattcaggtatgaacattgatgaaggagccattttagcagctaatttagcaacagttttacagaacacagaagaatgtgaacatgttgacattgagaatattgatcagtggttcgactctcggagcagtgactcaagctgtcaggtgctgactgacagtgaaagtgctgaggaccagaccaaggctgctgagcaaaagccttccagtaagagtagaaaaacagaactgaatccagagaagcatattagccataaagcggcacttgaatggactgaaaatttactggattatcttgaacaacaagatgacatgcttctgtctgataaattggtattaaggaggcttcggaccataataagaaaaaaacagaagatccaaaataacaaaaatcattaataaggctcttaagtatttcagtgtatctgcatctttgtgactatctgcagtgaaactttgcttgtttgaagtcctgtggattccaaagccaaatacattttataaatgattttggaattagatgtcagtttggattacttaaattacaactctttaatgttgactctagtcattgggcattgacgtgtaacttgtctttctactgtttctaatatctattaattagatcataaggtacctgaggccagggatcttgtgtctgttgtgcctgaatttggcgtgtctaataaaggcccatgcacactataggcactcaataaaacttacatttttatgatttttctttgaaaaaaaaaaaaaaaaaa

SEQ ID NO: 6271 - DNA, 935 bp, Homo Sapiens
  NM_145729
agaaagtcgacgggcgtggcgggggaggggacgctgagggcccatgtgctgaaaatccgaagtgccgcggaaagtggaggtgagggccgcccgccctagaggtgcccgtccgagaggcagagctgacaaggaaggtttcgagcgttttgctggcaaagggatttcttacaacctccaggcatgcgtctttctgccctgctggccttggcatccaaggtcactctgcccccccattaccgctatgggatgagccccccaggctctgttgcagacaagaggaagaaccccccatggatcaggcggcgcccagtggttgtggaacccatctctgatgaagactggtatctgttctgtggggacacggtggagatcctagaaggcaaggatgccgggaagcagggcaaagtggttcaagttatccggcagcgaaactgggtggtcgtgggagggctgaacacacattaccgctacattggcaagaccatggattaccggggaaccatgatccctagtgaagcccccttgctccaccgccaggtcaaacttgtggatcctatggacaggaaacccactgagatcgagtggagatttactgaagcaggagagcgggtacgagtctccacacgatcagggagaattatccctaaacccgaatttcccagagctgatggcatcgtccctgaaacgtggattgatggccccaaagacacatcagtggaagatgctttagaaagaacctatgtgccctgtctaaagacactgcaggaggaggtgatggaggccatggggatcaaggagacccggaaatacaagaaggtctattggtattgagcctggggcagagcagctcctccccaacttctgtcccagccttgaaggctgaggcacttctttttcagatgccaataaagagcactttatgagtccaaaaaaaa

SEQ ID NO: 6272 - DNA, 4164 bp, Homo Sapiens
  NM_145730
cccgcgcgcgggcagctcacttccgcccggcaggtgacagccgcggggctccgagccgccggcagcccggacgcaccgggagagcgagaggtggaggccgcggacattttggtgccaagccgaaccgagccggggcgccgggagctattgggacctgcggaagcctggctacagataagggaccaaaatgactgactcaaaatatttcaccacgaccaagaaaggggagatcttcgagctgaaggcagagctcaacagtgacaagaaggagaagaagaaggaggcagtgaagaaagtgattgcatcgatgaccgtgggcaaagatgtcagtgccctcttccccgatgtggtcaactgcatgcagacggacaacctggagctgaagaagctagtatacctctacttgatgaattacgccaagagtcagcctgacatggccattatggccgtcaacacctttgtgaaggactgtgaggaccccaaccccctcatccgagccctggcagtgcggaccatgggctgcatccgcgttgacaagatcacagagtacctgtgcgagccactccggaagtgcctgaaggacgaggatccatatgtgcgcaagacagcagctgtgtgcgtggccaagctccacgacatcaacgcccagctggtggaggaccagggcttcctggacacccttaaagacctcatctccgactctaaccccatggtggtggccaatgcagtggcagcgctctcagaaattgccgagtctcaccccagcagcaacctgctcgatctgaacccacagtccatcaacaagctgctgacagccctcaatgagtgcaccgagtggggccagatcttcatcctggactgcctcgccaactatatgcccaaggacgaccgcgaggcccagagcatctgtgagcgggtcacccccaggctctcccatgccaactccgctgtggtgctctctgctgtgaaggtgctgatgaagttcatggagatgttgtctaaggacttggactactacggcacactgctcaagaagctggccccacccctggtcacactgctgtcagccgagccagagctgcagtatgtggccctgcgcaacatcaatctcatcgtgcagaaaaggcctgagatcctgaagcatgagatgaaggtgttcttcgtgaagtacaacgaccctatctacgtgaagctggagaagctggacatcatgatccgcctggcctctcaggccaacatcgcccaggtgttggcagagctgaaagagtacgcaacagaagtggatgtggactttgtacggaaggctgtgcgtgctattggccgctgcgccatcaaggtggagcaatctgcggagcgctgtgtgagcacgctgctcgacctcatccagaccaaggtcaactatgtggtccaggaggccatcgtggtcatcaaggacatcttccgcaagtaccccaacaagtatgagagtgtgattgccacactgtgtgagaatctggactccctggatgagcctgaggcccgggctgccatgatctggattgtgggcgagtacgcggaacggatcgacaacgcagatgagctgctggagagcttcctcgagggcttccatgacgagagcacacaggtccagctgcagctgctgacagccattgtgaaactctttctaaagaagccaacagagacccaggagctggtgcagcaggtcctcagtttggccactcaggactcagataacccagacctgcgggaccgtggctacatctactggcgcctgctgtccacggacccggtggcagccaaggaggtggtgttggctgagaagccactcatctctgaagagacggacctcatcgagcccacactgttagacgagcttatctgctacatcggcacgctggcttccgtctaccataagcctcccagtgcctttgtggaggggggccggggcgtcgtgcacaagagcctgccacctcgcacggcctcgagtgagagcgcagagagccctgagacagcccctactggagcacctcctggggagcagccagatgtcatccccgcccagggcgacctgctgggtgacctcctcaacctggacctcggccccccagtgagcggcccacccctggccacctcctcggtgcagatgggagctgtggaccttcttggcggtggccttgacagcctgattgggggcaccaacttcgtggcacctccaacagcagcagtaccagccaatcttggagcacccatcggcagtggcctgagtgacctctttgacctgaccagtggcgtgggcaccctgtcaggatcatatgtggcccccaaagcagtctggctcccagccatgaaggctaaggggctggagatctcaggcaccttcacccgccaggtgggctccatctccatggacctgcagctgaccaacaaggccttgcaggtcatgaccgactttgccatccagttcaaccgcaacagctttggcctggcccccgccgcccccctccaggtccacgcgccactcagccccaaccagacagtggagatctccctgcctctcagcacggtgggctcggtcatgaagatggagcctctgaacaacctccaggtggccgtgaagaacaacatcgatgtcttctacttcagcaccttgtacccactgcacatcctctttgtggaggacgggaagatggaccggcagatgttcctggccacatggaaggatattcccaatgagaatgaggcccagttccagatcagagactgccccctcaatgcagaggctgcgagcagcaagctgcagagcagcaacatcttcactgtcgccaagaggaacgtggagggccaggacatgctctaccagtccctgaagctgaccaacggcatctgggtgctggcggagctgcggatccagccgggcaaccccagctgcacgctgtccctgaagtgtcgagcaccagaggtgtcccagcacgtgtaccaggcctacgagaccatcctcaagaactgagaccccggccagcgcccaccccagccttctgcccgccccatcgaggaggcccctcgggggcagcacatcttcctcctcgcaggagggaccaggcggggctccaggccactcagtgggctccctggtcctgatggcagaacccacccgatccctggggtagggcaccaccccctcctggggtgagagcgcagtgcactcccgtgctctgggacacccctgctcctgtggctgtgatgtggggttaagtgaggtggggaccaaaggaaacagagccagagcagccacagaagctgtgcctgaagggtgagtgtggagcttgcccctccggctcacagccccggcagcccctggctccttggtctctccggttggtgttaaagggccctccactgccacctctcatgggatggaccctgccaacctggcctgggtgtgcagggaggggttccccttggtaccaggagagctgctcacttagggcctggggctcaaggagctgtaggtgccggcagaggggcagagctaggctgggaggagcccagggcctgcaccacccacttgcaaccaccaggctggtgccctgcagctgtgccagttgggccacagcctcccgagtgctgacccacatggtcaagaccaggcagaagctcccagagcccctgtctcgggctccccaccgactggcagctgcactatccccaactccccacttctgccccaagggtggtcactgcctgtgatacattcctcagtgtcgcctctgagcccaggcctcctgccacaaagactgggccgagagatggggctgggtaagcgggtgcgcctcctgtttgggtttcttcggggtttctctgtagtgtctgctgccctcctcctggcctcccaggtttcagttgtgtctgacagagcattaggttttcctgttactgctgtgtaataataaagaaagattcggcttttggcaatcacggacacttttttcccctccaccgaatgtcaggattgaaagctgcctccgagtggttggggatggttttctgaccctacggtaactagatctaatatatatcatcagaaaatatatattgtatgtttactcttattttcagaaagagaaaatgaataaaaatgatgacatcaaaaaaaaaaaaaaaaaa

SEQ ID NO: 6273 - DNA, 1341 bp, Homo Sapiens
  NM_145731
cgcgcacgcgcacgggccggcggcgcgcgccgagcggggggcaccgcgcgggtgcagccacgatggaagggggtgcgtacggagcgggcaaagccgggggcgccttcgacccctacaccctggtccggcagccgcacaccatcctgcgcgtcgtgtcttggctgttctccatagtggtgttcggctccatcgtgaacgagggctacctcaacagcgcctccgagggggaggagttctgcatctacaaccgcaaccccaacgcctgcagctatggcgtggccgtgggcgtgctcgccttcctcacctgcctgctgtacctggccctggacgtgtacttcccgcagatcagcagcgtcaaggaccgcaagaaagccgtcctgtccgacatcggtgtctcggccttctgggctttcctctggttcgtgggattctgctacctggccaaccagtggcaggtctccaagcccaaggacaacccactgaacgaagggacggacgcagcccgggccgccatcgccttctcctttttctccatcttcacctggagcctgaccgcagccctggccgtgcggagattcaaggacctaagcttccaggaggagtacagcacactgttccctgcctcggcacagccgtaggcctccccggcttgcagaggccggcagccctgtatcacccctggcagtgaggtggcaggagcagcctagtgccagaaatgtccaagatgccagggcatgcagggcagtggaaggctggcttgaggaaccaattcaggttctccactgactcattcattccttcaccgcctccttcattgattcttcatgcgttcattcattcagtaaacatttattgagcagctgttttgtgcctagtgatgaattaggtggggtccttggctccaggagcccacaggctggggaggagaaaacaaacacatcaatatctcttccaaatggacagccgtggacagttaccaggtaggtagcggccccatacatgggctgcctagaggcgttcatggtccccattgctgagctgtgggtgcagagcaatagcctctcccttcacagcggtgtgaagagtgacctcactgtccttagggttagcatcctggccgaggatgtcacagggctcctggtctggctctgtcctcatgtgctatgtgaccctgacaaacccgtgcacctctctcagcctcagtccacttacctgaactgaggggtgataatggaccaacctctcaaggctgttgtgccaatgaaacaaaggccagcccagggcttagcacaagcatgctcaataaatgtaagctcttttgttcattcattcattcaaaaa

SEQ ID NO: 6274 - DNA, 3309 bp, Homo Sapiens
  NM_145754
cgccgagtctgggcgcggggacgcggggcggcgcgaagcggggccctctgccgccccgcgctcccatgtacgccttttactcgttgctcatctacatcttctacagcctcttccgcagggatggtggcgccgcggcggccgcggagcccggggaccccgcccagagagcccgcaagccccggggtcgccggcgcccagacctgcccgcgccagagctgtggaccgagctgaccggcctggccgccagctccgagcctgaggatgggtcggaaggcgcagccgagggtcgcgcggccgcggtgtccctggaagaggccctactgcgcctcgccgagttcctctccgtccagctgggggcggaagagagctgcgggggcccggcggacctgggccagtctggcgaggtcccctcactgttgacagtgaccagtcagctcttggcccttctggcatggcttcgaagccccagggggaggcaggccctgctccaggggactcagccagcccctcgggtccggcccccctctccagatggatccacatcccaagaagaaagcccttcccacttcaccgcagtcccaggcgagccactgggggatgagacccagggacagcagcccctccagttggaggaggatcagagggcgtggcagcggctggagcagctcatcctgggacagctggaggagctgaagcagcagctggaacagcaggaggaggagttgggtcgactgcgcctgggcgtgggggcgacggactcagagaaaagggttcagcatctgactctggagaacgaggccctgaagcagagcctgagtctcatgcgggacctcctgctgcactggggccccgggccccccatcagggctccgcaggaggaggcggaggcattgctagagctccagggccggcttcaggaggcccaagacaccacagaagccctccgagcccagctgggggtgcaggaggtgcagctgcagggccttcaaggggccctccagcagctccagcaggagacggagcagaactgcaggcgtgagctacagcagatgcatgggcagctggcaggacttcgggcacggatggccagcctgcgtcagggctgcggggacctccgaggtttggtcagcacctttacccagagctgtcagggttcgctgagtgaggcccggggccaggtgtcctgggccttgggggcactgtcatctggagggcctggcactcagctccctgaggggcagcaagggcccccagccggatgcccagggcggctgccagaactcaagggaaatatccgtgtgctgtgtcggctgaggccagggacatcttctagccttgtgagtgtggagcctggcccagggggcaccgtcaccacctgctaccgggggcgccatcgtcgattccgcctagactgggtcttccctccagacgccagccaggaggaggtcttcagagagctggaacctgcggtgctgtcctgcctccgaggctacagcgtctgcatcttcacctatggccagacaggcaccgggaagacctacagcatggagggccctcctgaggaccccggcatagttcctagggcgctgcagtcgctgttccgggagatgggggccggccggcagcaccgggtgacactcagcatggtggagatctacaatgaggctgtcagggacctccttgctccagggcctcccgagcgcctggccgtgaggcagggcccagaaggccagggcgggatccaggtggctggcctcacccactgggacgtgcccaacctggagacattgcaccagatgctgaaactggggaggagcaaccgggccaccgccgccaccgccatgaaccagcgcagctcccgctcgcatgccctggtcacgctgacgctgcgcgcggcgtctccaccgcgcgctccaggcaccgcaggcacgctgcacctggtggacctggcgggatccgaacgcgcacggaaggcaggggcggccggcccgccgcggggagacccagacggcgcccggcgcctgcgggaggcccagaccataaaccgctcgctgctggcgctaggaggcgtgatggccgcactgcgggcccaccggccgcacgtgcccttccgcgactcgcagctcacgcgactgctgcagccggcgctgggcccaggcaccaccgcggtgctgctgctgcaggtgggcgccggggcggggcaggtgtgtgcgtgccggtcgccgcccacccgggcccgcccacccgcgcctcttgcccgcagatctccacgcggccggaggatctcggggagacagtctgctccctcaagttcgccgaccgagtgggtcaagtggagctggggccagcccggcgccgcagggtcccgcgctcctccgggacgccttcttccctcagcaccgacactccgctcaccgggaccccctgcacccctacgccgtcccctggcagtcctccatgccccagtcccgacaacggctcgggctcggctctcgcgcccgcagagggcctgcccctctagtcctgggtcgcggccctgcccatggggtctcaggccaggtctctgctggcagaggcggtagtaaagtccctgtaccccgtctcccagggcacaagctccctagcctctttggatccattgcccctgagctcccagagtcacccctccacctccgcagccagtgaagtgtgttgtgcctgctgaagtgatcaccccccgcccccagccctgcatcaggccacaggtcttggctttctccttatcaccatttgctgttatcacggcacacagcagggaatcccaggcccccccgccaagtggttacccaagtcaccactcctgacccaaaaatcaggcatggcattaaaacgttgcaaattcctttactgttatcccccccaccaccaggaccatgtagggtgcagtctttactccctaacccgtttcccgaaaaaggtgctacctcctttccagacagatgagagagggcaggacttcaggctggatccaccactgggctctccctcccccagcctggagcacgggaggggaggtgacggctggtgactgatggatgggtagtgggctgagaagaggggactaggaagggctattccaggctcagccctgctcctgcagctttgccgctgagtgtaggaaaaacaggcatgacagaccagggtgagggttgtgcccagctgggccacggccatgcgtggggtggcccaataaacaccgtggactcccaaaaaaaaaaaaaaaaaaaaaaaaaaaaaaaaaaaaaaaaaaaaaaaaaaaaaaaaaaaaaa

SEQ ID NO: 6275 - DNA, 4269 bp, Homo Sapiens
  NM_145755
gttttgttcctcccactccagacactggacgctcctagcaaccggctagcagctcggtttccaaggactgtaacgccttcaaccgcccgccgcgatagagtgcccacgaccctgcctcgggaatcccgctctgcaccgccccaccagacccggactcggagccgcgagcggcccgagatgagcagcaatgactcctcccttatggctgggatcatttactatagccaggaaaagtacttccaccatgtgcagcaggctgcagctgtgggcctggaaaaattcagcaatgaccctgtgttgaagttctttaaagcctatggagtcctcaaagaagagcacatccaggatgccatcagtgacctggaaagcatcaggcatcacccagacgtgtccctgtgctccaccatggccctcatttatgctcacaaaagatgtgaaatcattgaccgagaagcaattcaggagcttgagtacagcctgaaggaaatacgcaagacagtcagtgggactgcactgtactatgctggccttttcctctggctcataggccgccatgacaaggccaaagagtacattgaccgcatgctgaagatttctagaggcttcagagaggcctatgtgctcagaggctgggtggacctgacctcagacaagccccacactgcgaagaaagccattgagtacctggaacaaggaattcaggacaccaaagatgtgctggggctgatgggaaaggcaatgtacttcatgatgcagcagaactactcagaggccctggaggtggtgaaccagatcactgtgacttcagggagcttcctgccagccctcgtcctgaagatgcagctgttcttagctcggcaggactgggagcagacagtagaaatgggacacagaatcctagaaaaagatgagagcaatattgatgcctgccaaattctaaccgtgcatgagcttgcaagagaaggaaacatgaccacagtaagttctttgaagactcagaaggctaccaatcacgttagaaatctgattaaggcactagagacaagggaacccgaaaatccaagcctccatcttaaaaaaattattgtggttagccgactgtgtgggagtcaccaggtgattctagggctagtgtgtagtttcatcgagcgcaccttcatggccaccccctcgtatgtccatgtggccacagaactgggctatctcttcatcctgaagaaccaagtgaaagaggccttgctgtggtattcagaagccatgaaactggacaaggatggcatggctggtttgacagggatcatcttgtgtcatatcttagaaggccacctggaggaagctgagtaccggctggaattcctgaaggaggtgcagaagtcccttgggaagtctgaggtgctaattttcctccaagccctcctgatgtccaggaagcacaagggggaggaagagaccacagcgctcctgaaggaggcagtggagcttcacttctccagcatgcaaggcatccctcttggctctgagtactttgaaaagctggacccgtacttcctggtctgcattgctaaggagtacttgctcttctgccccaagcagcccaggttaccaggccagatcgtgtctccacttcttaaacaagtcgccgtgatcttgaatcctgtagtcaaagcagcaccagctctgatcgaccccctgtatttgatggctcaggtcaggtattactcagagctagagaatgcccagagcatcctgcagcgttgcctggagctggaccccgcctccgtggatgcccatctcctcatgtgtcagatctacttggctcagggcaactttggcatgtgcttccactgcttagagctgggtgtcagccacaacttccaggtccgagatcaccccctctaccacctcatcaaggccagggccctcaacaaggctggagactatccagaggccataaagacgctgaaaatggtcatcaaattgccagctctgaagaaggaagaaggcagaaagttcctcaggccctctgtgcagcctagccagcgggcatccatcttattggaactggtggaggccctccggctgaatggggagctacatgaggccaccaaggtcatgcaggacaccatcaatgagttcggtggcacaccagaagagaaccgcatcaccattgccaacgtggacttggtcctgagcaagggcaatgtggacgtggcgctgaacatgctaaggaacatcttgcccaagcagtcctgctatatggaagccagagagaagatggccaacatctacctgcagaccctcagagacaggcgcctctacatcagatgctaccgtgagctctgtgaacatctgcctggcccccacaccagcctgctactgggcgatgccttaatgagcattctggagcccgagaaggccctggaggtctatgatgaggcctatagacagaacccacatgacgcctccctggccagcagaattgggcacgcttatgtgaaggcccaccagtatactgaggcaattgagtattatgaggctgcccagaagattaatggacaggactttctgtgctgcgatctgggcaaactgctcctgaagttaaagaaggtcaataaagcagaaaaagttttgaagcaggcactggaacatgacattgtccaagacatcccatccatgatgaatgatgttaagtgcctgcttttgctggcaaaggtttacaagagccataaaaaagaagctgtgatagaaactttgaacaaggccttggacctccagtctcggatactgaagcgagttccactggagcaaccagaaatgattccctcccagaagcaactggcagcctctatctgcatccaatttgcagagcactacctggcagagaaagagtatgacaaggcggtacagtcttataaggatgtcttctcctacttgccaactgacaataaggtgatgctggagctggcgcagctctacctgctccaggggcacctggacctgtgtgagcagcactgtgccatcctcctgcagactgagcagaaccatgagaccgcttctgtgttgatggctgacctgatgtttagaaaacagaaacatgaagcggccatcaatctttaccaccaagtcttggagaaagcgccagacaattttttggtattgcataaattaatcgatctgctaagaagaagtggaaaacttgaagacattcctgccttctttgaattggccaagaaggtgtctagccgggtgcctttggaaccagggttcaattactgcagaggtatctactgctggcacatagggcagcccaacgaagccttaaagttcctgaacaaggcacgcaaggacagcacttggggccagagcgccatctaccacatggtgcagatctgtctgaatccagacaacgaggttgtgggcggagaggcttttgagaaccagggagctgagagcaactacatggagaagaaggagttggagcagcagggtgtgagcaccgccgagaaactgctgcgtgagttttacccacattcagactccagccagacccagctgcggctgctgcagggcctctgccggctggccaccagggagaaggctaacatggaggctgcgctgggcagcttcatccagatagcgcaggctgagaaggacagcgtccctgccctgctggccttggcacaagcctacgtgttcctgaagcagatccccaaggcgcgtatgcagttgaagcgcctggccaagaccccctgggtgctgagtgaggctgaggacctggagaagagctggctcctgctggctgacatttactgccagggcagcaagttcgacctcgccttagaactgctgcggcgctgtgtgcaatacaacaagtcctgctacaaggcctatgagtacatgggcttcatcatggagaaggagcagtcctacaaggatgcagtcaccaactacaaactggcctggaagtacagtcatcacgccaaccctgccattggcttcaaacttgctttcaactacctgaaggacaagaaatttgtggaggccattgaaatctgcaacgatgtcctcagggagcaccccgactaccccaagatcagggaggaaattttggaaaaggcccgaaggtccctgaggccctagctggggtcaaggggcctggaccagtagaagccatcaacctactgaagttgtgtggagggatggaaagtgggtcagtggagaagggattcagaaaatgacacattcttccccatttaaaaaaaaaaaaaa

SEQ ID NO: 6276 - DNA, 987 bp, Homo Sapiens
  NM_145791
ggcagatggaagacttgggggggtctctgccagctggaagtgcttggctccacttagcagctaaacttagcttttcaatcgatcgcttttgaaagggaattgtatttctgtccccgtgcggattccagaccaaaattgaaaaaatggttgacctcacccaggtaatggatgatgaagtattcatggcttttgcatcctatgcaacaattattctttcaaaaatgatgcttatgagtactgcaactgcattctatagattgacaagaaaggtttttgccaatccagaagactgtgtagcatttggcaaaggagaaaatgccaagaagtatcttcgaacagatgacagagtagaacgtgtacgcagagcccacctgaatgaccttgaaaatattattccatttcttggaattggcctcctgtattccttgagtggtcccgacccctctacagccatcctgcacttcagactatttgtcggagcacggatctaccacaccattgcatatttgacaccccttccccagccaaatagagctttgagtttttttgttggatatggagttactctttccatggcttacaggttgctgaaaagtaaattgtacctgtaaagaaaatcatacaactcagcatccagttggctttttaagaattctgtacttccaatttataatgaatactttcttagattttaggtaggaggggagcagaggaattatgaactggggtaaacccattttgaatattagcattgccaatatcctgtattcttgttttacatttggattagaaatttaacatagtaattcttaagtcttttgtctgatttttaaagtactttcttataaatttggatcatgttatgatttgtaacattcacacaacacctcacttttgaatctataaaagaattgcacgtatgagaaacctatatttcaatactgctgaaacagacatgaaataaagaatttaaagaatgaaaaaaaa

SEQ ID NO: 6277 - DNA, 909 bp, Homo Sapiens
  NM_145792
tcgtgacaaagcaaattgtctggtatcatgaatttggaacaccattccagaccaaaattgaaaaaatggttgacctcacccaggtaatggatgatgaagtattcatggcttttgcatcctatgcaacaattattctttcaaaaatgatgcttatgagtactgcaactgcattctatagattgacaagaaaggtttttgccaatccagaagactgtgtagcatttggcaaaggagaaaatgccaagaagtatcttcgaacagatgacagagtagaacgtgtacgcagagcccacctgaatgaccttgaaaatattattccatttcttggaattggcctcctgtattccttgagtggtcccgacccctctacagccatcctgcacttcagactatttgtcggagcacggatctaccacaccattgcatatttgacaccccttccccagccaaatagagctttgagtttttttgttggatatggagttactctttccatggcttacaggttgctgaaaagtaaattgtacctgtaaagaaaatcatacaactcagcatccagttggctttttaagaattctgtacttccaatttataatgaatactttcttagattttaggtaggaggggagcagaggaattatgaactggggtaaacccattttgaatattagcattgccaatatcctgtattcttgttttacatttggattagaaatttaacatagtaattcttaagtcttttgtctgatttttaaagtactttcttataaatttggatcatgttatgatttgtaacattcacacaacacctcacttttgaatctataaaagaattgcacgtatgagaaacctatatttcaatactgctgaaacagacatgaaataaagaatttaaagaatgaaaaaaaa

SEQ ID NO: 6278 - DNA, 3674 bp, Homo Sapiens
  NM_145798
gcagcagctgctgccactgctcagcgcggtgaggagggagccggtgactcggagacggtgactcagaggcagagcggcgcaagggccaaggagtactggcgtccatggaccctggggaccccgtcaggagcaggtgacatccttccccttccaccctgctccctgctctacatccccagcagggagtggcctctcccttctccatggacttccaagagagggacccgcccttcctgcctgagagcgctcagtcctcaaagcccagcagtgctcagcaggcctctgagctgtgggaggtggtggaggagcctcgggtcaggctggggacagagggtgtcatgcctgagaggcaggaaggtcacctgctcaagaagaggaagtggcctctgaagggctggcacaagagatactttgtgctcgaggacgggatccttcattatgcaacaacccggcaagacatcaccaaggggaagctccatggctccatcgatgtccggctgtcggtcatgtccatcaacaaaaaggcccagcgcattgaccttgacactgaagacaacatctaccacctcaagatcaaatcccaggacctattccagagctgggtggcgcagctgcgtgcccaccgcctagcccaccgcctggacatgccccgtggctcactgcccagtactgctcaccggaaggttcctggtgcccagcttccaacagcagctactgcctcagccctacctgggcttggaccgcgggagaaagtgtcttcctggctgagggacagtgatgggctggaccgctgctctcatgagctctctgagtgtcaggggaagctccaggaactacacaggctcctccagagcctggagtccctgcaccgaatcccctcagcccctgttatccccacacaccaggcctcagtgacaaccgaaagacccaagaaggggaaacggacaagccgcatgtggtgcacccagagctttgccaaggatgacaccattggacgggttggtcgtctccatggctctgttcccaacctgtctcgctacctggagtctcgggactcctcgggcacccgtgggctgccacccacagactatgcccacctgcagcgcagcttctgggccctggcccagaaggtgcacagctccctcagcagcgtcctggccgccctcaccatggaacgggaccaactgagggacatgcaccagggctcagagttgtcaagaatgggggtctctgaggcctccactggccagaggcgcctccactcactgtccacctcctccgacaccacggcggactctttcagctccctcaaccctgaggagcaagaagctctgtacatgaaggggcgcgagctcaccccccagctatcgcagaccagcatcctgtcccttgctgattcccacacggagttcttcgatgcctgcgaggttctcctctccgccagctcttctgagaatgagggctcagaggaggaggagtcctgtaccagtgaaatcaccaccagcctgtctgaggagatgctggacctcaggggagctgagcgctgtcagaaaggggggtgtgttccagggagacccatggggccaccccgccgtcgctgcctgccggcggccagcgggcctggggctgacgtgagcctgtggaacattctgcgcaacaacatcggcaaagacctgtccaaggtgtcaatgcctgtgcagctcaacgagccgctcaacactctgcagcggctctgcgaggagctggagtacagcagcctcctggaccaggccagccgcatcgccgacccctgcgagcgcatggtgtacatcgcagcctttgctgtctcggcctactcctccacataccaccgagccggctgcaagcccttcaaccctgtcctgggggagacctacgagtgtgagcggcctgaccgaggcttccgcttcatcagtgagcaggtctcccaccacccccctatctcggcctgccatgcagagtctgagaacttcgccttctggcaagatatgaagtggaagaacaagttctggggcaaatccctggagattgtgcctgtgggaacagtcaacgtcagcctgcccaggtttggggaccactttgagtggaacaaggtgacatcctgcattcacaatgtcctgagtggtcagcgctggatcgagcactatggggaggtgctcatccgaaacacacaggacagctcctgccactgcaagatcaccttctgcaaggccaagtactggagttccaatgtccacgaggtgcagggcgctgtgctcagtcggagtggccgtgtcctccaccgactctttgggaagtggcacgaggggctgtaccggggacccacgccaggtggccagtgcatctggaaacccaactcaatgccccccgaccatgagcgaaacttcggcttcacccagtttgccttggagctgaatgagctgacagcagagctgaaacggtcgctgccttccaccgacacgagactccggccagaccagaggtacctggaggaggggaacatacaggccgctgaggcccagaagagaaggatcgagcagctgcagcgagacaggcgcaaagtcatggaggaaaacaacatcgtacaccaggctcgcttcttcaggcggcagacggatagcagcgggaaagagtggtgggtgaccaacaatacctactggaggctgcgggccgagccaggctatgggaacatggatggggccgtgctctggtagccctggccccgggggcaggaggctctggttcctcactcctcctgcctccaccccctaccatggacacatgggtgaggccgggctccccgcctcactgcccttgagaccaaaggggcagccctggccctccctcccctctgctggccagagggtctgcatctcagcccacccccaaccccaccgtttggggtgagaagcagaatctgtgcttccccagtctccttgccccagacaaccagcatgtaagacccttcccgcttcaccattccgattcctgtcccctttggggtacttgggggagactctggctcccaggatctgttccctatttcagtgccttcctaggacacaggggactccttgacgctccccaggctttctgtgcccaggcctctgtccccagcggtgaggttgcagtgagtgaaggagaggaggtgatctgttctccctccccttctgcccatctccagcatcttcttccccttccctggccctgcagggccttctccagctccctttggttagtccctggccatccctcctgtcctggatcccttctccctaactgcaaaatgcctgcagcttccagctccttcgtccctgatcctcaagcggttccctcccgtctcagctcagcggatcccccagagtggaggaggcctctccatgaggaggggagcagcccaaggcacctgtcctctgacccaccggcagcgagtgcgcaggtgtgagtgtaagttcatgtaggagagtgtatgcgtgtgcgcctgtgccctgcttgcaggcaagcagggctccctcatgtagccccgccttccccctgctgggggtccaccacatcgctgctctttctcacagtctgcctctgatgagggcgaattgctatgacattccaagctccaataaagactgtcccagactttgaaaaaaaaaaaaaaaaaa

SEQ ID NO: 6279 - DNA, 4716 bp, Homo Sapiens
  NM_145799
gaagaactggaactggtctggccatagggggaagcggcgcgttaaatccgccccctctccataccctactttcaaggggtgggcggtagaggggaggttggggttggagcagcggcgagggggcccctcccttgcacctccccccaccggacttggtcgcgcccgaagtgtaacactttctctttgtcggaggagctcctctgtttcctgtgcagtagctcccgttgcggcggcacccgtggcagccctggcggacgcaggagcgatggcagcgaccgatatagctcgccaggtgggtgaaggttgccgaactgtccccctggctggacatgtggggtttgacagcttgcctgaccagctggtgaataagtccgtcagccagggcttctgcttcaacatcctgtgcgtgggagagacaggtttgggcaagtccaccctcatggacaccctgttcaacaccaaattcgaaggggagccagccacccacacacagccgggtgtccagctccagtctaatacctatgacctccaagagagcaacgtgaggctaaagctcacgatcgttagcacagttggctttggggaccagatcaacaaagaggacagctacaagcctatcgtggaattcatcgatgcacaattcgaggcctacctgcaggaagagctaaagatccgaagagtgctacacacctaccatgactcccgaatccatgtctgcttgtatttcattgcccccacgggtcattccctgaagtctctggacctagtgactatgaagaagctggacagtaaggtgaacatcatccccatcattgccaaagcagatgccatttcgaagagtgagctaacaaagttcaaaatcaaaatcaccagcgagcttgtcagcaacggagtccagatctatcagtttcctacagatgatgagtcggtggcagagatcaatggaaccatgaacgcccacctgccgtttgctgtcattggcagcacagaagaactgaagataggcaacaagatgatgagggcgcggcagtatccttggggcactgtgcaggttgaaaacgaggcccactgcgactttgtgaagctgcgggagatgctgattcgggtcaacatggaggatctgcgggagcagacccacacccggcactatgagctgtatcgccgctgtaagctggaggagatgggcttcaaggacaccgaccctgacagcaaacccttcagtttacaggagacatatgaggccaaaaggaacgagttcctaggggaactccagaaaaaagaagaggagatgagacagatgttcgtccagcgagtcaaagagaaagaagcggagctcaaagaggcagagaaagagctgcacgagaagtttgaccgtctgaagaaactgcaccaggacgagaagaagaaactggaggataagaagaaatccctggatgatgaagtgaatgctttcaagcaaagaaagacggcggctgagctgctccagtcccagggctcccaggctggaggctcacagactctgaagagagacaaagagaagaaaaattaactctgctgtttgctgcatgctgcatgagacccagggtcctgtttgggcttcctgtagacacccttttcctgcgcaacagagctgggcctccctttctctaatttcccccttaacatgcctggggggcatacaatccaacccgcgccctctcctctcttcctgccaaggtttatagaaacctgagaatctgagggtgatgtctggccgctggtcaagaagccaacagtcatgtggctcgcagatgcatcctgcatcccagtccccctcccagcacccccagccatcccccctgtcttcccccacatctttgccagaggtgtgacatggtcagggggcccatctgctactctttcccaccagctcccctgttccagttctggttgctgttagtttccctgaggtatttgcaaccaccatggctgggtaaccaccgatcagcacagctgtccccttggtctcctgtatcccagtcactagtcctccctggtccaccccaccctcatcctcaggagccacagccatttcttagagggtttcaaaaggacagcctttggcgccttttccttctaacctttgagtccagccctttccagttttcattcactcgaagtaactgcactcaagctgtgctcaaaatcggcaacgcatttatttacaccaagcccttcccataaaacacaactgctgaagaaaatagcagacgtttcccctctctctaactctgggtatcccacagatgcaaaagggagaataaacctgaatattattaccagcctagagtcttgaatgatagccttaccgaattcttcttgtgaggtatttcagcatctcggggggtaatttccggaagggctccatactgtcccaataaggtgaggccagtagcaggaataataaatcccactttgtaggctggaaaactgagctgtcaaaagaatcaagtgtttgggggtttgctctgatgagtcttctagttcatttggtgaatgtcatgatgatttttaacatgcattttgcatgcatcccccaataagaagagatgagactcggccggagagaagaaaaggcccttaactttctttccaatttaaggagttgagagtttaaaaatattccagccctaagtttttatcatgggtcccatctgatagtggctttgggaacctctgtgaagtagagagccctcccttgtcagggttatgaggcacagtggcctttggtgtttggccagtgacagtgtgagagatggagttgacctggcaatgatctgtggctaacatgccgtctctctgcccttcctttgcagtaatccatggctgtgtactgaatagtattccccgctacagctggactggactccatttagccttttaagccgaggttcctattttaactgacagctttcctttggggtgccaggcagcgaggccccccacccctatcctgccatgtacttcaagctcacttcttctttttgagttccgcaacttgctcctgcctcccagccccactggcactgaccatgaccacctacttctattttttttttagagtttctttttttgatcacttactttcaaagcacacagtcaaacaaggttatgccaaatttccaggcctttttgaagtattgagaaggggaaggggatttctcacttcaattatagatcataataggaagcaaaaagaaaaaaatgaaaagcaaacatatgcacgcacttttcttgttgacaaagcaagaatataggtttgctgtgtaggtttggtgctctattgattggtgagtgaccagagcaagtatgaaggtgatgctgccaaagcacaagccagtttcttgggaaaattcaagttacagtggagtatttttttgaagaccatatgcttggaggtagaaacaaaccaacgaccaaaaaaaaaaaaaaaaaaatctgctcagatactcagccagtagctcagagagatgctgagttaggcctgtcaggtctccttgggaaaggcttcatatttgcaactttgatgattctatgtccagcttcagagctgctttcccagaaattcacgcttaaacaaccaaccggtaaccaccacttccccacaccgccgcccggtaattatttgcattacaaaccggaggcgccctcatttgcatttgtgtacagattaactagttaaggcttgagaagctctgaataattcaaaagtattagacccacacagccttggagagaccttcagaaactaaggaggagttttatattaagggagacattttagtcagtaagacgatataacctacttactccgtaaggggaaatgaaggcccagagaagggaagggacttgaccgaggtcccacttctgtttcgaggcagaagccagactaattttcatgcctcctgactcccaatcagtttcacaaagggattcaatctgtttatatacgttacattcctggatacgaggtcttttgatgttcagagtaactgactagttagtattagaagaccctcgaggtttttttccacagaaaaacatctgaagatggattgggtgagggctggcaaaacgaaggcatgccgggccagctccttaacccaatgacccagtgatgctgcaaggctggaacggggtccaggagactgtgtgtaacaggtgccctaggtgacccttataatcagggaagtttggtgaacaaaaatcgaacccatgagtgaacataaattaaaaagttgatcaacctattaaaatgtgtatttcattgggtagcttttctcactgtagacagattttttccttcttcaatgaaaaggcttttaaattagtacaactgttactatttaaaaaaaaaataccctaagtactctgtttacttctggtgaaacaaaaccagtcattagaaatggtctgtgcttttattttcccagactggagtggcttttctgaaacacacacacacacacacacacacacacacacacacacacacacacacacgtacacacatccctcacttctcttaagccaagaagtttgctttccctagctgcagtgtagatggctcttgtttttgtttttttgttttaatcatttggcattcacatgtggctgttaatatgtgcttgtttttaattaaaacaagaagctttaaaaaaaaaaaaaaaaaaaaaa

SEQ ID NO: 6280 - DNA, 2609 bp, Homo Sapiens
  NM_145800
gaagaactggaactggtctggccatagggggaagcggcgcgttaaatccgccccctctccataccctactttcaaggggtgggcggtagaggggaggttggggttggagcagcggcgagggggcccctcccttgcacctccccccaccggacttggtcgcgcccgaagtgtaacactttctctttgtcggaggagctcctctgtttcctgtgcagtagctcccgttgcggcggcacccgtggcagccctggcggacgcaggagcgatggcagcgaccgatatagctcgccaggtgggtgaaggttgccgaactgtccccctggctggacatgtggggtttgacagcttgcctgaccagctggtgaataagtccgtcagccagggcttctgcttcaacatcctgtgcgtgggagagacaggtttgggcaagtccaccctcatggacaccctgttcaacaccaaattcgaaggggagccagccacccacacacagccgggtgtccagctccagtctaatacctatgacctccaagagagcaacgtgaggctaaagctcacgatcgttagcacagttggctttggggaccagatcaacaaagaggacagctacaagcctatcgtggaattcatcgatgcacaattcgaggcctacctgcaggaagagctaaagatccgaagagtgctacacacctaccatgactcccgaatccatgtctgcttgtatttcattgcccccacgggtcattccctgaagtctctggacctagtgactatgaagaagctggacagtaaggtgaacatcatccccatcattgccaaagcagatgccatttcgaagagtgagctaacaaagttcaaaatcaaaatcaccagcgagcttgtcagcaacggagtccagatctatcagtttcctacagatgatgagtcggtggcagagatcaatggaaccatgaacgcccacctgccgtttgctgtcattggcagcacagaagaactgaagataggcaacaagatgatgagggcgcggcagtatccttggggcactgtgcaggttgaaaacgaggcccactgcgactttgtgaagctgcgggagatgctgattcgggtcaacatggaggatctgcgggagcagacccacacccggcactatgagctgtatcgccgctgtaagctggaggagatgggcttcaaggacaccgaccctgacagcaaacccttcagtttacaggagacatatgaggccaaaaggaacgagttcctaggggaactccagaaaaaagaagaggagatgagacagatgttcgtccagcgagtcaaagagaaagaagcggagctcaaagaggcagagaaagagctgcacgagaagtttgaccgtctgaagaaactgcaccaggacgagaagaagaaactggaggataagaagaaatccctggatgatgaagtgaatgctttcaagcaaagaaagacggcggctgagctgctccagtcccagggctcccaggctggaggctcacagactctgaagagagacaaagagaagaaaaattaactctgctgtttgctgcatgctgcatgagacccagggtcctgctttttttaatcttgtcttcagcagctgcactaagtctaaaggagaagactgccattatagaagagttagggttccatattgtctcaaatcagaaatcaaccaatttcctctcccctcaaactgcaagcacacacacatacaccacaccactcaacaagtgttcatgtgtccctgtgtccaggcaagaagctctcttcctgactcacatggtattttaaatggaagtgtcttgtcctaactaacaaggcaggaaaagaaccatcagagctggaaaatggacgaaatgtaacctcagagaaacaactacaggaccactcacccaagtgtaagtgactggggcaggacacctcagctgtgggtatgaaagtactgttctgttcacaaggttttgtttgagttttatgtttttcttttaaacatttctctggttcgatgggttgactgtctacagccactgttaaacatttctgaatatgcaagagaaagtcaagtgacatttgtatcttcttcagcattcgcagaccttctatagattccagcaaagggggaaaatgtatccactatctaacacttaggtagagaagggagggggtttaagcttagtgagggcaaaattactccattccaccttccgagaccagttagggttttgagagaggtttctgctcaacctgggatctggagggagagctttgatgttggtaaatctgccttgaattcattggtttaacttgcatcaaaataccatgtgagtgtgctcattctcatatatcccctaccaccatcaccaccattctgctgttcagtgtctcttgagagagcctctttgcatgttttccagaatctgtgtgtgtttttcctttcttctcctttgttctttttgctcaaaggtgtgaccagtcattgcccctctggggctttcattctccaggagaaacatcccagaaccagcactgtttagcctgatacctttctaatgtccatgtcaattttcaataaaattcaaagaaatgctaaa

SEQ ID NO: 6281 - DNA, 2608 bp, Homo Sapiens
  NM_145803
agcagagaaggcggaagcagtggcgtccgcagctggggcttggcctgcgggcggccagcgaaggtggcgaaggctcccactggatccagagtttgccgtccaagcagcctcgtctcggcgcgcagtgtctgtgtccgtcctctaccagcgccttggctgagcggagtcgtgcggttggtgggggagccctgccctcctggttcggcctccccgcgcactagaacgatcatgaacttctgaagggacccagctttctttgtgtgctccaagtgatttgcacaaataataatatatatatttattgaaggagagaatcagagcaagtgataatcaagttactatgagtctgctaaactgtgaaaacagctgtggatccagccagtctgaaagtgactgctgtgtggccatggccagctcctgtagcgctgtaacaaaagatgatagtgtgggtggaactgccagcacggggaacctctccagctcatttatggaggagatccagggatatgatgtagagtttgacccacccctggaaagcaagtatgaatgccccatctgcttgatggcattacgagaagcagtgcaaacgccatgcggccataggttctgcaaagcctgcatcataaaatcaataagggatgcaggtcacaaatgtccagttgacaatgaaatactgctggaaaatcaactatttccagacaattttgcaaaacgtgagattctttctctgatggtgaaatgtccaaatgaaggttgtttgcacaagatggaactgagacatcttgaggatcatcaagcacattgtgagtttgctcttatggattgtccccaatgccagcgtcccttccaaaaattccatattaatattcacattctgaaggattgtccaaggagacaggtttcttgtgacaactgtgctgcatcaatggcatttgaagataaagagatccatgaccagaactgtcctttggcaaatgtcatctgtgaatactgcaatactatactcatcagagaacagatgcctaatcattatgatctagactgccctacagccccaattccatgcacattcagtacttttggttgccatgaaaagatgcagaggaatcacttggcacgccacctacaagagaacacccagtcacacatgagaatgttggcccaggctgttcatagtttgagcgttatacccgactctgggtatatctcagaggtccggaatttccaggaaactattcaccagttagagggtcgccttgtaagacaagaccatcaaatccgggagctgactgctaaaatggaaactcagagtatgtatgtaagtgagctcaaacgaaccattcgaacccttgaggacaaagttgctgaaatcgaagcacagcagtgcaatggaatttatatttggaagattggcaactttggaatgcatttgaaatgtcaagaagaggagaaacctgttgtgattcatagccctggattctacactggcaaacccgggtacaaactgtgcatgcgcttgcaccttcagttaccgactgctcagcgctgtgcaaactatatatccctttttgtccacacaatgcaaggagaatatgacagccacctcccttggcccttccagggtacaatacgccttacaattcttgatcagtctgaagcacctgtaaggcaaaaccacgaagagataatggatgccaaaccagagctgcttgctttccagcgacccacaatcccacggaacccaaaaggttttggctatgtaacttttatgcatctggaagccctaagacaaagaactttcattaaggatgacacattattagtgcgctgtgaggtctccacccgctttgacatgggtagccttcggagggagggttttcagccacgaagtactgatgcaggggtatagcttgccctcacttgctcaaaaacaactacctggagaaaacagtgcctttccttgccctgttctcaataacatgcaaacaaacaagccacgggaaatatgtaatatctactagtgagtgttgttagagaggtcacttactatttcttcctgttacaaatgatctgaggcagttttttcctgggaatccacacgttccatgctttttcagaaatgttaggcctgaagtgcctgtggcatgttgcagcagctattttgccagttagtatacctctttgttgtactttcttgggcttttgctctggtgtattttattgtcagaaagtccagactcaagagtactaaacttttaataataatggattttccttaaaacttcagtctttttgtagtattatatgtaatatattaaaagtgaaaatcactaccgccttgtgctagtgccctcgagaagagttattgctctagaaagttgagttctcatttttttaacctgttatagatttcagaggatttgaaccataatccttggaaaacttaagttctcattcaccccagtttttcctccaggttgttactaaggatattcagggatgagtttaaaccctaaatataaccttaattatttagtgtaaacatgtctgttgaataatacttgtttaagtgttaaaaaaaaaaaaaaaaagaaaaaaaaaaaaaaaa

SEQ ID NO: 6282 - DNA, 1098 bp, Homo Sapiens
  NM_145806
gctgcgcccgcccgcgcccggggtgatgcagttgccccccgcgctgtgcgcccgcctcgctgcggggcccggggcggcggagccactgcctgtagagcgggatcccgcggctggggccgcgccctttcgcttcgttgcgcgccccgtgcgcttcccgcgggagcaccagttcttcgaggatggggacgtgcagcgccacctctacctccaggacgtgatcatgcaggtggccgacgtgcctgagaagcccagggtgcccgcgtttgcctgccaggtggccggctgctgccaggtgttcgatgccctggacgactacgagcaccactaccacacgctgcacggaaatgtttgctccttttgcaagcgggccttcccttccggacacctgctggacgcccacatcctggagtggcacgattcgctcttccagatcctgtctgagaggcaggacatgtatcagtgcttggtagaaggctgcacagagaagttcaagaccagcagagaccggaaggatcacatggtgaggatgcacctgtaccccgcggacttccggtttgataagccaaagaaaagcagaagcccagcctcagcagaagccccaggggacagtggagagcggtcagaaggggaggccatggaaatctgctctgagcctgtggcagcctcccctgcaccggcaggtgagaggcggatctacagacatagaataccctctaccatctgctttggtcagggtgccgctcgaggatttaaaagcaacaagaagaaaaccaaacaatgctgatagactcagaaaaggagtggggggcagtcaccactgctgggcgtggcatccgccttgggcctttctccgaccttctggtgtggccgccctgggggccaggccctcgccatcctccccatccttgttcctcagcaaatggcattagcagctgtcatcagaagctgtgagggacccacagattttggaaacgacctggacacactattgggaaggagatgtggacggcctgtctcctcctgcagggcccaccctaagaatgtatttttaaacacatgaaataagtatttttcactgataaaaaaaaaaaaaaaaaa

SEQ ID NO: 6283 - DNA, 3900 bp, Homo Sapiens
  NM_145808
actagtggcgttcgcgccgcggacccagagagaggcgttccgcggaggagaagaggaagaggaagttgggggagggtcctagcggggagtgaaccggaagtgtaaaggttcctgcctctcctcggccaggcggaacctctctgctgggcccggtggccgcaaaagaactttctttctcccgcccgaacggtcgccgcggccaactgcctcgcccgcctggcagcctaaccctccttctcttcttctcctctccggcttcgcgcggccctgcctccctctcgcccggcggcatccgcttgctgctgccaccgcctcctcatcttctgcccggccaaccggcctgccccgctgcagtgatgtgcgacaaggagttcatgtgggccctgaaaaacggagacttggatgaggtgaaagactatgtggccaagggagaagatgtcaaccggacactagaaggtggaaggaaacctcttcattatgcagcagattgtgggcagcttgaaatcctggaatttctgctgctgaaaggagcagatattaatgctccagataaacatcatattactcctcttctgtctgctgtctatgagggtcatgtttcctgtgtgaaattgcttctgtcaaagggtgctgataagactgtgaaaggcccagatggactgaccgcctttgaagccactgacaaccaggcaatcaaagctcttctccagtgatggatggatggactgataactccggaagaatgactctcctgtggcctcacactgctgcctgtctgtctgtcactctctatctgccagcttcttcagctaaatactttaagaggggtgaggggagagagaaattcataacaaatccgactaccagaaaaaaaaaattgttttggaggaggggcaaaaggaaccatgatcaggcttttactgggattcctgatcaagtaagcctcttccctttctaataaaatatacaccttatacccaagggagagcaaagacaaaatacaccagtaacatttgaccttttcagctccctagctaatttattagattgtgttgaaggtctgattctacaaaggccaactctacatatttggtagccctaactgtctgagcagtagtggctgctgtgatgtaaacttagggtgctgagataagcaattagctctagccttctgccttaagaatgcactctactggggatttcctggcatagttaagagcgctgcctataaggttggtgaccaaatctttcctcggtgactttaagctttatgtgaaagcttagttaaggtgaggaggggcacactcctaaattgctggatgactgaactttggattttctctcccctttcacatggatttcatgtctctttagataaaactgactagttttatttataaaatcttaagttttggaagtctaaaggagaaaccattccagtatgcatatttttttctcctctagattcatacatttatatagcattgaaacactttcaaactcctgctggtagtaaaaggggatttaaaaatagaatcatagccataagcctgttagtatcatatgaagagagaacagttatcttagtacctatggattttctttatttgctgtttgaatggattgaccttggttatgtgttgagaattaaggaacattctttgaaatgcctctctcagacccatcttggaggctgattacttactgcaccaaagctatcactggggtgagatttactgtttggacaaatttagccccatcccttcaaaaatacacttgtaaccaggtttcccagagttgttgataggcttctgctgaacatatgccaacccacctgcataatatatttttgttgcttttataaatcatgcattacataaagtgtgacaacttcaaaatgtattctctgttcttggaatacagtgccctaaaatggtgttcttatgacctgcagaaaatatttacacatatttccaaatatttatttcatgagcagtacagctaattaaaatatataagcttaaattttatatcttacatttaaaatattaagattcctttgacttgccatccatataagcttgctaaaaatattaagaccaagtcatgcaataattgaatgtacctcaaatttttaggggagggtgggttagggactgatactcagattgtggataataattgaattggtttttaaaggcaacatagcattctacagcagggttaatctattatcaagaacagtcaccctggttaataacaagttttactgatcagttgctggttggttggttggttggcatgtgggtgtgtgggtgtataggtgtgtgtgggtgtgtgtgtgtatttttccccatgagtcctttttttaatcctgtggctttttcacttacaactagcctaaccctgtaattttcctacatccaagaaaacaatcacaaagtagtggtttaaatactttgttgtatttggctaattttgctgtcttaatgcagcctattaagagttgggttaaaaatcagtaatcagtactttattacatcactgaactaaaatatggagacatcctcattgaaaatggagggcactctatcagtctataactatcaacgtagtgcaacagggtgttttgatacctttgttttcacctcttgacataatgctatttaaaggcttgaatttttccctttatataattttcacctttactttcaaagtgttttgttgtagttggctattgcagagagtgcattgtcctatcattcctaaacctggtctgctttctacattcatggtatggaaaccatgtgattctttgtacagtttatcctgatgttgcttgtaatgcagtagaggctatttcgccttcgcttttctttctcgacctttttgtaaaccctataattatgaagcgattgcttgagaaaataacatataaacatagaatagaatagactgaccaagatggttcacagtttctttttttaactaggttatttataatgtatttctgaaccacttggcagacaaattcacaacacttaatgttcatattttgagtaaaggaagctaaaaccatgtttgctttctggtactacatgcattagcgaaaggttaagtaagttttgttctccactgaagtaatacttaacatctcagaaaaaattttgcatgttctgtagttttgtattaaatcagtcatttcatatgcactatatcaagtacaaacaggtagtttacctgtttatagtagtgtactaacaaagtctcccttgcagcttcagactgttatctataggcttatcgttcaaatacagcacttgaatatcccaagtagttcttctacgcatagctcacctttctaaacccagttaagcatggaagagaggtagtaggtaggtgcagtgtgtggaagctgcaaacaagtaggccttttattcattgatatcttttcccaagtactggattttaaatctgtatgtatctgtttgatttttttttctaatatttcagttgagctgctgttttcttccatgcaatattgtatactcaattgtgtatagaagaagctggtgagagtgccctcctacataaataagcaattgcagtgttttgcatgcaaaatataaaaaatttaaattgtcctgattctattttgtaaatggagaaacaatcatatctttctaagcggtaatggaggaagactagtgctttgtgcattttgatatatttgagttcattttttccacaatgtcatacttttgacgcagttgggtttctcataagtatcctagttcatgtacatccgaatgctaaataatactgtgttttaagttttgtgttgcaagaacaaatggaataaacttgaattgtgctacagctaaaaaaaaaaaaaaaaaa

SEQ ID NO: 6284 - DNA, 1428 bp, Homo Sapiens
  NM_145813
aatgcggcagcgagtgctacgcctgcgcagtaggcctccggtcgccgttccccttccccggctctagcaggccggcttctctgtccaatgcccacccggagctgggaggaggagtctgcgtaatgtgcgtgtgaagagactgggggagctggccggggctcacggtgtttgacccgtcggtcgtgcgtgagaggaaagggaaggaggaggtcccgaatagcggtcgccgaaatgttccggtgtggaggcctggcggcgggtgctttgaagcagaagctggtgcccttggtgcggaccgtgtgcgtccgaagcccgaggcagaggaaccggctcccagctcgagccttgggcacagaagtgattcaactcttccccgagaaaggaaatatgggaaagatcctccccgaatacctcagcaactggaccatggaaaaagtcagacgagagggggttaaggtgatgcccaatgctattgtgcaatccgttggagtcagcagtggcaagttacttatcaagctgaaagacggcaggaaggtagaaactgaccacatagtggcagctgtgggcctggagcccaatgttgagttggccaagactggtggcctggaaatagactcagattttggtggcttccgggtaaatgcagagctacaagcacgctctaacatctgggtggcaggagatgctgcatgcttctacgatataaagttgggaaggaggcgggtagagcaccatgatcacgctgttgtgagtggaagattggctggagaaaatatgactggagctgctaagccgtactggcatcagtcaatgttctggagtgatttgggccccgatgttggctatgaagctattggtcttgtggacagtagtttgcccacagttggtgtttttgcaaaagcaactgcacaagacaaccccaaatctgccacagagcagtcaggaactggtatccgatcagagagtgagacagagtccgaggcctcagaaattactattcctcccagcaccccggcagttccacaggctcccgtccagggggaggactacggcaaaggtgtcatcttctacctcagggacaaagtggtcgtggggattgtgctatggaacatctttaaccgaatgccaatagcaaggaagatcattaaggacggtgagcagcatgaagatctcaatgaagtagccaaactattcaacattcatgaagactgaagccccacagtggaattggcaaacccactgcagcccctgagaggaggtcgaatgggtaaaggagcatttttttattcagcagactttctctgtgtatgagtgtgaatgatcaagtcctttgtgaatattttcaactatgtaggtaaattcttaatgttcacatagtgaaataaattctgattcttctaaattaaaaaaaaaaaaaaaaaaaaaaaa

SEQ ID NO: 6285 - DNA, 1726 bp, Homo Sapiens
  NM_145858
agatgtagttccgagaccggttgccatggcgttctggacagcctcgcgagtccgaccccgcccttcaggagtgacgagcggcctgaccaatgggagcagggggcgggctctctgacgaaggactggaaggtggcggtggtgaaggtgcaggccgttggggcggctcagaggcaggtgactatgaaaggcttatatttccaacagagttccacagatgaagaaataacatttgtatttcaagaaaaggaagatcttcctgttacagaggataactttgtgaaacttcaagttaaagcttgtgctctgagccagataaatacaaagcttctggcagaaatgaagatgaaaaaggatttatttcctgttgggagagaaattgctggaattgtattagatgttggaagcaaggtatcattctttcaaccagatgatgaagtagttggaattttgcccctggactctgaagaccctggactttgtgaagttgttagagtacatgagcattacttggttcataaaccagaaaaggtcacatggacggaagcagcaggaagcattcgggatggagtgcgtgcctatacagctctgcattatctttctcatctctctcctggaaaatcagtgctgataatggatggagcaagtgcatttggtacaatagctattcagttagcacatcatagaggagccaaagtgatttcaacagcatgcagccttgaagataagcagtgccttgaaagattcagacctcccatagcccgagtgattgatgtatctaatgggaaagttcatgttgctgaaagctgtttggaagaaacaggtggcctgggagtagatattgtcctagatgctggagtgagattatatagtaaagatgatgaaccagctgtaaaactacaactactaccacataaacatgatatcatcacacttcttggtgttggaggccactgggtaacaacagaagaaaaccttcagttggatcctccagatagccactgccttttcctcaagggagcaacgttagctttcctgaatgatgaagtttggaatttgtcaaatgtacaacagggaaaatatctttgtatcttaaaggatgtgatggagaagttatcaactggtgttttcagacctcagttggatgaacccattccactgtatgaggcaaaagtttccatggaagctgttcagaaaaatcaaggaagaaaaaagcaagttgttcaattttaattttcttctttctcagacctcagtcggatgaacatattccagtatttgaagccagaattttctttggaaattgttgagaaaaaccaaggaagataaaacaagttgcatttttaagcacgtttctctgctaagacaagatgctcagttgacacatttgaaaagtgtttgaaaaattcttgtgcaaatgatcaagataattctataattaacatcttaagggaatttttctaaaaaccttttcattgtttctatatattttgcccctgctataaaattccttccatgaagaaaactgctgctttcagcaaaagtcacactactcttgataaaagctgttgcaggcctttgctaagctatcaaagtaacgtattaattttgtatcaactccgttctcaacaccttccttaagtctttgctgtcataatttaagcatttgagtatattttgaagtcttaaaagacttagcccataggcacttaaaaaaaaaaaaaaaaaa

SEQ ID NO: 6286 - DNA, 1313 bp, Homo Sapiens
  NM_145859
gatccgggagttgaagagggctgcaaggtgggaagtgaagtcagtgcctcagttgctgctttctcctctaaatcttggtctcttgtttggaagtgactaacagcattttggcatgagaaagccctaaaaagatcagtgtgttttttgtgtccaattcttttatcaccaaaaaagagaagaaatattgcagtgaatgaagattcctctgcattttagcactgctttttcaactgtagttggcttttgaatgaggatgacaatggaagagatgaagaatgaagctgagaccacatccatggtttctatgcccctctatgcagtcatgtatcctgtgtttaatgagctagaacgagtaaatctgtctgcagcccagacactgagagccgctttcatcaaggctgaaaaagaaaatccaggtctcacacaagacatcattatgaaaattttagagaaaaaaagcgtggaagttaacttcacggagtcccttcttcgtatggcagctgatgatgtagaagagtatatgattgaacgaccagagccagaattccaagacctaaacgaaaaggcacgagcacttaaacaaattctcagtaagatcccagatgagatcaatgacagagtgaggtttctgcagacaatcaaggatatagctagtgcaataaaagaacttcttgatacagtgaataatgtcttcaagaaatatcaataccagaaccgcagggcacttgaacaccaaaagaaagaatttgtaaagtactccaaaagtttcagtgatactctgaaaacgtattttaaagatggcaaggcaataaatgtgttcgtaagtgccaaccgactaattcatcaaaccaacttaatacttcagaccttcaaaactgtggcctgaaagttgtatatgttaagagatgtacttctcagtggcagtattgaactgcctttatctgtaaattttaaagtttgactgtataaattatcagtccctcctgaagggatctaatccaggatgttgaatgggattattgccatcttacaccatatttttgtaaaatgtagcttaatcataatctcacactgaagattttgcatcacttttgctattatcattcttttaagaattataagccaaaagaatttacgccttaatgtgtcattatataacattccttaaaagaattgtaaatattggtgtttgtttctgacattttaacttgaaagcgatatgctgcaagataatgtatttaacaatatttggtggcaaatattcaataaatagtttacatctgttaaaaaaaaaaaaaaaaaaaaaaaaaaaa

SEQ ID NO: 6287 - DNA, 1212 bp, Homo Sapiens
  NM_145860
tgcaaggtgggaagtgaagtcagtgcctcagttgctgatcagtgtgttttttgtgtccaattcttttatcaccaaaaaagagaagaaatattgcagtgaatgaagattcctctgcattttagcactgctttttcaactgtagttggcttttgaatgaggatgacaatggaagagatgaagaatgaagctgagaccacatccatggtttctatgcccctctatgcagtcatgtatcctgtgtttaatgagctagaacgagtaaatctgtctgcagcccagacactgagagccgctttcatcaaggctgaaaaagaaaatccaggtctcacacaagacatcattatgaaaattttagagaaaaaaagcgtggaagttaacttcacggagtcccttcttcgtatggcagctgatgatgtagaagagtatatgattgaacgaccagagccagaattccaagacctaaacgaaaaggcacgagcacttaaacaaattctcagtaagatcccagatgagatcaatgacagagtgaggtttctgcagacaatcaaggatatagctagtgcaataaaagaacttcttgatacagtgaataatgtcttcaagaaatatcaataccagaaccgcagggcacttgaacaccaaaagaaagaatttgtaaagtactccaaaagtttcagtgatactctgaaaacgtattttaaagatggcaaggcaataaatgtgttcgtaagtgccaaccgactaattcatcaaaccaacttaatacttcagaccttcaaaactgtggcctgaaagttgtatatgttaagagatgtacttctcagtggcagtattgaactgcctttatctgtaaattttaaagtttgactgtataaattatcagtccctcctgaagggatctaatccaggatgttgaatgggattattgccatcttacaccatatttttgtaaaatgtagcttaatcataatctcacactgaagattttgcatcacttttgctattatcattcttttaagaattataagccaaaagaatttacgccttaatgtgtcattatataacattccttaaaagaattgtaaatattggtgtttgtttctgacattttaacttgaaagcgatatgctgcaagataatgtatttaacaatatttggtggcaaatattcaataaatagtttacatctgttaaaaaaaaaaaaaaaaaaaaa

SEQ ID NO: 6288 - DNA, 2772 bp, Homo Sapiens
  NM_145861
ctcgcaatctgttgcttcttccatggcaaactccagagaattaagaagccaaactcaacatcgccatgggcctcaggacgactaaacagatggggagaggcactaaagctcctggtcaccaagaggatcatatggtaaaggaaccagtggaagacacagaccctagcactttatcctttaatatgtcagacaaatatcccattcaagatacggaactccctaaagctgaagaatgtgatacaattactttgaactgcccacgaaattcagatatgaaaaatcagggagaagaaaatggctttccagatagcactggagatcctcttccagagatcagcaaggacaactcctgcaaagaaaactgtacttgttcctcctgcttgctccgggcccccaccataagtgacttgctcaatgatcaggacttactagacgtgatcaggataaagctggatccgtgtcacccaacggtgaaaaactggaggaattttgcaagcaaatgggggatgtcctatgacgaattgtgcttcctggagcagaggccacagagccccaccttggagttcttgctccggaacagtcagaggacggtgggccagctgatggagctctgcaggctctaccacagggccgacgtggagaaggttctgcgcaggtgggtggacgaggagtggcccaagcgggagcgtggagacccctccaggcacttctagagctcttcttcttccttcattggcctctccggatgttgaaacaaccacaggtcaagaaggaatgtgaatctgttgttttataagagtttaggacaaggacgtggaacagtggacactggttttccccaaagctggcagttttgtggaggggtagcttgtttcggtggtggatctctgtttatttttgcacatctgttataatttaatattcaaatctggaattaagaaaacatattttctagtatcctctaagggccaaagtcctacaatcggaatggattcatgccacgttgaagataaaattatcctctctctgaaatacggtaaagatttaaataggtcctgagactgttgatagccccagacatacccacagcattatatgtaacatctctcctgatcagtgccattcccacggtttcaaagaaaacagctacaaggaatgcttacctgagtgtctgcagcaccctccacttctctcctaggcaatgagacccagtggctagaaattcaccatgtctattctcaagatccatgccagggagctctttgactctcgtgggaatcccactgttgaggttgatctcttcacctcagaaggtctcttcagagctgctgtgcccagtggtgcttcaactggtatctatgaggtcctagagctccaggacaatgataagactcgctatatggggaagggtgtctcaaagcctgttgagcccatcaataaaactattgcacctgtcctggttagcaagaaactgaacgtcacagaacaagagaagattgacaaacttatgatagagatggatggaacagaaaataaatctaaatttggtgcaaatgccattctgggagtgtccctcgctgcctgcaaagctagtgctgttgagaagggggttcccctgtaccaccacatcgccgacttgtctggcaactccaaagtcatcttgccagtcccggtgttcaatgtcatcaatggcagttctcatgctgtcaccaagctggccatgcaggagttcatggtcctcccagtcggtgcagcaaacttcagggaagccatgcccattggagcggaggtttaccacagcctgaagaatgtcatcaaggagaaatatgggaaagatgccaccggtgtgggggatggaggcgcgtttgctcccaacatcctggagaataaagaaggcctggagctgctgaagactgcgattgggaaagctggctacactgataaggtgatcgtcagcatggacgtagaggcctccgagttcttcaggtctggaaagtatgacctggaattcaagtttctcgacgaccccaccaggtacatctcacctgactgtctggctgacctgtacaagtccttcatcaaaaactacccagtggtgtctactgaagatccctttgaccaggatgactggggagcttggcagaagttcacggccagtgcaggaatccaggtagtggaggatgatctcagagtgaccaacccaaagaggacagcctcggccgtgaatgagaagaagtgcaactgcctcctgctcaaagtgaaccagattcgctctgtgactgagtcccttcaggcgtgcaagctggcccaggccaatggttggtgtgtcatggtgcctcatcattctggggagactgaaaataccttcatcactgacctggtggtggggctgtgacctgggcagctcaagactggtgccccttgctgatctgagcgcttggccaagtacaaccagctcctcagaattgaagaggagctgggcagcaaggctaagtttgccggcaggaacttcagaaaccccccagccaagtaagctgtgggcaggcaagcccttcagtcacctggtggctaattagacccctccccttgtgtcaactccggcagctcaagacccccgagcaacatttgtaggggccgctgctagttagctacccttgcccaccgccgtggagttcgcacctcttccttagaacttctacagaagcaggttgcagtgagccgagattgcgccactgcacaccagtctggagacagagtgagagtccgtcccag

SEQ ID NO: 6289 - DNA, 2081 bp, Homo Sapiens
  NM_145863
agacgacatatcaacatccgggggtcgcggagccgtccgcctacgggggccgggacgtcgcctgcgcgtctctcgttttcggacggctgcagcatcgcggtggggatcgaaagcgggggcttctgggacgcagctctggagacgcggcctcggaccagccatttcggtgtagaagtggcagcacggcagattcatctgaaaactacattaagatgaagacctttgaaggtttctgtgctttgcatctcgctgcaagtcaaggacattggaaaatcgtacagattcttttagaagctggggcagatcctaatgcaactactttagaagaaacgacaccattgtttttagctgttgaaaatggacagatagatgtgttaaggctgttgcttcaacacggagcaaatgttaatggatcccattctatgtgtggatggaactccttgcaccaggcttcttttcaggaaaatgctgagatcataaaattgcttcttagaaaaggagcaaacaaggaatgccaggatgactttggaatcacacctttatttgtggctgctcagtatggcaagctagaaagcttgagcatacttatttcatcgggtgcaaatgtcaattgtcaagccttggacaaagctacacccttgttcattgctgctcaagagggacacacaaaatgtgtggagcttttgctctccagtggggcagatcctgatctttactgtaatgaggacagttggcagttacctattcatgcagctgcacaaatgggccatacaaaaatcttggacttgttaataccacttactaaccgggcctgtgacactgggctaaacaaagtaagccctgtttactcagcagtgtttgggggacatgaagattgcctagaaatattactccggaatggctacagcccagacgcccaggcgtgccttgtttttggattcagttctcctgtgtgcatggctttccaaaaggactgtgagttctttggaattgtgaacattcttttgaaatatggagcccagataaatgaacttcatttggcatactgcctgaagtacgagaagttttcgatatttcgctactttttgaggaaaggttgctcattgggaccatggaaccatatatatgaatttgtaaatcatgcaattaaagcacaagcaaaatataaggagtggttgccacatcttctggttgctggatttgacccactgattctactgtgcaattcttggattgactcagtcagcattgacacccttatcttcactttggagtttactaattggaagacacttgcaccagctgttgaaaggatgctctctgctcgtgcctcaaacgcttggattctacagcaacatattgccactgttccatccctgacccatctttgtcgtttggaaattcggtccagtctaaaatcagaacgtctacggtctgacagttatattagtcagctgccacttcccagaagcctacataattatttgctctatgaagacgttctgaggatgtatgaagttccagaactggcagctattcaagatggataaatcagtgaaactacttaacacagctaatttttttctctgaaaaatcatcgagacaaaagagccacagagtacaagtttttatgattttatagtcaaaagatgattattgattgtgagataggttaggttttggggggccagtagttcagtgagaatgtttatgtttacaactagccttcccagtaaaaaaaaaaaaaaaaaaaaaaaaaattgtaaacatcacttatattactttattgcagcttcatcaccagtacattatatgttgtaatatttatttacctgatcattttgatcattttctgctttattttgctaataaactgtgatgttacttctagtgctaaacatggcatatttccacctatgattcgtgtttacctggtattaggagctcagaatggaatgcataaagcttcactggaagtgtatacaactgtggtgtagaatctgttattattatcattattattttatttagacttgactatctcttatgtttattaaagaacatgttttcctaaaaaaaaa

SEQ ID NO: 6290 - DNA, 680 bp, Homo Sapiens
  NM_145867
tcttcctctcctgggccgtcctctgagcagcagacggggctaagcgttccccagctcgccttcacacacagcccgtgccaccacaccgacggtaccatgaaggacgaggtagctctactggctgctgtcaccctcctgggagtcctgctgcaagcctacttctccctgcaggtgatctcggcgcgcagggccttccgcgtgtcgccgccgctcaccaccggcccacccgagttcgagcgcgtctaccgagcccaggtgaactgcagcgagtacttcccgctgttcctcgccacgctctgggtcgccggcatcttctttcatgaaggggcggcggccctgtgcggcctggtctacctgttcgcgcgcctccgctacttccagggctacgcgcgctccgcgcagctcaggctggcaccgctgtacgcgagcgcgcgcgccctctggctgctggtggcgctggctgcgctcggcctgctcgcccacttcctcccggccgcgctgcgcgccgcgctcctcggacggctccggacgctgctgccgtgggcctgagaccaaggcccccgggccgacggagccgggaaagaagagccggagcctccagctgccccggggaggggcgctcgcttccgcatcctagtctctatcattaaagttctagtgaccgagaaaaaaaaaaaaaa

SEQ ID NO: 6291 - DNA, 2971 bp, Homo Sapiens
  NM_145887
aacgcgccggcgggatcccaggcgccgagcgcccgctgagcagccaccctttgcgcgccgcctgcagcgcagcttccccgggcgctgcctggacaggcctgcctgcgtgctgggacatgtctggcctccaaggaccgtcggtgggcgatggctgcaacggtggaggggccagagctggaggcagctgctgccgcaggagatgcttcagaggattcggacgcagggtccagggcgctgcctttcctgggcggcaaccggctgagcttggacctgtaccccgggggctgccagcagctgctgcacctgtgtgtccagcagcctctgcagctgctgcaggtggaattcttgcgtctgagcactcacgaggaccctcagctgctggaggccaccctggcccagctgcctcagagcctgtcctgcctccgctccctggtcctcaaaggagggcaacgccgggacacactgggtgcctgtctccggggtgccctgaccaacctgcccgctggtctgagtggcctggcccatctggcccacctggacctgagcttcaacagcctggagacactgccggcctgtgtcctgcagatgcgaggtctgggtgcgctcttgctgtctcacaactgcctctctgagctgcctgaggctctgggggccctccccgccctcaccttcctcacagtgacacacaaccgcctgcagacgctgcccccagcactgggggccctatccaccctgcagcgcctcgatctctctcagaatctgctggacacgctacctcctgagattggaggcctgggcagcctcctggagctcaacctggcctccaaccggctgcagagcctcccagcctctctggcgggacttcggtccttgcggctccttgtcctgcacagcaacctcctggcctctgtgccagctgacttggcccgccttccactcctcacccggctcgacctgagggacaaccagctccgggacctgccccctgagctgctagacgccccctttgtgcgcctgcaggggaaccccctgggtgaggcctcgccagacgccccgagttcaccagtggcagccctcattccagaaatgcccagactgttcctgacctcagatttggacagctttcctgtgacccctcaaggctgctcagtgaccctggcctgtggcgtccgcctgcagttcccagcgggagccaccgccacccccatcaccatccgctatcggctgctgctgccggagccaggcctcgtccccctgggtcctcatgacgccctgctcagccatgtgctggagctgcagccccatggggtggccttccagcaggatgtggggctgtggctgctcttcaccccaccgcaggcccggcgctgccgtgaagtggtggtcaggacccggaatgacaacagctggggtgacctggagacctacctggaggaagaggcaccccagcggctctgggctcactgccaggtgccccacttctcctggttccttgtggtttcccgccctgtgtccaatgcctgcctggtgccaccggaggggacactgctgtgctcctcgggtcatcctggggtcaaagtcatcttcccccctggggccactgaggagcctcgtcgagtctccatgcaggtggtgcgcatggctggccgagagctgcaggccctcctgggagaaccagaggctgcagtgagccccctgctgtgcctgtcacagagcggtccccccagcttcctccaaccggtcaccgtgcagctgcctctgccctctggcatcacaggcctcagtctggaccgctcccgcctgcacctgttgtactgggcccctcctgcagccacctgggatgacatcacagctcaggtggtcctggagctcacccacctgtacgcacgcttccaggtcacacacttctcctggtactggctctggtacaccaccaagaactgtgtgggaggcctggctcggaaggcctgggagcggctgcggctgcaccgtgtgaacctcatcgctctgcagcggcgccgggaccctgagcaggtcctgctgcagtgcctgccccgaaacaaggtggacgccacccttcggcggctgctggagcggtaccggggccccgagccctctgacacggtggagatgttcgagggcgaagagttctttgcggccttcgagcgcggcatcgacgtggatgctgaccgccctgactgtgtggagggcagaatctgctttgtcttctactcgcacctgaagaatgtgaaggaggtgtccttctaccgtggcgcggtgcctgtgcgggtgcccgaggaggctgaggctgcccggcagaggaagggcgcagacgccctgtggatggccactctgcccatcaagctgccgagacttcgagggtccgaggggccacggcggggggctggcctctccttggcacccttgaatctgggagatgccgagaccggctttctgacgcagagcaacctgctgagtgtggctgggcgtctgggtctggactggccagccgtggccctgcacctgggggtgtcctaccgggaggtgcagcgcatccggcacgagttccgggatgatctggatgagcagatccgtcacatgctcttctcctgggctgagcgccaggctgggcagccaggggctgtggggctcctggtgcaggccctggagcagagtgaccggcaggacgtggctgaagaggtgcgcgcagtcttggagctcggccgccgcaagtaccaggacagcatccgacgcatgggcttggcccccaaggaccccgctctgcctggctcctcggctccacagcccccagagcctgcccaggcctaggccccacagacttttaggctggcccagatattccccagtggatgggcagagcccccaccttcaagtctctccagtgtgtggggacgggtccctgtgagcaacaaaactgcactgtttctttcacctcaaaaaaaaaaaaaaa

SEQ ID NO: 6292 - DNA, 608 bp, Homo Sapiens
  NM_145897
gaggatcatagagctgtctggcgcagcgaggcctcccggcgccaccgagacgcgcagaggacggctagagcgttgctcgccgagagacttcctcttcgttaagtcggccttcccaacatggcgcagtctattaacatcacggagctgaatctgccgcagctagaaatgctcaagaaccagctggaccagatgtatgtccctgggaagctgcatgatgtggaacacgtgctcatcgatgtgggaactgggtactatgtagagaagacagctgaggatgccaaggacttcttcaagaggaagatagattttctaaccaagcagatggagaaaatccaaccagctcttcaggagaagcacgccatgaaacaggccgtcatggaaatgatgagtcagaagattcagcagctcacagccctgggggcagctcaggctactgctaaggcctgagagtttttgcagaaatggggcagagggacaccctttgggcgtggcttcctggtgatgggaagggtcttgtgttttaatgccaataaatgtgccagctgggcagaaaaaaaaaaaaaaaaaaaaaaaaaaaaaaaaaaaaaaaaaaaaaaaaaaaaaaaaaa

SEQ ID NO: 6293 - DNA, 2005 bp, Homo Sapiens
  NM_145914
gaggtacgcggtgcggtctcccggtacccggagcggctctgattcatggtttaacttgtggccctaaagaactggaaacccaaaggaacgaatattcctgccccacagagtcccatctttggtgaggctgtttctggagtttacatgatgaccaaggtactaggcatggccccagttctgggccctaggcctccacaggagcaggtggggcctctgatggtaaaagtcgaggagaaagaagagaaaggcaagtaccttcctagcctggagatgttccgccagcgcttcaggcagtttgggtaccatgatacccctggaccccgagaggccctgagccaactccgggtgctctgctgtgagtggctgaggcccgagatccacaccaaggagcagatcctggagctactggtgctggagcagttcctgaccatcctgccccaggagctccaggcctgggtgcaggagcattgcccggagagcgctgaagaggctgtcactctcctcgaagatctggagcgggaactggatgagccaggacaccaggtctcaactcctccaaacgaacagaaaccggtgtgggagaagatatcctcctcaggaactgcaaaggaatccccgagcagcatgcagccacagcccttggagaccagtcacaaatacgagtcttgggggcccctgtacatccaagagtctggtgaggagcaggagttcgctcaagatccaagaaaggtccgagattgcagattgagtacccagcacgaggaatcagcagatgagcagaaaggttctgaagcagaggggctcaaaggggatataatttctgtgattatcgccaataaacctgaggccagcttagagaggcagtgcgtaaaccttgaaaatgaaaaaggaacaaaaccccctcttcaagaggcaggctccaagaaaggtagagaatcagttcctactaaacctaccccaggagagagacgttatatatgtgctgaatgtggcaaagcctttagtaatagctcaaatctcaccaaacacaggagaacacacactggggagaaaccttacgtgtgcaccaagtgtgggaaagctttcagccacagctcaaacctcaccctccactacagaacacacttggtggaccggccctatgactgtaagtgtggaaaagcttttgggcagagctcagaccttcttaaacatcagagaatgcacacagaagaggcgccatatcagtgcaaagattgtggcaaggctttcagcgggaaaggcagcctcattcgtcactatcggatccacactggggagaagccttatcagtgtaacgaatgtgggaagagcttcagtcagcatgcgggcctcagctcccaccagagactccacaccggagagaagccatataagtgtaaggagtgtgggaaagccttcaaccacagctccaacttcaataaacaccacagaatccacaccggggaaaagccctactggtgtcatcactgtggaaagaccttctgtagcaagtccaatctttccaaacatcagcgagtccacactggagagggagaagcaccgtaactttcaagcgctcctgttgttgtcgttgttttaaactttagaatctgaaaaccagaaagaagtcttgtcattgcagcagcatcgattccggtgatagagtttgtatcactcaacatcaggggatgcctgaggagtgcgagctccacagcaacatggcaggcaggaggtcctcagaaggtgtcaggaggttccacactcgccagttcactggagcagagtcccttcgccacacttagggtcccagtaagccatgccagcattaccttttgcgtagttaaacagacgtgtatccagtctagttaaggaagaaacattaagattgtttaatttttaacatatattcaagaattttaatttgtaaagaattgagccacattgaacacaattgaatgagattcagaataaacttataacatcttgtaaaaaaaaaaaaaaaaaa

SEQ ID NO: 6294 - DNA, 1375 bp, Homo Sapiens
  NM_146387
cccaaagtaggctaggcctacggaagctgggtcttcttgctgtgagcgcggagtcgcggcgggtagggcggcgtcgcgtgcgtgacgtcatccagcggcgcctcgcgaggctccagtggccttgacctcccgcggcgtgggaggctgcgcggcgatgctgcagttcgtccgggccggggcgcgggcctggcttcggcctaccggcagccagggcctgagttccctggcggaagaggcagcgcgtgcgaccgagaacccggagcaggtggcgagcgagggtctcccggagcccgtgctgcgcaaagtcgagctcccggtacccactcatcgacgcccagtgcaggcctgggtcgagtccttgcggggcttcgagcaggagcgcgtgggcctggccgacctgcaccccgatgttttcgccaccgcgcccaggctggacatactgcaccaggttgctatgtggcagaagaacttcaagagaattagctatgccaagaccaagacgagagccgaggtgcggggcggtggccggaagccttggccgcagaaaggcactgggcgggcccggcatggcagcatccgctctccgctctggcgaggaggaggtgttgcccatggcccccggggccccacaagttactactacatgctgcccatgaaggtgcgggcgctgggtctcaaagtggcactgaccgtcaagctggcccaggacgacctgcacatcatggactccctagagctgcccaccggagacccacagtacctgacagagctggcgcactaccgccgctggggggactccgtactcctcgtggacttaacacacgaggagatgccacagagcatcgtggaggccacctctaggcttaagaccttcaacttgatcccggctgttggcctaaatgtgcacagcatgctcaagcaccagacgctggtcctgacgctgcccaccgtcgccttcctggaggacaagctgctctggcaggactcacgttacagacccctctaccccttcagcctgccctacagcgacttcccccgacccctaccccacgctacccagggcccagcggccaccccgtaccactgttgatgtgaagcacctcttctgagccaggccgagcccctggccgacttgggagcctcaggcccacgcccacccttcgaggaaggtgtcacctggaccccttcattccacggaggaagctgaggccacagggagcggccatcgccattgggaaggggcgactccacggaaagcccagacgggcttctgcatccattccctctttttgtttttaaaataaattgtatttttgaatcaaaaaaaaaaaaaaaaaaaaaaaaaaaaaaaaaaaaaaaaaaaaaaaaaaaaaaa

SEQ ID NO: 6295 - DNA, 1054 bp, Homo Sapiens
  NM_147130
ccacaagctggccccttggcctcctagagaccctgacatctcctccagcagcatctgtcctctctcctcagggaggcaagcatttgatgctcgaggtccctggcagttgtggtccttggcaagtgatgtgtgagtcccgtgtgtcataggaagctccccatccccatctggtgaccaaaggcctggctacaagtagtgagtccttcctcctccacccagacctcactgctcagatccccttcgccaactgggacatcttccgacatggcctggatgctgttgctcatcttgatcatggtccatccaggatcctgtgctctctgggtgtcccagccccctgagattcgtaccctggaaggatcctctgccttcctgccctgctccttcaatgccagccaagggagactggccattggctccgtcacgtggttccgagatgaggtggttccagggaaggaggtgaggaatggaaccccagagttcaggggccgcctggccccacttgcttcttcccgtttcctccatgaccaccaggctgagctgcacatccgggacgtgcgaggccatgacgccagcatctacgtgtgcagagtggaggtgctgggccttggtgtcgggacagggaatgggactcggctggtggtggagaaagaacatcctcagctaggggctggtacagtcctcctccttcgggctggattctatgctgtcagctttctctctgtggccgtgggcagcaccgtctattaccagggcaaatgtctgacctggaaaggtccaagaaggcagctgccggctgtggtcccagcgcccctcccaccaccatgtgggagctcagcacatctgcttcccccagtcccaggaggctgagcctgattgtcctgagaaatgggaaggatcagatatgactcctccttggcaactgccctttcctgccaggcccacacataccctcttctggctgttaggggagcttgggtccctgaacactgtcattcacccaataaattactatttgaccccagagtgggtggaagggtgagccatgtgtttt

SEQ ID NO: 6296 - DNA, 3588 bp, Homo Sapiens
  NM_147133
aacgcgccacacagattcgggctgcgcaacctctgtggccgtctacacggcgcgcagatgcgaatattctcgcggcgccggaagtccggggcacgtgacctggtgacagtgctgacttggctgtacagctcgatctaggttctgcggcacgggatggcggaggcgcctcctgtctcaggtacttttaaattcaatacagatgctgctgaattcattcctcaggagaaaaaaaattctggtctaaattgtgggactcaaaggagactagactctaataggattggtagaagaaattacagttcaccacctccctgtcacctttccaggcaggtcccttatgatgaaatctctgctgttcatcagcatagttatcatccgtcaggaagcaaacctaagagtcagcagacgtctttccagtcctctccttgtaataaatcgcccaagagccatggccttcagaatcaaccttggcagaaattgaggaatgagaagcaccatatcagagtcaagaaagcacagagtcttgctgagcagacctcagatacagctggattagagagctcgaccagatcagagagtgggacagacctcagagagcatagtccttctgagagtgagaaggaagttgtgggtgcagatcccaggggagcaaaacccaaaaaagcaacacagtttgtatacagctatggtagaggaccaaaagtcaaggggaaactcaaatgtgaatggagtaaccgaacaactccaaaaccggaggatgctggacccgaaagtaccaaacctgtgggggttttccaccctgactcttcagaggcatcctctagaaaaggagtattggatgggtatggagccagacgaaatgagcagagaagatacccacagaaaaggcctccctgggaagtggagggggccaggccacgaccaggcagaaatccaccaaaacaggagggccaccgacatacaaacgcaggacacagaaacaacatgggccccattccaaaggatgacctcaatgaaagaccagcaaaatctacctgtgacagtgagaacttggcagtcatcaacaagtcttccaggagggttgaccaagagaaatgcactgtacggaggcaggatcctcaagtagtatctcctttctcccgaggcaaacagaaccatgtgctaaagaatgtggaaacgcacacaggttctctaattgaacaactaacaacagaaaaatacgagtgcatggtgtgctgtgaattggttcgtgtcacggccccagtgtggagttgtcagagctgttaccatgtgtttcatttgaactgcataaagaaatgggcaaggtctccagcatctcaagcagatggccagagtggttggaggtgccctgcctgtcagaatgtttctgcacatgttcctaatacctacacttgtttctgtggcaaggtaaagaatcctgagtggagcagaaatgaaattccacatagctgtggtgaggtttgtagaaagaaacagcctggccaggactgcccacattcctgtaaccttctctgccatccaggaccctgcccaccctgccctgcctttatgacaaaaacatgtgaatgtggacgaaccaggcacacagttcgctgtggtcaggctgtctcagtccactgttctaacccatgtgagaatattttgaactgtggtcagcaccagtgtgctgagctgtgccatgggggtcagtgccagccttgccagatcattttgaaccaggtatgctattgcggcagcacctcccgagatgtgttatgtggaaccgatgtaggaaagtctgatggatttggggatttcagctgtttaaagatatgtggcaaggacttgaaatgcggtaaccatacatgttcgcaagtgtgccaccctcagccctgccagcaatgcccacggctcccccagctggtgcgctgttgcccctgtggccaaactcctctcagccaattgctagaacttggaagtagtagtcggaaaacatgcatggaccctgtgccttcatgtggaaaagtgtgcggcaagcctctgccttgtggttccttagatttcattcatacctgtgaaaagctctgccatgaaggagactgtggaccatgctctcgcacatcagttatttcctgcagatgctctttcagaacaaaggagcttccatgtaccagtctcaaaagtgaagatgctacatttatgtgtgacaagcggtgtaacaagaaacggttgtgtggacggcataaatgtaatgagatatgctgtgtggataaggagcacaagtgtcctttgatttgtgggaggaaactccgttgtggccttcataggtgtgaagaaccttgtcatcgtggaaactgccagacatgctggcaagccagttttgatgaattaacctgccattgtggtgcatcagtgatttaccctccagttccctgtggtactaggccccctgaatgtacccaaacctgcgctagagtccatgagtgtgaccatccagtatatcattcttgtcatagtgaggagaagtgtcccccttgcactttcctaactcagaagtggtgcatgggcaagcatgagtttcggagcaacatcccctgtcacctggttgatatctcttgcggattaccctgcagtgccacgctaccatgtgggatgcacaaatgtcagagactctgtcacaaaggggagtgtcttgtggatgagccctgcaagcagccctgcaccacccccagagctgactgtggtcacccgtgtatggcaccctgccataccagctcaccctgccctgtgactgcttgtaaagctaaggtagagctacagtgtgaatgtggacgaagaaaagagatggtgatttgctctgaagcatctagtacttatcaaagaatagctgcaatctccatggcctctaagataacagacatgcagcttggaggttcagtggagatcagcaagttaattaccaaaaaggaagttcatcaagccaggctggagtgtgatgaggagtgttcagccttggaaaggaaaaagagattagcagaggcatttcatatcagtgaggattctgatcctttcaatatacgttcttcagggtcaaaattcagtgatagtttgaaagaagatgccaggaaggacttaaagtttgtcagtgacgttgagaaggaaatggaaaccctcgtggaggccgtgaataaggttgaagtcgaaacatcccactggacatttctctaaggccagcttgatgaaaaaaaaaaagcaatcaagtcctggaaacactttcaacctagagtagttgtaggaaaaagtcacaacttctttgaggatccttatctttctcaaaacacagccattataacatctgtggaagcctgtcctggttcaggacagttgactgcagaaaagatctacagtcggctgggcacagtgtctcatgcctgtaatgccagcactttgggaggccaaggcaggcagatcacttgaggtcaggagttctagatcagcttggccaacatgacgaaaccctgtctctactaaaaatataaaaattagctgggtgtggtggcgggcacctgttattccagctacttgcaa

SEQ ID NO: 6297 - DNA, 3638 bp, Homo Sapiens
  NM_147134
aacgcgccacacagattcgggctgcgcaacctctgtggccgtctacacggcgcgcagatgcgaatattctcgcggcgccggaagtccggggcacgtgacctggtgacagtgctgacttggctgtacagctcgatctaggttctgcggcacgggatggcggaggcgcctcctgtctcaggtacttttaaattcaatacagatgctgctgaattcattcctcaggagaaaaaaaattctggtctaaattgtgggactcaaaggagactagactctaataggattggtagaagaaattacagttcaccacctccctgtcacctttccaggcaggtcccttatgatgaaatctctgctgttcatcagcatagttatcatccgtcaggaagcaaacctaagagtcagcagacgtctttccagtcctctccttgtaataaatcgcccaagagccatggccttcagaatcaaccttggcagaaattgaggaatgagaagcaccatatcagagtcaagaaagcacagagtcttgctgagcagacctcagatacagctggattagagagctcgaccagatcagagagtgggacagacctcagagagcatagtccttctgagagtgagaaggaagttgtgggtgcagatcccaggggagcaaaacccaaaaaagcaacacagtttgtatacagctatggtagaggaccaaaagtcaaggggaaactcaaatgtgaatggagtaaccgaacaactccaaaaccggaggatgctggacccgaaagtaccaaacctgtgggggttttccaccctgactcttcagaggcatcctctagaaaaggagtattggatgggtatggagccagacgaaatgagcagagaagatacccacagaaaaggcctccctgggaagtggagggggccaggccacgaccaggcagaaatccaccaaaacaggagggccaccgacatacaaacgcaggacacagaaacaacatgggccccattccaaaggatgacctcaatgaaagaccagcaaaatctacctgtgacagtgagaacttggcagtcatcaacaagtcttccaggagggttgaccaagagaaatgcactgtacggaggcaggatcctcaagtagtatctcctttctcccgaggcaaacagaaccatgtgctaaagaatgtggaaacgcacacaggttctctaattgaacaactaacaacagaaaaatacgagtgcatggtgtgctgtgaattggttcgtgtcacggccccagtgtggagttgtcagagctgttaccatgtgtttcatttgaactgcataaagaaatgggcaaggtctccagcatctcaagcagatggccagagtggttggaggtgccctgcctgtcagaatgtttctgcacatgttcctaatacctacacttgtttctgtggcaaggtaaagaatcctgagtggagcagaaatgaaattccacatagctgtggtgaggtttgtagaaagaaacagcctggccaggactgcccacattcctgtaaccttctctgccatccaggaccctgcccaccctgccctgcctttatgacaaaaacatgtgaatgtggacgaaccaggcacacagttcgctgtggtcaggctgtctcagtccactgttctaacccatgtgagaatattttgaactgtggtcagcaccagtgtgctgagctgtgccatgggggtcagtgccagccttgccagatcattttgaaccaggtatgctattgcggcagcacctcccgagatgtgttatgtggaaccgatgtaggaaagtctgatggatttggggatttcagctgtttaaagatatgtggcaaggacttgaaatgcggtaaccatacatgttcgcaagtgtgccaccctcagccctgccagcaatgcccacggctcccccagctggtgcgctgttgcccctgtggccaaactcctctcagccaattgctagaacttggaagtagtagtcggaaaacatgcatggaccctgtgccttcatgtggaaaagtgtgcggcaagcctctgccttgtggttccttagatttcattcatacctgtgaaaagctctgccatgaaggagactgtggaccatgctctcgcacatcagttatttcctgcagatgctctttcagaacaaaggagcttccatgtaccagtctcaaaagtgaagatgctacatttatgtgtgacaagcggtgtaacaagaaacggttgtgtggacggcataaatgtaatgagatatgctgtgtggataaggagcacaagtgtcctttgatttgtgggaggaaactccgttgtggccttcataggtgtgaagaaccttgtcatcgtggaaactgccagacatgctggcaagccagttttgatgaattaacctgccattgtggtgcatcagtgatttaccctccagttccctgtggtactaggccccctgaatgtacccaaacctgcgctagagtccatgagtgtgaccatccagtatatcattcttgtcatagtgaggagaagtgtcccccttgcactttcctaactcagaagtggtgcatgggcaagcatgagcagtcccactactgggcgtctacccagaagaaaagaagtcattatatgaaaaagatacctgcacacgcatgtttatagcagcacaattcacaattgcaaaaatgtggaaccagcccaactgcccatcagtcaacaagtggataaagaaattgtggtgtatctatacgtaccatggaatactactcagccaggaacgaaataatggcattcacagcaacctggatggatttggagaccattattctaagtgaagtaactcaggaatggaaaaccaaacatcgtatgttctcaattataagagggagctaagctatgaggacgcaaaggcatgagaatgatacaatggactttggggactctggggaaaggacgggaggcgggtgagggataaaaaactacacactgggtccgagcacggtggctcatgcctataatcccagcactttgggaggccaaggcaggtagattatgaggtcgggagttcgaaaccagcctggccaacaaggtgagaccccccccatctctactaaaataattagccgggcctggtggcgcatccctgtaatcccagctactttacttgggaggctgaggcaggagaattgcttgaactcgggaggcggatgttgcagtgagccaatatcgcaccactgcactccagcctgggcaacagagcaagactccgtctcgaaaaaaaaaataaattttaaaaactacacattgggtacaatgtacactcctcgggtgatgggtgcaccaaaatctcaaaaatcactactaaggaacttatccatgtaaccaaacaccacctgttccccaagaactattgaaataagaaaaaagaaaaaaaaaaaatcactgattgcaggtcaccctaacagatataataatgaaaaagtctgagatgttgcgagaattaccaaaatgtgatgcagacacgaaatgagcatgtgctgttggaaaagtggaacagatagacttgctggagacagggttgccacaaagtttcaatttgtaaaaaatgtgatatctatgaaatgcaataaagtgaagtccaataa

SEQ ID NO: 6298 - DNA, 1372 bp, Homo Sapiens
  NM_147148
aagctggcgaggccgagcccctcctagtgcttccggaccttgctccctgaacactcggaggtggcggtggatcttactccttccagccagtgaggatccagcaacctgctccgtgcctcccgcgcctgttggttggaagtgacgaccttgaagatcggccggttggaagtgacgaccttgaagatcggcgggcgcagcggggccgagggggcgggtctggcgctaggtccagcccctgcgtgccgggaaccccagaggaggtcgcagttcagcccagctgaggcctgtctgcagaatcgacaccaaccagcatcatgtccatgacactggggtactgggacatccgcgggctggcccacgccatccgcctgctcctggaatacacagactcaagctacgaggaaaagaagtatacgatgggggacgctcctgactatgacagaagccagtggctgaatgaaaaattcaagctgggcctggactttcccaatctgccctacttgattgatggggctcacaagatcacccagagcaacgccatcctgtgctacattgcccgcaagcacaacctgtgtggggagacagaagaggagaagattcgtgtggacattttggagaaccaggctatggacgtctccaatcagctggccagagtctgctacagccctgactttgagaaactgaagccagaatacttggaggaacttcctacaatgatgcagcacttctcacagttcctggggaagaggccatggtttgttggagacaagatcacctttgtagatttcctcgcctatgatgtccttgacctccaccgtatatttgagcccaactgcttggacgcctttccaaatctgaaggacttcatctcccgctttgaggtttcctgtggcataatgtgatggtcaattttctgcatcaacttgactgggctaagggatgctcagatggcaggtaaaatcattgtgcttgtgagggtgtttccagaagagatttgcctttgaatcagaagacagcaaagatttccttcagcaatgaaggaggcatccaccaaactgtcagggcccagagagaagaaaaagacaggaagggtgaatttgacctctctgactgggacatccatctctgcctatcctgggacctccacactcctggttctctggccttcagacttgatcagggactaacaccatcgcctcccacccccacctttgttctgaggcctttagcctctgaatgataccactggctttcctgcttctctatcctgcagtcggcagatcatgggacttcttcactccaaaattgtgtgagccaattcccataacagatagataaatttataaataaacacacaaatttcctacagcct

SEQ ID NO: 6299 - DNA, 1580 bp, Homo Sapiens
  NM_147157
ctccgaggccgtgagcgcaaagcctcaggccccggctccctcctgagctgcgccgtgccaggccgcccgccgggatgcagtgggccgtgggccggcggtgggcgtgggccgcgctgctcctggctgtcgcagcggtgctgacccaggtcgtctggctctggctgggtacgcagagcttcgtcttccagcgcgaagagatagcgcagttggcgcggcagtacgctgggctggaccacgagctggccttctctcgtctgatcgtggagctgcggcggctgcacccaggccacgtgctgcccgacgaggagctgcagtgggtgttcgtgaatgcgggtggctggatgggcgccatgtgccttctgcacgcctcgctgtccgagtatgtgctgctcttcggcaccgccttgggctcccgcggccactcgggggagacggtagtacacgggcctggtgaggcaacagctgtggagtgggggccaaacacatggatggtggagtacggccggggcgtcatcccatccaccctggccttcgcgctggccgacactgtcttcagcacccaggacttcctcaccctcttctatactcttcgctcctatgctcggggcctccggcttgagctcaccacctacctctttggccaggacccttgaccagccaggcctgaaggaagacctgcggatggacaggagcgggcaggcccgcacatatccacttgctggagcccatgtttacagacagggacatacaccatgcagatcctgagttcctgctgtatgagcagggatatccatgcttatgtatccaaacacagagacccatgggaacaaatgagacacatatagatactgagacctgtgtgtacagtaggaccatgcactcacacccatctggagagggagcccccggtataccaagggagccagttgtgttcagacacacacatcacagcttgactcactaactgaggcctttccatagctccacagcttcccacctcctccccaccaaaccggggttctagagttaaggatgggggagggtattatactgcctcagtctgactcctcaacccagcagcaatttgaggggatgagggggaagaggagctgccttttggaggcccccttcacctgcagctatgatgcccttccccttctcccctgtcctcaccatatgccttatccccattctactcccctgctatgcaagtgcccctgtggcttgtccccaaccccctcagcaacaaagctcagctggggaacgagagtaatttgaagaatgcttgaagtcagcgtcttccattccagaaagacccccattcttcctttgggggtatgatgtggaagctggtttcagcccaggacccaccactgaggagaggatctagacaggtgggcctaattccaaggggcccttcctggcctggagaaggccttttacacacacacaacacatacacacacacacacacacacacatatcacagttttcacacagcccctgctgcattctctgtccatctgtctgtttctattaataaagatttgttgatctgttccaaaaaaaaaaaaaaaaaa

SEQ ID NO: 6300 - DNA, 1235 bp, Homo Sapiens
  NM_147184
aggagccagaaccactcggcgccgcctggtgcatgggaggggagccgggccaggaacaatatgttagccgtgcactttgacaagccgggaggaccggaaaacctctacgtgaaggaggtggccaagccgagcccgggggagggtgaagtcctcctgaaggtggcggccagcgccctgaaccgggcggacttaatgcagagacaaggccagtatgacccacctccaggagccagcaacattttgggacttgaggcatctggacatgtggcagagctggggcctggctgccagggacactggaagatcggggacacagccatggctctgctccccggtgggggccaggctcagtacgtcactgtccccgaagggctcctcatgcctatcccagagggattgaccctgacccaggctgcagccatcccagaggcctggctcaccgccttccagctgttacatcttgtgggaaatgttcaggctggagactatgtgctaatccatgcaggactgagtggtgtgggcacagctgctatccaactcacccggatggctggagctattcctctggtcacagctggctcccagaagaagcttcaaatggcagaaaagcttggagcagctgctggattcaattacaaaaaagaggatttctctgaagcaacgctgaaattcaccaaaggtgctggagttaatcttattctagactgcataggcggatcctactgggagaagaacgtcaactgcctggctcttgatggtcgatgggttctctatggtctgatgggaggaggtgacatcaatgggcccctgttttcaaagctactttttaagcgaggaagtctgatcaccagtttgctgaggtctagggacaataagtacaagcaaatgctggtgaatgctttcacggagcaaattctgcctcacttctccacggagggcccccaacgtctgctgccggttctggacagaatctacccagtgaccgaaatccaggaggcccataagtacatggaggccaacaagaacataggcaagatcgtcctggaactgccccagtgaaggaggatggggcaggacaggacgcggccaccccaggcctttccagagcaaacctggagaagattcacaatagacaggccaagaaacccggtgcttcctccagagccgtttaaagctgatatgaggaaataaagagtgaactgaaaaaaaaaaaaaaaaaaaaaaaaaaaaaaaaa

SEQ ID NO: 6301 - DNA, 3497 bp, Homo Sapiens
  NM_147188
gtggcgcggacgcctgctcagtgcgcgccggccgggcaaccctatgctggcgtaatcgggttcctccgagccgccgtaggactggttccggcgggctggtgaggaatggagccggtaggctgctgcggcgagtgccgcggctcctccgtagacccgcggagcaccttcgtgttgagtaacctggcggaggtggtggagcgtgtgctcaccttcctgcccgccaaggcgttgctgcgggtggcctgcgtgtgccgcttatggagggagtgtgtgcgcagagtattgcggacccatcggagcgtaacctggatctccgcaggcctggcggaggccggccacctggaggggcattgcttggttcgcgtggtagcagaggagcttgagaatgttcgcatcttaccacatacagttctttacatggctgattcagaaactttcattagtctggaagagtgtcgtggccataagagagcaaggaaaagaactagtatggaaacagcacttgcccttgagaagctattccccaaacaatgccaagtccttgggattgtgaccccaggaattgtagtgactccaatgggatcaggtagcaatcgacctcaggaaatagaaattggagaatctggttttgctttattattccctcaaattgaaggaataaaaatacaaccctttcattttattaaggatccaaagaatttaacattagaaagacatcaactcactgaagtaggtcttttagataaccctgaacttcgtgtggtccttgtctttggttataattgctgtaaggtgggagccagtaattatctgcagcaagtagtcagcactttcagtgatatgaatatcatcttggctggaggccaggtggacaacctgtcatcactgacttctgaaaagaaccctctggatattgatgcctcgggtgtggttggactgtcatttagtggacaccgaatccagagtgccactgtgctcctcaacgaggacgtcagtgatgagaagactgctgaggctgcgatgcagcgcctcaaagcggccaacattccagagcataacaccattggcttcatgtttgcatgcgttggcaggggctttcagtattacagagccaaggggaatgttgaggctgatgcatttagaaagttttttcctagtgttcccttattcggcttctttggaaatggagaaattggatgtgatcggatagtcactgggaactttatattgaggaaatgtaatgaggtaaaagatgatgatctgtttcatagctatacaacaataatggcactcatacatctggggtcatctaaataataattaaagtggctttcataatatgtaacttttgggttctgcctttttcagaaaatggaaacttgggccatgtgtatttcaaacaaaaataactttagatatatcttttttgtagctttgattgatgctctaagatcacatgagggtagtatttaatatattagatgaaggacaactttggacataacactgactaggagttgagagcttttgcatcaggcagaagcaaactgattatagttgtgttgcaccagatcatgtagctgctgtgtaacatgaccttaaatagtcttcctgcataggaagagcaaaagggtattcatcaataggatatagatttaagacattccctgactaccccttgcgttgttaggtgatgtcttttagcagaatcatgaagaccttttttctcccttaataaaggagaaaaatatactgatggctggagaaatttttctctgcctttcagttttatgaattttttcagaagtaacaatattattattgactttttacttatttgataaaaattaaagaactatttttgttttggtcagataaattgacaagactaatcagtattttattataagtaaaagatttttcttctttccttaaaaatatttttttttcacctaggtctaaatagctaactaactggtagaccagagtattacatcatcttattttggttttataccaataaaacatagcgtggaactcattcaggtaatgttttgcatttcattgcttttggatgaacaaaggaagtaaactaatcctttataaatgaaaacccagaatagttggtatgtcagctagtcattcctgtcatattcccagtagaatgattttcaagtttgaatttctgtacaaatatctaaataagagatgtgcagagagcaccaattttccttcaatatccattctttacttttcacataatgatagaacctttgatttttcaagtgggtatgcctcctagaataaagactacatttcccagtctcctgtgcaggtatgactgtgttctggacaatggaatgtgaggggaaacgattttttgtgtccttaaaatggcatgaccatttatttgcccctttctccatcctgttgcttggaatgtggatctggtagtgagccatcttggaccctgaagaggaggcaacacaccattgtagaagaaaaacaacagaaggatcctggtccctgtacgacctcattgaagaaacaccataagtggcgtggactatctacctccagactgttttacaagagagaaattagcatattccatctaatacagtatgatgtaactaatgttacttttgtaacagtcagtggtttgttctaacaggacagtagaacacttgcaaggtaagtaaaaccaaatgtattagcattattcctgcttttccttttttgtcacttttatcctttttttaaaactgaaaatatttttctcttgctatttatatatatatgataaaaatgcttggaagagtcctttaatttatggttattctaaatcctagttcctgaggcaagtccaaagaaaaatttgtcaaaacttttcatctatgaatatttatatttagctcttgctatttagctattatcaaaatacctcaaaattttagtccttgaatgtgctcatatagcccataaggcaaatattttttaaactttattgtccctgatattaaccagaattggttgaatagtagaggaaaagggatttttaaaactgaaaatatgaacaaaatgagccttagaattgaatggattattttaaacaaattaatactcatataaaatgttttgctgcttctcaaagagtctgatacagggtaatttcatacaatatttgatgttgttaaagcattcctttttatagctgagcctttggagcttgttatgaacagtaaaatcatttagtcacatggttgtaaccttagtgcaaagtaaaaagggaaaagttgacctaatagaaacaatagtagtattgataagaacaaaagtcatcctccctgcctctcagaggccctgaagtcctgtgaggaagggaaatagtaatttaaccaaagttaaatctgtgtaactcatttattacaattttgaaaggcttgtcttagaagcattaaaggagtattagctaaaaacaaaaaaaaaaaaaaaaa

SEQ ID NO: 6302 - DNA, 4368 bp, Homo Sapiens
  NM_147189
actcggtgcagaccgaaccatcgcggccgccgccagccgggcccttcgcggccgcgcgtcctgggcccgttccgccagccccgtctgctctctacccgcggccccgcggcggcgaccgtgaacactcggcggcccctacagcccgctctcggcccttcgtccctcgcgggccccgactctccctccttgcagtcccccggagcctggctcccggctcgggccgcaccgccagggactggggtgagcggcccagaaatctccaaattggacatccagagcagcattcttgttctgtctacgtcttgaattagaaactatcaagctctgtaagtcctgaaaaggaaataaaaggtgcgtccctacccaagaggagaggtggccagtaaatgtcagctgaggcaccgaaggctgcgatgcaccagcccggtgccctgtgaggacggccacatcaatagtggtaacactcacaatttcctgctgcagagagcattttaagaaaggacagcattcctgtgacctctgcctaccatccataaaatactcattcccctctcagctctgcctgcagttgaacacaaagacctggaggagactcccacctccttcagggagaagaaaggaggcagcgaagcagattaaaggaacttgtggcttgtggcctttttgtgcaagggccgcctggaaggggagaaaagtgtatgaaagccaccgtggcggttaatgagctgtgagatgaggcgctgctgcggccgctgctgctgacactcgctcccaggctgcacccgccgcccttggcgcttcatgtacatgtgtctattcaggccttgcggaggcgcccagaagagcatccaacacggctgccggggaaagaccgcccaccatgcccacggagaccctacagacaggtagcatggtgaagccggtcagccccgcgggcaccttcacctctgctgtgcccctgcgcatcctgaacaaggggccagactacttccgcaggcaggccgagcccaaccccaagaggctcagcgccgtggagaggctggaggccgacaaggccaagtacgtcaagagccaggaggtgatcaacgccaagcaggagcccgtgaagcccgccgtgctggccaagcccccggtgtgcccggctgccaagcgcgcactgggcagccccacgctcaaagtgttcggcaaccacgccaagaccgagagcggcgtgcagagggagaacctgaagctggagatcctgaagaacatcatcaatagctccgagggctctagctcgggctcggggcacaagcacagctcccgcaactggccgccccaccggtcggaagccactgacctgcaccgtcactccttcgcggagtccctgaaggtctaccccacgcagggccgcaggagcccgcaggagggcggctcccacgtgggcaggagactgctggagcagtcagccgagtccttcctccacgtgtcccacagctcttcggacatccgcaaggtgaccagcgtgaagcccctcaaggccatcccctgcagtagctctgcccctcccctgcctcccaagcccaaaatcgcagccatcgcctccatgaagtcccccgaggccgaccctgtggaaccagcttgtggagtcagccgaagaccctccctccagcggtctaagtcagacttgagtgacagatatttccgagtggacgcggacgtggagaggttcttcaactactgtggactggacccggaagagctggaaaacctgggaatggaaaactttgcaagggctaattctgacataatatccctcaacttccgcagcgcaagcatgatcagctcagactgtgaacagtctcaggacagtaacagtgaccttagaaatgatgacagtgccaatgaccgcgtgccgtatggcatttctgccatcgaaagaaatgctagaatcatcaagtggttatatagcatcaaacaagctagagagtcacagaaggtctcccatgtgtaagacagtgcgtggaaaggagggagcgtgggtctctgtgcttacgcagttgtgaaggttgtgaggtctccttgaagtgttgtgagcttctccactctttgtgttgcttgttgtgcaatgttttcaagttgcatgcttgtcaacatggggactgacctggcttccacgtcaccatcgctacagagcctggctgaacacgcgtcatctgccaaaagtttcaggccagaatctaattagggctttgctcgtaagcaaaactgtttacatgaaaatggtatacaacttcttcgatatttatgtggttcttgtgtttttatatcccgcgctattgtgtcttaattaaaagttttatcaactggcttttaagttgagagcagaatctttttgaaataaaaagccactttgcctacatgtgagactattccagtgggacagtaaatgggatctgctaccaaacagataatgactgaccgaacatagaaccaggctgggttttctgtggaataaagtggtgagcctgacgttaatcgtttacatgttgaaattctcttgccacttagtgaagcagtcattggggtaacaatgctacgttttgtgtccgattcagtgtgtaaacgttggtggttctatgtaatactgaccccaaggaaagacgatcagatacaaagaaagatggttaaatctaggaggttgggtgtttgggggttttgttgatgttgttctgattgggataattcagaaattcctaatattatctttcgacagaatgaccaccctaaaacaaatactgaatgcctttaaaaaaaaaaaaagttgtggttttttgttttttttttttttttttttggtcgagaactactaatttcatgctatttctttctctctccctttgttgttatttgatttgggggaagggagtgaggcttgtgcagatttgagctatctgaagacatgaacagaagtcaaataccagccatatcagtagagccttccattcaaaagtgaacacacttggtagctgaaccatatctgagcagcgtgattctgttgtcttgcatatgttattctctcaggctgtggatctttgttacagctctaggaaactgtagaaatacaatgctatgtagcttttccaccccatggtctctagtgctgcctatcaacttgtccccttttttcccaataacctgtcttccaggtggtacagttagctgtcactcagctgacaccatgatgtggcagcagagagggaaacctacaagtggtttgcctcattgcctttgccacatctgaagttctcagcagcactaccttagacttcatgagctaataggaaactttttatggtgtaaatgctgtaagactttgtacatacttcagttgttatgaaatctttaaagaaaaaaagaaaaagttacgctaataaattgctgtggtgcaggcactaatggtggtggtttctctttgtcctgtattgcacaaaagtttaactttggactatgaaacagaagcagatttttgataggcttgaagaaacattatttcattaagttattttcaccatattccaattactctaaacaccagtgttcttaattgtggctctagcaatgtgcttttgctaaactgattacatcaaggttcctaaaatgtgctgcagcatctcagttcacacttgtgttatttttgtcttttcttaaacatcaggattttttacatcttccacacaactcttcagttataaatattttgagttctcaccttggaggcacacctttgaaatgtatggcttcgtttttatttgtaccagcccaacatccctaccatggcatgtgttcacacactcgctcctccactccttccttcattcctcttcaaaatgtcactgtttgagtgactcatttcaggtatcatggtaggcacgggactgccatagtcaacaacacagtctctgcctcaaggaacttagattttcccctttattttaagagaaataacattactcttagtggacatgctctatctgttatatttggacaatgagtattccatgattatttattgcatcaagttatttgaaatttaatgcttcttacaaaattccatatactatgcaaatgtaaaatgaagccctatttaaaaggtaattttcagaaacaaattatatgattctcagctattactgtttataaatatcttgcttctgaaaagcaaatttgcttccttgactctttcccctggttttgaattctgcctggattttttattcatgttcagtaaaactaaaaccctgcttcccagaagaactgttttggaatgcagctatgagtgggggtgatacaatgtgttcaatataatagaataaaaataagttttct

SEQ ID NO: 6303 - DNA, 2255 bp, Homo Sapiens
  NM_147194
cttaggcaaggggtccaggtcagagtttagagctttcaaatcccaacttgcccctggggattgcgcggctgatgtttagaacgcctagtcaagccaaccggctcgctcttgtttcagcaaaccctgacttacgtctcctatttgacttgaggcggcacagtggccaagtcgattggccgtggcaagtgaccctccctgtggctgaagtgttctgaggactggcgagagaggcgcgccatgcttgccccctgctcaggttgggagcttggctgcttccgtctctgtctccgtcaggtccgactgtgggctggcgctgggcgctgggcttgctgggcttgccaagccaggccgtacagctcaggtgggagcgagcgctggcccggatcggagactgaggtccctccgcctggcccggcgcgccgaactctgaaggagtggacactgcaggtgagcccgtttggtcggctgcgggcgcggctcccgtgccacctggccgtgaggcccctggaccccctcacctacccggatggcgaccgcgtgctggtcgcggtgtgcggcgtggagggcggcgtgcggggcctggacggcctgcaggtgaagtacgacgaggatctggaggagatggccattgtgtctgatactatccacccccaggcgtccgtggaggtttagatatcaagtcatcagggtctggctgtgtaaaagttcaaagtattgagggtgataattgcaaaattgaaacagagcatgggactagtatcttgcagtctgttaagggtcaaaaattgcatgttcaaacaaaaggaggcaaagtgatctgtctgggaacagtttatggaaatatagatattcatgcatcagataaaagtgctgtgaccatagataaactgcagggaagttctgttactgtatctaccgaagatggtttgctgaaagccaagtatctttatacagaatcatcatttctgtcttctgctgctggggatattacattaggaagtgttcatggtaatataacattacaaagcaagatgggtaacatcacagtagattcgtcttctggatgtctaaaagcctcaactaatcagggtgccatagatgtttatgtcagccaactggggaaagtggaattgaaatcccataaaggttctattattgtcaaggtcccatcttcacttcaagctcatttacagttatcagggaaagaggttgatgtgaactcagaagtccatgttcaggaaatggctgaagttcgtaaagatgatgttgtaacagtgactggactcatgaatcaagcaagcaaacgtgaaaaatggattaaggctgatgccccaaaaggcactgtaagttttagaaggcaaagttggtttcagtccctgaaactgcaggactaaaactgatttgagttggatttatgatttttaacaatgattcgcagatctgtgactacaaaaatgtaaatcccaccattcatataaaggttgaaaacaacaaattgagaatgaatactggtgaactgttttgggaggctttttcaaaatttgtgctttgctattgtattcattttctactgctctgtaacaaattaccacaaatttagcagcataaaataatactcatttacagctatgtctaggttctccgctcagggaatcacaaggctagaaatcaagattttggccaggctgagttctcatctggagtctctgggaagaaatctacttccaacttcattcagattattgggaaaatccagttccttgtgactggatgactgaggtctccattttcttgctggctgtcagccagcaatcactctaagcttctagaggccacccacatgccttctcatgttgcccctccatcttcaagccagcagtgatgcgctgagttcttctcatgctttgaatatctgacttcttctgcagccagctggaagaatatatacttttaaagggctcacttgattaggtcaggcccacccaggataacctttgttttgccatataatgtaacattcataggagtgatggcccatcacattcagttttcactcccactcaaggaaaggagattatacaaaggcatccatcatgtggggacaattagcttagaattctttataatgtagctctcacatgacaggttttctacttagtaccttttatggcatcaatgtaaatttaagctgtaaataaaaaacaaatatgtgaagcaaaaaaaaaaaaaaaaaaaaaaaaaaaaaaaaaaaaaaa

SEQ ID NO: 6304 - DNA, 2667 bp, Homo Sapiens
  NM_147686
gctgatgttttaagcagttagaggaggtggaagaagctcgactccctcttcttccccattatctgcccacaatcccctcctttggagctgctaatgattactaattcttaacattcgagttcaatctcctcccggagacaccctcccaggcgagggcactgcgactacactgaggttctgcccactcctgggcagcttcttagctgggtggcgaaaacaaaaatgccgcctaattggtcactggccctttctcatgaatgaaggaggtttctgttttaagaaataaagtgactcctcagccgttgattcactgcccacagggagattttgagcagaggcttcctaggctccgtagaaatttgcatacagcttccacttcctgcttcagagcctgttcttctacttacctgggcccggagaaggtggagggagacgagaagccgccgagagccgactaccctccgggcccagtctgtctgtccgtggtggatctaagaaactagaatgaaccgaagcattcctgtggaggttgatgaatcagaaccatacccaagtcagttgctgaaaccaatcccagaatattccccggaagaggaatcagaaccacctgctccaaatataaggaacatggcacccaacagcttgtctgcacccacaatgcttcacaattcctccggagacttttctcaagctcactcaaccctgaaacttgcaaatcaccagcggcctgtatcccggcaggtcacctgcctgcgcactcaagttctggaggacagtgaagacagtttctgcaggagacacccaggcctgggcaaagctttcccttctgggtgctctgcagtcagcgagcctgcgtctgagtctgtggttggagccctccctgcagagcatcagttttcatttatggaaaaacgtaatcaatggctggtatctcagctttcagcggcttctcctgacactggccatgactcagacaaatcagaccaaagtttacctaatgcctcagcagactccttgggcggtagccaggagatggtgcaacggccccagcctcacaggaaccgagcaggcctggatctgccaaccatagacacgggatatgattcccagccccaggatgtcctgggcatcaggcagctggaaaggcccctgcccctcacctccgtgtgttacccccaggacctccccagacctctcaggtccagggagttccctcagtttgaacctcagaggtatccagcatgtgcacagatgctgcctcccaatctttccccacatgctccatggaactatcattaccattgtcctggaagtcccgatcaccaggtgccatatggccatgactaccctcgagcagcctaccagcaagtgatccagccggctctgcctgggcagcccctgcctggagccagtgtgagaggcctgcaccctgtgcagaaggttatcctgaattatcccagcccctgggaccacgaagagaggcccgcacagagagactgctcctttccggggcttccaaggcaccaggaccagccacatcaccagccacctaatagagctggtgctcctggggagtccttggagtgccctgcagagctgagaccacaggttccccagcctccgtccccagctgctgtgcctagaccccctagcaaccctccagccagaggaactctaaaaacaagcaatttgccagaagaattgcggaaagtctttatcacttattcgatggacacagctatggaggtggtgaaattcgtgaactttttgttggtaaatggcttccaaactgcaattgacatatttgaggatagaatccgaggcattgatatcattaaatggatggagcgctaccttagggataagaccgtgatgataatcgtagcaatcagccccaaatacaaacaggacgtggaaggcgctgagtcgcagctggacgaggatgagcatggcttacatactaagtacattcatcgaatgatgcagattgagttcataaaacaaggaagcatgaatttcagattcatccctgtgctcttcccaaatgctaagaaggagcatgtgcccacctggcttcagaacactcatgtctacagctggcccaagaataaaaaaaacatcctgctgcggctgctgagagaggaagagtatgtggctcctccacgggggcctctgcccacccttcaggtggttcccttgtgacaccgttcatccccagatcactgaggccaggccatgtttggggccttgttctgacagcattctggctgaggctggtcggtagcactcctggctggtttttttctgttcctccccgagaggccctctggcccccaggaaacctgttgtgcagagctcttccccggagacctccacacaccctggctttgaagtggagtctgtgactgctctgcattctctgcttttaaaaaaaccattgcaggtgccagtgtcccatatgttcctcctgacagtttgatgtgtccattctgggcctctcagtgcttagcaagtagataatgtaagggatgtggcagcaaatggaaatgactacaaacactctcctatcaatcacttcaggctacttttatgagttagccagatgcttgtgtatcctcagaccaaactgattcatgtacaaataataaaatgtttactcttttgtaa

SEQ ID NO: 6305 - DNA, 3945 bp, Homo Sapiens
  NM_147780
ggggcggggccgggagggtacttagggccggggctggcccaggctacggcggctgcagggctccggcaaccgctccggcaacgccaaccgctccgctgcgcgcaggctgggctgcaggctctcggctgcagcgctgggctggtgtgcagtggtgcgaccacggctcacggcagcctcagccacccagatgtaagcgatctggttcccacctcagcctcccgagtagtgtcttcaggcctatggagagcagcttgcgtgggctgggcctgcagtacctggtttgcatagatgattggcaggtggatctaggatccggcttccaacatgtggcagctctgggcctccctctgctgcctgctggtgttggccaatgcccggagcaggccctctttccatcccctgtcggatgagctggtcaactatgtcaacaaacggaataccacgtggcaggccgggcacaacttctacaacgtggacatgagctacttgaagaggctatgtggtaccttcctgggtgggcccaagccaccccagagagttatgtttaccgaggacctgaagctgcctgcaagcttcgatgcacgggaacaatggccacagtgtcccaccatcaaagagatcagagaccagggctcctgtggctcctgctgggccttcggggctgtggaagccatctctgaccggatctgcatccacaccaatgcgcacgtcagcgtggaggtgtcggcggaggacctgctcacatgctgtggcagcatgtgtggggacggctgtaatggtggctatcctgctgaagcttggaacttctggacaagaaaaggcctggtttctggtggcctctatgaatcccatgtagggtgcagaccgtactccatccctccctgtgagcaccacgtcaacggctcccggcccccatgcacgggggagggagatacccccaagtgtagcaagatctgtgagcctggctacagcccgacctacaaacaggacaagcactacggatacaattcctacagcgtctccaatagcgagaaggacatcatggccgagatctacaaaaacggccccgtggagggagctttctctgtgtattcggacttcctgctctacaagtcaggagtgtaccaacacgtcaccggagagatgatgggtggccatgccatccgcatcctgggctggggagtggagaatggcacaccctactggctggttgccaactcctggaacactgactggggtgacaatggcttctttaaaatactcagaggacaggatcactgtggaatcgaatcagaagtggtggctggaattccacgcaccgatcagtactgggaaaagatctaatctgccgtgggcctgtcgtgccagtcctgggggcgagatcggggtagaaatgcattttattctttaagttcacgtaagatacaagtttcagacagggtctgaaggactggattggccaaacatcagacctgtcttccaaggagaccaagtcctggctacatcccagcctgtggttacagtgcagacaggccatgtgagccaccgctgccagcacagagcgtccttccccctgtagactagtgccgtagggagtacctgctgccccagctgactgtggccccctccgtgatccatccatctccagggagcaagacagagacgcaggaatggaaagcggagttcctaacaggatgaaagttcccccatcagttcccccagtacctccaagcaagtagctttccacatttgtcacagaaatcagaggagagacggtgttgggagccctttggagaacgccagtctcccaggccccctgcatctatcgagtttgcaatgtcacaacctctctgatcttgtgctcagcatgattctttaatagaagttttattttttcgtgcactctgctaatcatgtgggtgagccagtggaacagcgggagacctgtgctagttttacagattgcctccttatgacgcggctcaaaaggaaaccaagtggtcaggagttgtttctgacccactgatctctactaccacaaggaaaatagtttaggagaaaccagcttttactgtttttgaaaaattacagcttcaccctgtcaagttaacaaggaatgcctgtgccaataaaagttttctccaacttgaagtctactctgatgggatctcagatcctttgtcactgcctatagacttgtagctgctgtctctctttgtccctgcagagaatcacgtcctggaactgcatgttcttgcgactcttgggacttcatcttaacttctcgctgccccagccatgttttcaaccatggcatccctcccccaattagttccctgtcatcctcgtcaaccttctctgtaagtgcctggtaagcttgcccttgcttaagaactcaaaacatagctgtgctctatttttttgttgttgttgtgactgacagagtgagattccgtctcccaggctggagtgcagtggcgccttctcagctcactgcaacctgcagcctcctagattcaagcgattctcctgcttcagccttccgagtagctgggatgacaggcactcaccaatatgcctgggtaatttttgtatttttaagtacatacaggatttcaccatgttggccaggctagtttcaaactcccggcctcaggtggtctgcctgcctcagcctcccaaagtgttgggattacaggcgtgagccactgggccctgcctgtattttttatcagccacaaatccagcaacaagctgaggattcagctcataaaacaggcttggtgtcttggtgatctcacataaccaagatgctaccccgtggggaaccacatccccctggatgccctccagccttggtttgggctggagtcagggcctgtatacagtattttgaatttgtatgccactggtttgcattgctggtcaggaactctagtgctttgcatagccctggtttagaaacatgttatagcagttcttggtatagagcaaactagaagaaccagcaatcattccactgtcctgccaaggtacacctcagtactccccttcccaactgaagtggtatgaggctagctctttccaaaagcattcaagtttggcttctgatgtgactcagaatttaggaaccagatgctagatcaaataagctctgaaaatctgaggaacattgtaggaaaggtttgttaagcatctcttaagtgccatgatgagcataacagccggccgtcgtggctcacgcctgtaatcccagcactttgggaggccaaggtgggaggatgacaaggtcaggagttcaagaccagcctggccaacatgctgaaacctcacctctactaaaaatacaaaaattagctgggcatggtggcacatgcctgtaatcccagctacttgggaggctgaggcaggagaatcgcttgaacccgggaggcggaggttgcagtgagccaagacagtgccagtgcactccagcctcggtgacagcgcaaggctccgtctcaataattaaaaaaaaaaaaaaaaaaaaaaaggccgggcgcagtggctcaagcctgtaatcccagcactttgggaggctgaggcgggcagatcacctgaggtcaggagttttgagatcagccttggcaacacggtgaaaccccatctctactaaaaatacaaaattagccaagcatgctggcacatgcctgtaatcccagctactcgggaggctgaggtacgagaatcgcttgaacctgggaggcagaggatgcagtgagccgagatcacgccattgcactccagcctgggggacaagagtgaatctgtgtctcaccaaaaaaaaaaagaaaaagaaagatgcttaacaaaggttaccataagccacaaattcataaccacttatccttccagtttcaagtagaatatattcataacctcaataaagttctccctgctcccaaa

SEQ ID NO: 6306 - DNA, 6143 bp, Homo Sapiens
  NM_148170
cgtagctatttcaaggcgcgcgcctcgtggtggactcaccgctagcccgcagcgctcggcttcctggtaattcttcacctcttttctcagctccctgcagcatgggtgctgggccctccttgctgctcgccgccctcctgctgcttctctccggcgacggcgccgtgcgctgcgacacacctgccaactgcacctatcttgacctgctgggcacctgggtcttccaggtgggctccagcggttcccagcgcgatgtcaactgctcggttatgggaccacaagaaaaaaaagtagtggtgtaccttcagaagctggatacagcatatgatgaccttggcaattctggccatttcaccatcatttacaaccaaggctttgagattgtgttgaatgactacaagtggtttgccttttttaaggatgtcactgattttatcagtcatttgttcatgcagctgggaactgtggggatatatgatttgccacatctgaggaacaaactggttattaaatagagcatctgttgagggactcttttaaaaccacagccatgaacagacgttggggctaagagacagagcagcctgcgacagtgtggacctacctgtagcagctagcaaaggcctctagcagctacagtcccttctggagtctttatttgcatgcaaaatgcaaaggagtcctggtgacctacctccaaggcagctgccctcctgaacactcccttggaaaacagtaaacatcattttggaatgtgaacaaccagagactacacaggagaaaggaaaaaaaaattctgaagatgcaaaatcttgggtggcttcaccgttcagttttttaataaaaggaacaatatacaacacgttgttctttttctcttttgaaatcccttctattacagtgatttttttctaagattgtcaggatttgaagtgtatgttttgttttattcacagcgtaaattttattcacagtttaactgtctgcctgagtgtctttcctttctctaattaccttgaggaacccaagagcctgttgtaaggagaaaataaggcccttggatctcttgagattcacagatataagttattgaagggaagatggtcctatggaggacatatttaaagaagggaaaaaagaggctttctcagatatgtcagactgctatagtatacttctacagattatagacctccagtacctctggccagaaagatggtatcgtaaacaccctattttttttcttttcttttttcattaggtacaagctttgtgctaagaagttgacatactataagctacaaaagttctgtaaagtagatataactagtttcattttatagatagagaaaattaatctcttacagtgctaagctcacagagtttctaactgtaaaatgctagaacttgtctttcaagcctaaagacttccttggggctaaatagtgaaaaaagccatttcacaaataagtaaatggtatttagaggcatatttggatttcctggtaaattccagtctgtgagcatcatgaatattagtttaatgttgcatgggctcatgttgaagttttaagagaagaactgccttgaagcttaggtttccttagctattaggctactgactttcttgcctaaaccagggttttttcattgaagaccaaaacttaccttctccttcagtttgtagtttggaaattggtagaagagctttgtaaacttcaaattaagtacaaactaagtgtcatagtcaaatttactaatcttaattacagtattgttcaactgattgctatcttctagctctttcctgccgaataatggtcttgtttcctgctctgttggtttagagctgacttctttcagctttggtaagcctgaaattatggggttatgtttaattcatattgtctgggtggactttcctctcttgcatttctgcttgaatagaagaatttttctctagagagtagtttgtcatccttactctgttgattcagatgactctttgtatgatctgagaggtatactgttctgctattctgagaagaagtatttcagaaagatgaattaagagtacagtggactgctcccacctggaaacttttatctatctcacctctggacctgataaattctttatcactcaggaccttgatgacgctgctctctgaaaccctccccagctctctctattaccgtgagaaacatcagaactttggttcccattgcatatcgcaggtacctctgctttcatgccatgctgtaatggagtgattgggtagcatgttttcatctctttccagattgaaaatctgtatttctccctgtatatcttcaacacctaatgcacatagaactttgtaggtacctggaaaatgcaccacagttttcttttctttttgcagacttttcacaagtattaccaacttacaaagaattaattttgtaggattctagaaagacaaatcaggaatggtgccatatacatcttttttgattccctgctctaaagaatattatcaggttaccttcctgcagagttttaaaagaattgcatatttcaagctgactttcaggatgtaaatataaccaaagcaactgatatgtaaaaaatatattcaatggcattcctagattttcttctagggtgttttattgttttgggttttacatttaagtctttaatccatcttgagttaatttttgtataggtataagaaaggggtccagttttaattttctgcgtatggctagccagttctcccagcaccatttattaaatagggaatcctttccctattgtttgtttttgtacggtttgtcaaagattagatggttgtagatgtgtggtcttatttctgagatcttcattctcttccactggtctatgtgtctgtttttgtaccatgcttttttggttactgtagccttgtagtatagtatgaaagatagcatgatgcctccaggtttgttctttttgcttaggattgtcttggctatacgagcttttttttggttctatatgaattttaaaatagtttcttctaattgtgtgaagaatgttaatggtagtttaatgggaatagcattgaatctgtgaattgctttgggcagtatggccattttcatgatattgattcttcctatccatgagcatgtaacgtttttcccttcgtttgtgtcctctctcatttccttgagtagtggtttgtagttctccttgaagagatccttcacttcttctgtattcctagatattttattctctctgtagctattgggaatgggagttcattcatgattttgctctctgcttgccttttgttggtgtatagggatcctggtgacttctgcacattgattttgtatcctgagactttaccgaagttgcttatcagcttaagaagcttttgggctgagatgatggggttttctagatataggatcatgttatcttcaaacaaagacaatttgacttcctctcttcctatttgagtacgctttatttctttctcttgcctgattgccctggccagaactcccaatactatattgaataagaatggtgagagagggcatccttgtcttgtgccagttttcacggggaatgcttccagcttttgcccattcagtatgatattatctgtgggtttctcataaaaagctcttattatttgagatacgttccttcaatacctagtttattgagagtttttaacatgaagcgatgttgaattgtatcgaaggccttttctgtgtctattgagataatcatgtggtttttgtctttagttctgtttatgtgatgaatgacgtttattgatttgcatatgttgaaccggccttgcatcctggggatgaagccaacttgactgtggtagataagcttttggatgtgctgctggatttggtttatcagtatttcattgagattttttgcgtcgaagttcatcagggatattggactgaagttttctttttgttgtcgtatctctgccaggttttggtatcaggatgatgctggcctcataaaatgagttagggaggagtccctccttttcaattgtttggaatagtttcagaagaaagggtatcagctcctctttgtacctctggtagaattcaactgtaaatccatctggtcctggactttttttcattagtaggctatttattactgcctcactttcataacttgttattgatctattcagggatccaacttcttcctgattcagtcttgggagtgtgtatgcatccaggaatttatccatttcttctagattttctagtttctttgcatagaggtgtttgtagtatttgctgttggttgtttgtacttctgtgagatcagtggtggtatcctgtttatcattttttattgtgtctgtttgattcttctcttatttttgacaaagctgacaaaaagaagcaatagggaaaggactctctattcaattaatcctactgtatatctggctagccatatgcagaaaattgaaactgttcctgtttcttaatccatatacgaaaatcaacttacgatggattaaagacttaaatgtaaaacccaaaattataaaaccctggaatagaatataggcaatatcattctggacataggaatgggcaaagattttatgagaaagacaccaaaagcaattacaacaaaagcaaaaattggcaaatgagatctaattaaactaaagagctctgcacagcaaaagaaactactgtcagagtgaacaggcaaccaacagaatgggagaaaattttttcaatctatccatatgacaaaggtctaacatccagaatctacaaggaacttaacaaatttacaagaaaaaaggagccccattaaaaagttggcaaagaacatgaacagacacttcccagaagatattcatgtggccaataaacatgaagaaaagctcaacatcactgaccattagagacgtgcatatcaaaatcacaatgagataccatctcatgtcacaatggtgattattaaaaagtcaaacaacatgctagtgaggttgtagagaaataagaacgcttttacactgttggtgggaatgtcaactaattcaaccactgtggaagacagtgtggtgattcctcaaggatttagaaccagaaatatcattactgcatatagacccaaaggaatagaaatcattctattacaaagatacatgcacatgtatgtttattacagcactattcacaatagcaaagacatggaatcaacccaaatgctcatcagtgatagactggaaaaagagaatgtggaacataaacaccatggaatactatgcagcaataaaaaggaatgagatcctgtccttttcagggacatggatggagttggaagctgttatcctcagcaaactaatgcaggaacagaaaaccaaccaccacatgttctcacttataagtgggagctgaacaatagaacacatgggcacagggaggggaataacacacactggggccagtcagggggtggggggtcaagctgagggagagcattagaaaaaatagctaatgcattctgggcttaacccatttatgcctagtgttccatttctggaatgctaagcatgtggaagttctttatatcctgctcaaggtcattgccaaggtctgatttttcacattcaacaaattgcaacctctggcataaatgggttaatacctaggtgatgagttgataggtgcaggaaaccaccatggcacatgtttatctatgtaagaaacctgcacatcctacacatgtaccctggaacttaaaaaatttaaaatatatatgtatatatatttaatatggaattttaaaaattactaatgagttcttttatctgagtaattttgcatcaacatgcttttattatggaagagaagattcagtgagtacaaaattgcagatacatgtgtcagaagatccctgaatataataaggcttagtattctgtgtcataattgcctgtttgtattcctctctggtctttaaacttcattagggcaaggatcaactccatcttactaaccatttgattccctatgtattacacgatatatgaccaataataagccttcaataaatacttgtaaaataaagaatgttatgtaataaaaaaaaa

SEQ ID NO: 6307 - DNA, 1028 bp, Homo Sapiens
  NM_148172
gggggcgcgtggctgcagcggggcccgcgtggtgcctcctgaggcggcccccggatgaagagatctgggaacccgggagccgaggtaacgaacagctcggtggcagggcctgactgctgcggaggcctcggcaatattgattttagacaggcagacttctgcgttatgacccggctgctgggctacgtggaccccctggatcccagctttgtggctgccgtcatcaccatcaccttcaatccgctctactggaatgtggttgcacgatgggaacacaagacccgcaagctgagcagggccttcggatccccctacctggcctgctactctctaagcgtcaccatcctgctcctgaacttcctgcgctcgcactgcttcacgcaggccatgctgagccagcccaggatggagagcctggacacccccgcggcctacagcctgggcctcgcgctcctgggactgggcgtcgtgctcgtgctctccagcttctttgcactggggttcgctggaactttcctaggtgattacttcgggatcctcaaggaggcgagagtgaccgtgttccccttcaacatcctggacaaccccatgtactggggaagcacagccaactacctgggctgggccatcatgcacgccagccccacgggcctgctcctgacggtgctggtggccctcacctacatagtggctctcctatacgaagagcccttcaccgctgagatctaccggcagaaagcctccgggtcccacaagaggagctgattgagctgcaacagctttgctgaaggcctggccagcctcctggcctgccccaagtggcaggccctgcgcagggcgagaatggtgcctgctgctcagggctcgcccccggcgtgggctgccccagtgccttggaacctgctgccttggggaccctggacgtgccgacatatggccattgagctccaacccacacattcccattcaccaataaaggcaccctgaccccaaaaaaaaaaaaaaaaaaaaaaaaaaaaaaaaaaaaa

SEQ ID NO: 6308 - DNA, 1212 bp, Homo Sapiens
  NM_148177
gggtacaggaaagaagccagtgccccaggtcacctaagacaggcatcaagctcattcggcaaaatccagttgggttgttctaactggctcattcttacttgggtgacctctgcatggcaggagtaacttctgtgcctttgttttcatgttcagcgccatggatattgcaccctgggggaagctttcaacagactggacttctcaactgccattctggattccagaagatttaactacgtggtccggctgttggagctgatagcaaagtcacagctcacatccctgagtggcatcgcccaaaagaacttcatgaatattttggaaaaagtggtactgaaagtccttgaagaccagcaaaacattagactaataagggaactactccagaccctctacacatccttatgtacactggtccaaagagtcggcaagtctgtgctggtcgggaacattaacatgtgggtgtatcggatggagacgattctccactggcagcagcagctgaacaacattcagatcaccaggcctgccttcaaaggcctcaccttcactgacctgcctttgtgcctacaactgaacatcatgcagaggctgagcgacgggcgggacctggtcagcctgggccaggctgcccccgacctgcacgtgctcagcgaagaccggctgctgtggaagaaactctgccagtaccacttctccgagcggcagatccgcaaacgattaattctgtcagacaaagggcagctggattggaagaagatgtatttcaaacttgtccgatgttacccaaggaaagagcagtatggagatacccttcagctctgcaaacactgtcacatcctttcctggaagggcactgaccatccgtgcactgccaataacccagagagctgctccgtttcactttcaccccaggactttatcaacttgttcaagttctgaatcccagcacatgacaacacttcagaagggtccccctgctgactggagagctgggaatatggcatttggacacttcatttgtaaatagtgtacattttaaacattggctcgaaacttcagagataagtcatggagaggacattggaggggagaaatgcagttgctgactgggaatttaagaatgtgaacttctcactagaattggtatggaaaagcaaaatactgtaaataaactttttttctaacaatttgccaaaaaaaaaaaaaaaa

SEQ ID NO: 6309 - DNA, 896 bp, Homo Sapiens
  NM_148178
gcgcgccatcttggctccggatcgtgcgtgaggcggcttcgtgggcagcgagagtcacagacaagacagcaagcaggatggagcactaccggaaagctggctctgtagagctcccagcgccttccccaatgccccagctacctcctgatacccttgagatgcgggtccgagatggcagcaaaattcgcaacctgctggggttggctctgggtcggttggagggcggcagtgctcggcatgtagtgttctcaggttctggcagggctgcaggaaaggctgtcagctgcgctgagattgtcaagcggcgggtcccaggcctgcaccagctcaccaagctacgtttccttcagactgaggacagctgggtcccagcctcacctgacacagggctagaccccctcacagtgcgccgccatgtgcctgcagtgtgggtgctgctcagccgggaccccctggaccccaatgagtgtggttaccaacccccaggagcaccccctggcctgggttccatgcccagctccagctgtggccctcgttcccgaagaagggctcgagacacccgatcgtgaagacctgctgagccagcctgttctccgggcctgaatgtctggggtgcttgtgccttttctgagaagcgttgtgactgctcaacatccccatcaaggtttgagtccacaaaagtggacctccctatcatgcttccccttccctctagcatgtgggaagggactgctgtgaagaatgacagatgtggggcctctgccaagttctgcattgctaaataagggcttcctctgccttctacctacagtgcatttgaactgccttctgaaagaggtccagggagggatttaggaaataaagtttctacctatttgaaaaaaaaaaaaaaaaaa

SEQ ID NO: 6310 - DNA, 1100 bp, Homo Sapiens
  NM_148179
gcgcgccatcttggctccggatcgtgcgtgaggcggcttcggtgagagccggaaccgggcgggcagaggggcgctcgtagggttgggggacgcctgtggcttggctgcagcggccggcaagaccctggaagagaccgtggctatggaaacggccaaggctgtcttggaatgtcctgagcagccctccgagtcgagcctctgcccccgagtttctgagtgacctgggttgatatagattgaccttgtgggcagcgagagtcacagacaagacagcaagcaggatggagcactaccggaaagctggctctgtagagctcccagcgccttccccaatgccccagctacctcctgatacccttgagatgcgggtccgagatggcagcaaaattcgcaacctgctggggttggctctgggtcggttggagggcggcagtgctcggcatgtagtgttctcaggttctggcagggctgcaggaaaggctgtcagctgcgctgagattgtcaagcggcgggtcccaggcctgcaccagctcaccaagctacgtttccttcagactgaggacagctgggtcccagcctcacctgacacagggctagaccccctcacagtgcgccgccatgtgcctgcagtgtgggtgctgctcagccgggaccccctggaccccaatgagtgtggttaccaacccccaggagcaccccctggcctgggttccatgcccagctccagctgtggccctcgttcccgaagaagggctcgagacacccgatcgtgaagacctgctgagccagcctgttctccgggcctgaatgtctggggtgcttgtgccttttctgagaagcgttgtgactgctcaacatccccatcaaggtttgagtccacaaaagtggacctccctatcatgcttccccttccctctagcatgtgggaagggactgctgtgaagaatgacagatgtggggcctctgccaagttctgcattgctaaataagggcttcctctgccttctacctacagtgcatttgaactgccttctgaaagaggtccagggagggatttaggaaataaagtttctacctatttgaaaaaaaaaaaaaaaaaa

SEQ ID NO: 6311 - DNA, 2354 bp, Homo Sapiens
  NM_148842
ggactggtgttaagggtcacgcaagatggcggcgcccagaggctgctgaggcgcggaacggaggatggcgctggtggcgttggtggctggggctcggctggggcggcggctgagcgggccggggctggggcgagggcactggacggcggccgggcgctcccggagccggcgcgaagcggcagaagccgaggcggaggtgcccgtggtccagtacgtgggcgagcgcgctgcccgcgccgatcgcgtcttcgtgtggggcttcagcttctcgggggcgctgggcgtgccttcctttgtggtgcccagctccgggcccgggccccgcgccggcgcccgaccgcgccgcaggatccagcccgtgccctatcgcctggagctggaccaaaagatttcatctgctgcttgcggctatggattcacactgctgtcctctaagactgcggatgttacgaaagtctgggggatgggactcaacaaagattctcagcttggatttcacaggagccggaaagataaaacgaggggctacgagtatgtgttggagccctcacccgtctccctgcctctggacagacctcaggagacacgggtgctgcaggtctcctgcggccgagctcactctcttgtgttgactgacagggaaggagtcttcagcatgggaaacaattcttatgggcaatgtggaagaaaggtggtcgaaaatgaaatttacagtgaaagtcacagagtccacaggatgcaggacttcgatggccaggtggtccaggtcgcctgtggtcaggatcatagtctgttcctgacggataaaggagaagtctattcttgtggatggggtgctgatgggcaaacaggtctgggtcactacaatatcaccagctcgcccaccaagctgggtggagacctggcgggagtgaacgttatccaagttgccacctacggtgattgctgcctggccgtgtccgccgacggaggactttttggttggggaaactcggagtacctgcagctggcctctgtcactgactccacacaggtgaatgtgccccgctgcttacacttctcaggagtggggaaggtgcgacaggctgcatgcggtggcacgggctgtgcagtgttaaacggagaaggacatgtttttgtctggggctatggaattcttgggaaaggtccaaacctagtggaaagtgccgtccctgaaatgattccacccactctctttggcttgacggagttcaacccagaaatccaggtttcccgcatccgatgtggactcagccactttgctgcactgaccaacaaaggagagctgtttgtatggggcaagaacatccgagggtgcctgggaatcggtcgcctggaggaccagtatttcccatggagggcacctgccccatccgccagcgccaagacaacaggcccactcctctgattacctccgggggatggacggcaaacaggtaaggagttccatgcaactgcggatggagcccctctgagaaacacatgcccctccaagtggggtctggggcctggagagaccctcccacccagcagaccaggagatagctgggggacaagggcagacggcccctgcctgggaaaaaccacactcacaccccaccccgaagagctgtggagaccaaaccaagactacgctacacacagaacgccgagaagataaaccaagctttacacgagcaggatggggatgggaaaactaaaggggccccctgtgaccgaggagcagggtccccagggggcagctcccacggagcgggcttgaacagggaccacccctgcagagccagccagggcggagagccataccctggccccagcgcgccccgacacacatgcttttctccatgacacgaggccagtccccaggagcagccccaggagcacaacctgagatttctaagcttgcaggttacaaaaaacaaaaaaaacagagaagctgcctgcgtaaaaagtgccacccacggaggcaggacacaggcagcgtgtggcccattcagcaggcccaggtcttcagggtgaggctgctggcgagggcaggggagagggggcattctggttaaaagcaagaaattccaaatactcctccctcgggatcaacatccccccaaataagggcgcccagggatcttgcctggggaaagtggggtgcagaaggcatgacccacgccacagcgggctctcagcacccttcccacgtcccatgtcacaggctctttgagctgctggctttgttctctcaagtcaggtctgagggaacccatcggcttctgtaataatcgtattgcctatatacttgaattaaaaatatatggtggctcaaaaaaaaaaaaaaa

SEQ ID NO: 6312 - DNA, 3844 bp, Homo Sapiens
  NM_148906
attataaataatcttaatagcagtattcacgtttgcattctcgcatccgtggcatggagtcctacacacaataggcgccctaagaaagcgtgtttgacttgatcgctggagcatctgccggcaccgcccaggacccgcccaggacccgccccgccccctgcggccccgccccccgcatgctgaatgccatataggcgagtgacgtcaggccgtttgttgtcattggcggctcccaagatggcgtccatcatggaagggccgctgagcaaatggactaacgtgatgaagggctggcagtaccgttggttcgtgctggactacaatgcaggactgctctcctactacacgggagctgtgattggtatagacgatgaggacgacagcaccttcacaataactgttgatcagaaaaccttccatttccaggcccgtgatgctgatgagcgagagaagtggatccatgccttagaagaaacaattcttcgacatactctccagcttcaaggtttggattcaggatttgttcctagtgtccaagattttgataagaaacttacagaagctgatgcttacctacaaatcttgattgaacaattaaagctttttgatgacaagcttcaaaactgcaaagaagatgaacagagaaagaaaattgaaactctcaaagagacaacaaatagcatggtagaatcaattaaacactgcattgtgttgctgcagattgccaaagaccagagtaatgcggagaagcacgcagatggaatgataagtactattaatcccgtagatgcaatatatcaacctagtcctttggaacctgtgatcagcacaatgccttcccagactgtgttacctccagaacctgttcagttgtgtaagtcagagcagcgtccatcttccctaccagttggacctgtgttggctaccttgggacatcatcagactcctacaccaaatagtacaggcagtggccattcaccaccgagtagcagtctcacttctccaagccacgtgaacttgtctccaaatacagtcccagagttctcttactccagcagtgaagatgaattttatgatgctgatgaattccatcaaagtggctcatccccaaagcgcttaatagattcttctggatctgcctcagtcctgacacacagcagctcgggaaatagtctaaaacgcccagataccacagaatcacttaattcttccttgtccaatggaacaagtgatgctgacctgtttgattcacatgatgacagagatgatgatgcggaggcagggtctgtggaggagcacaagagcgttatcatgcatctcttgtcgcaggttagacttggaatggatcttactaaggtagttcttccaacgtttattcttgaaagaagatctcttttagaaatgtatgcagacttttttgcacatccggacctgtttgtgagcattagtgaccagaaggatcccaaggatcgaatggttcaggttgtgaaatggtacctctcagcctttcatgcgggaaggaaaggatcagttgccaaaaagccatacaatcccattttgggcgagatttttcagtgtcattggacattaccaaatgatactgaagagaacacagaactagtttcagaaggaccagttccctgggtttccaaaaacagtgtaacatttgtggctgagcaggtttcccatcatccacccatttcagccttttatgctgagtgttttaacaagaagatacaattcaatgctcatatctggaccaaatcaaaattccttgggatgtcaattggggtgcacaacatagggcagggctgtgtctcatgtctagactatgatgaacattacattctcacattccccaatggctatggaaggtctatcctcacagtgccctgggtggaattaggaggagaatgcaatattaattgttccaaaacaggctatagtgcaaatatcatcttccacactaaacccttctatgggggcaagaagcacagaattactgccgagattttttctccaaatgacaagaagtctttttgctcaattgaaggggaatggaatggtgtgatgtatgcaaaatatgcaacaggggaaaatacagtctttgtagataccaagaagttgcctataatcaagaagaaagtgaggaagttggaagatcagaacgagtatgaatcccgcagcctttggaaggatgtcactttcaacttaaaaatcagagacattgatgcagcaactgaagcaaagcacaggcttgaagaaagacaaagagcagaagcccgagaaaggaaggagaaggaaattcagtgggagacaaggttatttcatgaagatggagaatgctgggtttatgatgaaccattactgaaacgtcttggtgctgccaagcattaggttggaagatgcaaagtttatacctgatgatcagggcagtaggcataattcagcaacaaacaatcttcctttgggagaaacctgttcattccaatcttctaattacagtggttcctatctcagggatactggactttctgacgcagatgaacaattaaggggaaaagcttcccttttccctctgtggcagttacgattttgacttcagtcctgagaaaaacttcaggttttgaaaatcagatgatgtcttctccttttccaaacaccacacgttgaaagcatttataaatccaagtctgaaactctgcgctctagtactgctgttaagatacacaacttgtttcttagttcatataatctcgggatacacacacacacacacatatatatacacacacatacgtatacacacacatacatatatataaatatacctgatgccagatttttttcataaatattctgcctactgtaaatatgggttcctctgagttgttttagaaaattagcgcaatgtattaaaatcaagtgttaggaaatttcatggtcttacctacaataacttttattttggaattgaactattattaaattgtatctaatcctggattacagtttaattaattattcttagtgcttaaggcttcataaagtaatttttccaaccttttttttaaaaatgtgcatcttttattatcttttatggttaaacttggaagccaattatttggcaaccttgaatacaagagctagcttttcaaagaaagacacttgaaataatggaggatccattcttttcctctgtcagattgtatgttctgtctttagcccctgccaggcaattccccagaatcttcacttaactcatattgcacatgtagggctgcctaccaacattttatccaaaaatgttttattgccttagagggtttgggaagagtgtgtatttatagatccccaccccacagtgaacaaaaatagatagatagatagaataaaatgaatgccacagcagcagatggctcattctgaagggaaatacagaactatatctatctatctatctatcatcttttttatttaaaaatacattaaaaaaacaggtattagtacctagcatttagttagttattcaatatactggttacgtaaggcctttcaagaagtagattctcagtctgagaggacacaggccagggcttctcaaagtgctgctgcaggctttctggtctcgcttggcccattctgctaattttcctttgccagctcctacagtaaccctgggtttattagtctcaacaaaggataaaaagtaaatcaaatgctatgatgccagtgcaaaacttcaatggaagccctaaggcagtagtataactaactccataaaatacaaacaaacacattttaaaatacacattgcttcaggccaaaaaaaaaaaaaaaaaaa

SEQ ID NO: 6313 - DNA, 2376 bp, Homo Sapiens
  NM_148956
gctttttgaccccggaagtccgggcgggcgccgagccgggtgcgttttgccacagagccgtaaaggcgcgcgggaacatggggctgtatgctgcagctgcaggcgtgttggccggcgtggagagccgccagggctctatcaaggggttggtgtactccagcaacttccagaacgtgaagcagctgtacgcgctggtgtgcgaaacgcagcgctactccgccgtgctggatgctgtgatcgccagcgccggcctcctccgtgcggagaagaagctgcggccgcacctggccaaggtgctagtgtatgagttgttgttgggaaagggctttcgagggggtgggggccgatggaaggctctgttgggccggcaccaggcgaggctcaaggctgagttggctcggctcaaggttcatcggggtgtgagccggaatgaggacctgttggaagtgggatccaggcctggtccagcctcccagctgcctcgatttgtgcgtgtgaacactctcaagacctgctccgatgatgtagttgattatttcaagagacaaggtttctcctatcagggtcgggcttccagcctcgatgacttacgagccctcaaggggaagcattttctcctggaccccttgatgccggagctgctggtgtttcccgcccagacagatctgcatgaacacccactgtaccgggccggacacctcattctgcaggacagggccagctgtctcccagccatgctgctggaccccccgccaggctcccatgtcatcgatgcctgtgccgccccaggcaataagaccagtcacttggctgctcttctgaagaaccaagggaagatctttgcctttgacctggatgccaagcggctggcatccatggccacgctgctggcccgggctggcgtctcttgctgtgaactggctgaggaggacttcctggcggtctccccctcggatccacgctaccatgaggtccactacatcctgctggatccttcctgcagtggctcgggtatgccgagcagacagctggaggagcccggggcaggcacacctagcccggtgcgtctgcatgccctggcagggttccagcagcgagccctgtgccacgcgctcactttcccttccctgcagcggctcgtctactccacgtgctccctctgccaggaggagaatgaagacgtggtgcgagatgcgctgcagcagaacccgggcgccttcaggctagctcccgccctgcctgcctggccccaccgaggcctgagcacgttcccgggtgccgagcactgcctccgggcctcccctgagaccacactcagcagtggcttcttcgttgctgtaattgaacgggtcgaggtgccaagctcagcctcacaggccaaagcatcagcaccagaacgcacacccagcccagccccaaagagaaagaagagacagcaaagagccgcagccggtgcttgcacaccgccttgcacatagcagaggctccgggctgactccttcctggtgggaaaggaagatgcctgtcctctccgtggaggaccctgggccctcaccgcaggaagcagtttgggttttgaaaggttattgggtcccttccttgggctgtgttcttgctggtgagcaaagtgttgcctgcaaaaataaaatgcagaacgtactctacgatagatcacagttttttattcttaatgtcacaagcaggagaaaaatctcacattcatactaaaagttccaactagactcaacaggaatgaagtctctatttgtaatggaaagtcccagcctcccgctgccgtccagtgcgtgtactgtacacatccacactcacactcactcagggttcccggaccggctgtcctgcctgcggaactgaggtaaactagctcaggtgctgacactaggagggtctaccttacataaggtacaggtagaagcttgattgctaggcccaggcccacccagaccctccaatcctaacaggtatttaggcttgaggttcactccctcctcagctgcacacgcagccaggtattaacgaggatcagagctgttctgaggggtgggaaggagcagccccaccaccactcactcaccctcagtcacatcggggagggggcaccagttacatttacatcacattatttataaaataagaattacatttcatataacatggccagaaggagctctagtcccccaggaaagctgccggggacagcatttgagcctcttctttgcacaggcataacttaactatacagctaattcctagttaatagcatttatacttaaccacctcaatgaaccaagcttgaaggaatttaaaaggcaatttagcttaaatacaaaaataaatttttgttaaaaaacgttt

SEQ ID NO: 6314 - DNA, 1819 bp, Homo Sapiens
  NM_148962
ggctgcagggttccccttggcctgcaaacaggaacacagggtgtttctcagtggctgcgagaatgctgatgaaaaccccaggatgttgtgtcaccgtggtggccagctgatagtgccaatcatcccactttgccctgagcactcctgcaggggtagaagactccagaaccttctctcaggcccatggcccaagcagcccatggaacttcataacctgagctctccatctccctctctctcctcctctgttctccctccctccttctctccctcaccctcctctgctccctctgcctttaccactgtgggggggtcctctggagggccctgccaccccacctcttcctcgctggtgtctgccttcctggcaccaatcctggccctggagtttgtcctgggcctggtggggaacagtttggccctcttcatcttctgcatccacacgcggccctggacctccaacacggtgttcctggtcagcctggtggccgctgacttcctcctgatcagcaacctgcccctccgcgtggactactacctcctccatgagacctggcgctttggggctgctgcctgcaaagtcaacctcttcatgctgtccaccaaccgcacggccagcgttgtcttcctcacagccatcgcactcaaccgctacctgaaggtggtgcagccccaccacgtgctgagccgtgcttccgtgggggcagctgcccgggtggccgggggactctgggtgggcatcctgctcctcaacgggcacctgctcctgagcaccttctccggcccctcctgcctcagctacagggtgggcacgaagccctcggcctcgctccgctggcaccaggcactgtacctgctggagttcttcctgccactggcgctcatcctctttgctattgtgagcattgggctcaccatccggaaccgtggtctgggcgggcaggcaggcccgcagagggccatgcgtgtgctggccatggtggtggccgtctacaccatctgcttcttgcccagcatcatctttggcatggcttccatggtggctttctggctgtccgcctgccgatccctggacctctgcacacagctcttccatggctccctggccttcacctacctcaacagtgtcctggaccccgtgctctactgcttctctagccccaacttcctccaccagagccgggccttgctgggcctcacgcggggccggcagggcccagtgagcgacgagagctcctaccaaccctccaggcagtggcgctaccgggaggcctctaggaaggcggaggccatagggaagctgaaagtgcagggcgaggtctctctggaaaaggaaggctcctcccagggctgagggccagctgcagggctgcagcgctgtgggggtaagggctgccgcgctctggcctggagggacaaggccagcacacggtgcctcaaccaactggacaagggatggcggcagaccaggggccaggccaaagcactggcaggactcaggtgggtggcagggagagaaacccacctaggcctctcagtgtgtccaggatggcattcccagaatgcaggggagagcaggatgccgggtggaggagacaggcaaggtgccgttggcacaccagctcagacaggggcctgcgcagctgcaggggacagacgccaatcactgtcacagcagagtcaccttagaaattggacagctgcatgttctgtgctctccagtttgtcccttccaatattaataaacttcccttttaaatataaaaaaaaaaaaaaaaaaaaaaaaaaaaaaaaaaaaaaaaaaaaaaaaaaaaaaaaa

SEQ ID NO: 6315 - DNA, 1336 bp, Homo Sapiens
  NM_148973
cgggccctgcgggcgcggggctgaaggcggaaccacgacgggcagagagcacggagccgggaagcccctgggcgcccgtcggagggctatggagcagcggccgcggggctgcgcggcggtggcggcggcgctcctcctggtgctgctgggggcccgggcccagggcggcactcgtagccccaggtgtgactgtgccggtgacttccacaagaagattggtctgttttgttgcagaggctgcccagcggcctcccaggtggcgctggagaactgttcagcagtggccgacacccgctgtggctgtaagccaggctggtttgtggagtgccaggtcagccaatgtgtcagcagttcacccttctactgccaaccatgcctagactgcggggccctgcaccgccacacacggctactctgttcccgcagagatactgactgtgggacctgcctgcctggcttctatgaacatggcgatggctgcgtgtcctgccccacatgaagctgggatggaggctctgaccccaccaccggccacccatctgtcacccttggacagcgcccacacccttctagcacctcctgacagcagtgagaagatctgcaccgtccagttggtgggtaacagctggacccctggctaccccgagacccaggaggcgctctgcccgcaggtgacatggtcctgggaccagttgcccagcagagctcttggccccgctgctgcgcccacactctcgccagagtccccagccggctcgccagccatgatgctgcagccgggcccgcagctctacgacgtgatggacgcggtcccagcgcggcgctggaaggagttcgtgcgcacgctggggctgcgcgaggcagagatcgaagccgtggaggtggagatcggccgcttccgagaccagcagtacgagatgctcaagcgctggcgccagcagcagcccgcgggcctcggagccgtttacgcggccctggagcgcatggggctggacggctgcgtggaagacttgcgcagccgcctgcagcgcggcccgtgacacggcgcccacttgccacctaggcgctctggtggcccttgcagaagccctaagtacggttacttatgcgtgtagacattttatgtcacttattaagccgctggcacggccctgcgtagcagcaccagccggccccacccctgctcgcccctatcgctccagccaaggcgaagaagcacgaacgaatgtcgagagggggtgaagacatttctcaacttctcggccggagtttggctgagatcgcggtattaaatctgtgaaagaaaacaaaacaaaacaaaaaaaaaaaaaaaaaa

SEQ ID NO: 6316 - DNA, 1543 bp, Homo Sapiens
  NM_148975
agagccctgcatgcatcagacctacagcagacattgcaggcctgaagaaagcaccttttctgctgccatgacaaccatgcaaggaatggaacaggccatgccaggggctggccctggtgtgccccagctgggaaacatggctgtcatacattcacatctgtggaaaggattgcaagagaagttcttgaagggagaacccaaagtccttggggttgtgcagattctgactgccctgatgagccttagcatgggaataacaatgatgtgtatggcatctaatacttatggaagtaaccctatttccgtgtatatcgggtacacaatttgggggtcagtaatgtttattatttcaggatccttgtcaattgcagcaggaattagaactacaaaaggcctggtccgaggtagtctaggaatgaatatcaccagctctgtactggctgcatcagggatcttaatcaacacatttagcttggcgttttattcattccatcacccttactgtaactactatggcaactcaaataattgtcatgggactatgtccatcttaatgggtctggatggcatggtgctcctcttaagtgtgctggaattctgcattgctgtgtccctctctgcctttggatgtaaagtgctctgttgtacccctggtggggttgtgttaattctgccatcacattctcacatggcagaaacagcatctcccacaccacttaatgaggtttgaggccaccaaaagatcaacagacaaatgctccagaaatctatgctgactgtgacacaagagcctcacatgagaaattaccagtatccaacttcgatactgatagacttgttgatattattattatatgtaatccaattatgaactgtgtgtgtatagagagataataaattcaaaattatgttctcatttttttccctggaactcaataactcatttcactggctctttatcgagagtactagaagttaaattaataaataatgcatttaatgaggcaacagcacttgaaagtttttcattcatcataagaactttatataaaggcattacattggcaaataaggtttggaagcagaagagcaaaaaaaagatattgttaaaatgaggcctccatgcaaaacacatacttccctcccatttatttaactttttttttctcctacctatggggaccaaagtgctttttccttcaggaagtggagatgcatggccatctccccctccctttttccttctcctgcttttctttccccatagaaagtaccttgaagtagcacagtccgtccttgcatgtgcacgagctatcatttgagtaaaagtatacatggagtaaaaatcatattaagcatcagattcaacttatattttctatttcatcttcttcctttcccttctcccaccttctactgggcataattatatcttaatcatatatggaaatgtgcaacatatggtatttgttaaatacgtttgtttttattgcagagcaaaaataaatcaaattagaagcaataaaaaaaaaaaaaaaaaaaa

SEQ ID NO: 6317 - DNA, 1498 bp, Homo Sapiens
  NM_148976
cggccgcccaacagggacgcgagccgggaccacgccgacccagcgtgcccaggccgaggaaagcgcggcggcggcagtccgaagacccaccgggactgaaagagaaggacgaggtcatcttcggacgggaggggcaagccagccatcctgggaccccaggcgtgcaggttctctttgagggtattccaccctgcaaaaagcatgtattcatggtcagctctcagcaaggccagtagcagagtggtaaaggccttggccctccaaggctgggaaaagacaatgacaagtcaaatccagacctatgttgtatgttggtctactaggtgactgtctcctggaaatgttatgcagctcagcaaggtgaagtttcgaaatcagtatgacaatgatgtcactgtttggagcccccagggcaggattcatcaaattgaatatgcaatggaagctgttaaacaaggttcagccacagttggtctgaaatcaaaaactcatgcagttttggttgcattgaaaagggcgcaatcagagcttgcagctcatcagaaaaaaattctccatgttgacaaccatattggtatctcaattgcggggcttactgctgatgctagactgttatgtaattttatgcgtcaggagtgtttggattccagatttgtattcgatagaccactgcctgtgtctcgtcttgtatctctaattggaagcaagacccagataccaacacaacgatatggccggagaccatatggtgttggtctccttattgctggttatgatgatatgggccctcacattttccaaacctgtccatctgctaactattttgactgcagagccatgtccattggagcccgttcccaatcagctcgtacttacttggagagacatatgtctgaatttatggagtgtaatttaaatgaactagttaaacatggtctgcgtgccttaagagagacgcttcctgcagaacaggacctgactacaaagaatgtttccattggaattgttggtaaagacttggagtttacaatctatgatgatgatgatgtgtctccattcctggaaggtcttgaagaaagaccacagagaaaggcacagcctgctcaacctgctgatgaacctgcagaaaaggctgatgaaccaatggaacattaagtgataagccagtctatatatgtattatcaaatatgtaagaatacaggcaccacatactgatgacaataatctatactttgaaccaaaagttgcagagtggtggaatgctatgttttaggaatcagtccagatgtgagttttttccaagcaacctcactgaaacctatataatggaatacatttttctttgaaagggtctgtataatcattttctagaaagtatgggtatctatactaatgtttttatatgaagaacataggtgtctttgtggttttaaagacaactgtgaaataaaattgtttcaccgcctggtaaaaaaaaaaaaaaaaaaaaaaaaaaaa

SEQ ID NO: 6318 - DNA, 1809 bp, Homo Sapiens
  NM_149379
agcattttctcctggaccccttgatgccggagctgctggtgtttcccgcccagacagatctgcatgaacacccactgtaccgggccggacacctcattctgcaggacagggtaggcaagaggaatagaaaagggaagaatgtgtaggcacgggaagggcctagcctggggtctctgtttacccggcccctgtgttctgcctgccaggccagctgtctcccagccatgctgctggacccccgccaggctcccatgtcatggatgcctgtgccaccccaggcaataaagaccagtcacttggctgctcttctgaagaaccaagggtgagtgccacaggaggaggaggaggacatggggtttgattttgtgcctttcagtgggtaatgaaggctgaaaggatgactttcgcttaactctttcctgctgcaccaaagtagttcacggtatttgccccaagctaagctttccccactgcaggtgtgagatgtggatcccttagcccttggggcagagaccccaggccagttacctctgaccctgggccctttaaatataggctgtttcaatattgtgtgtcctggcttaacctgcatgttctggttgtctgtgtcagctgtgacaggcccttagctgctccatgcatgctcagctcacccctgctctgccctctgccctaggaagatctttgcctttgacctggatgccaggcggctggcatccatggccacgctgctggcctgggctggcgtctcctgctgtgagctggctgaggaggacttcctggcggtctcccccttagatccgcgctatcgtgaggtccactatgtcctgctggatccttcctgcagtggctcgggtgagatggtgagaaggcgtggctgagggactcagaggtccacagcagcttagacctggagtcatctgttttggtcttagttctgacactttaatgggcttgggaccctggagcaaaagttctcctctgtgaagcgaggatttcaggagcgaggatttcaggactgaggcagcctgtgaagctgtgtaaccgagacacgcttttccttaggtatgccgagcagacagctggaggagcccggggcagggacacctagcccggtgcgtctgcatgccctggcagggttccagcagcgagccctgtgccacgcgctcactttcccttccctgcagcggctcgtctactccatgtgctccctctgccaggaggagaatgaagacatggtacaagatgcgctgcagcagaacccgggcgccttcaggctagctcccgccctgcctgcccggccccaccgaggcctgagcacgttcccgggtgccgagcactgcctccgggcttcccccaagaccacgcttagcggtggcttcttcgttgctgtaattgaacgggtcgagatgccgacgtgagtgagtgggggcatgcttgggaggcgcaggatggtactggcacatctaacatctacatttctctagctcagcctcacaggccaaagcatcagcaccagaacgcacacccagcccagccccaaagagaaagaagagagcaaaaagctgcagccggtgcttgcacaccgccttgcacatagcagaggctccgggctcactccttcctggtgggaaaggaagatgcctgtcctctccgtggaagaccctgggccctcaccgcaggcagcagtttgcgttttgaaaggttattgggtcccttcctcgggctgtgttcttgctggtgagcaaaagtgttgcctgcagaaataaaatgcagaacgtactctacgataaaaaaaaaaaaaaaaaa

SEQ ID NO: 6319 - DNA, 2820 bp, Homo Sapiens
  NM_152221
gcgggcgggcgggcaggaggccgggaggagggaggcggcggcggcggcggcggcggcggcgagagcccagagccagagcccggccggggccgagcggagcgcggcggcggcggcggcggcggcggctgggccgggagaggctggcgcgccgggcggctccgcgaatcctccggcatccgccccggcgggccgcccccgcccgcggcagccccccgagcagtggcccggcatcggcgccttcccggcgggcaagagtgagccatggagctacgtgtggggaacaagtaccgcctgggacggaagatcgggagcgggtccttcggagatatctacctgggtgccaacatcgcctctggtgaggaagtcgccatcaagctggagtgtgtgaagacaaagcacccccagctgcacatcgagagcaagttctacaagatgatgcagggtggcgtggggatcccgtccatcaagtggtgcggagctgagggcgactacaacgtgatggtcatggagctgctggggcctagcctcgaggacctgttcaacttctgttcccgcaaattcagcctcaagacggtgctgctcttggccgaccagatgatcagccgcatcgagtatatccactccaagaacttcatccaccgggacgtcaagcccgacaacttcctcatggggctggggaagaagggcaacctggtctacatcatcgacttcggcctggccaagaagtaccgggacgcccgcacccaccagcacattccctaccgggaaaacaagaacctgaccggcacggcccgctacgcttccatcaacacgcacctgggcattgagcaaagccgtcgagatgacctggagagcctgggctacgtgctcatgtacttcaacctgggctccctgccctggcaggggctcaaagcagccaccaagcgccagaagtatgaacggatcagcgagaagaagatgtcaacgcccatcgaggtcctctgcaaaggctatccctccgaattctcaacatacctcaacttctgccgctccctgcggtttgacgacaagcccgactactcttacctacgtcagctcttccgcaacctcttccaccggcagggcttctcctatgactacgtctttgactggaacatgctgaaattcggtgcagcccggaatcccgaggatgtggaccgggagcggcgagaacacgaacgcgaggagaggatggggcagctacgggggtccgcgacccgagccctgccccctggcccacccacgggggccactgccaaccggctccgcagtgccgccgagcccgtggcttccacgccagcctcccgcatccagccggctggcaatacttctcccagagcgatctcgcgggtcgaccgggagaggaaggtgagtatgaggctgcacaggggtgcgcccgccaacgtctcctcctcagacctcactgggcggcaagaggtctcccggatcccagcctcacagacaagtgtgccatttgaccatctcgggaagtgaggagagcccccattggaccagtgtttgcttagtgtcttcactgtattttctttaaaaaaaaaaaaaaaaaaaaaaaggcaaaaataaaccactcaaaagaacaacaaaaaaacccagcacaaaaccgacgatggagtttgtttctttgatttctttgccaatggcaagaagatgagatgccctcagcactgaggattcttgcccccttgtggtgcccgctgcccccaaccttcaggctgccagatgctcccctgacaacaccaggctacaggagccagacgccagggcctgcccggcctcctgttcctgcccccacccaccacctgcctggagaggaacgggtcgggtccgtgtcggagaagtgacaggtcccagagccaaagccggccctcaagcatcatcagggagtggtgtagtcagttgaaggcagttcccaccgagttttccgagcctcagaatccaggagatacgcacagccccacccactctgagatgacagtggctgacttcccgtgctgggcttttccattgtccccctggcctccaggctcctcctctgcctctccatggagtgggtggggaggtggtgggggccggcgtcccctgcgtgtgtgtgtgtgtgtgtgtgtgtggatgtattgacctgtgtttcccaagacagcaggtgccacggcccgccccgcctgccagcccgaattcccgttctcctgtgtctactaacaaggacatgggggtgggcggtgacctccgcatccctcagagctcagagggtcctcgctgccaccggtccccccctagcccgtcatcagccggtggcagctccatcttccattcctggttttagggcagaatccatggagactgcttccagaaggcatctggctctgagttataaattacttccctggtcctgacagtcacctggggtcccccctctccctggttccacctttctgaggaggagcctggagtcagggctgggttttggattaacccatccttcctagttaacacctttttgtttttattttattttatttttgtttgttttctccgtgtgtgtgttttcctaatttatttacctctgtttcccctttttcctttttttttttaattaaagagcaaagctttttattactttgtaatttaaaaaactgaaaaaaaaaaaactgaagaactttggggggaattttgtacttttttcctgtgtaaatattggacttttttgagctttatcgtggttgttaatttgaagtaataaagtagaaaagataaagtgaaaaaaaaaaaaaaaaaaaaaaaaaaaaa

SEQ ID NO: 6320 - DNA, 1839 bp, Homo Sapiens
  NM_152260
atgtggctggaccgccgcggatggctcagggttcttggacattggcgctacgaccttaggcgccctagctttaccaggacttggagtggcgataagggcccaatggcagaaacagtgtctacccaggttgggacagagggcgggctgagggcttcgcatcagcaaaacggtgacgctggtggcgacgcgaaggttgagctgtcccccgggcccccgaagccggctggccgggaagtggagccggccccagtaggcggggagcatccctcggctgcagccccaggcccgggcaagcataagaagcggcggggcgcaaccagggagcgtgtcgtgccgcccccgaagaagcggcggaccggggtgagcttcggagatgagcactttgcagaaaccagttattacttcgagggcggcctgcgtaaggtgcggccctattactttgacttccggacctactgcaaaggtcgctgggtgggccacagcttgctgcacgtcttcagtaccgagttccgagctcagcccctggcctactatgaggccgcggtccgggcgggccgcctgcaactcaacgagaagccggtgcaggacctcaacatcgtgctcaaggacaatgatttcttgcggaacacagtgcacaggcatgagccaccagtcacagcagagcccattcgcctgctagctgagaacgaagatgtggtggttgtagacaagccttcctccattcccgttcacccctgtggccgcttccgacacaacacagtcatcttcatcctaggcaaggagcaccaactcaaggagctacaccccttgcatcggcttgaccgccttacctcaggggtgcttatgtttgccaagacagctgcagtctctgagagaattcacgagcaggttcgggaccggcagctggagaaggagtacgtgtgccgggtggaaggggagttccccactgaggaagtgacctgtaaagaacccatcttagtggtgtcttacaaagtaggggtgtgccgtgtagatccccggggcaagccctgtgagacagtgttccagaggctaagctacaatggccagtccagtgtggtacggtgccggccactcacaggccgcacacaccagattcgagtccaccttcagttcttgggccatcccattctcaacgaccccatctacaactcagttgcctggggtccttctcgaggccggggcggctacattcccaagacaaacgaggagttgctacgggacctggtagcagagcaccaggccaaacagagcctggatgtgctagatctctgtgagggtgacctgtccccaggactcacagactctacggccccctcctcagagttgggcaaggacgacctggaagagttggctgcagctgcccagaagatggaggaagtagctgaggcagcccctcaggagttggacacaatagccttggcatcagagaaggcagttgaaacagatgtcatgaatcaagagacagacccactctgtgcagagtgccggctggtgcgacaggatcccttgccccaagaccttgtgatgttcctacatgccctacgctataaagggccaggctttgagtacttttcaccaatgcctgcctgggcacaggatgactggcaaaaggactgagggtgtggccaatggagggattgcttcttgggttgtgacaaggatgggctatagggcaagggctgaccccatgggctagtacttggggtttctataggaatgaggacgggcttctaaagagacctgctcatacttgctacctccttccagtgggaatttggagactttttggtttgtaaatatatccctttttctaacatc

SEQ ID NO: 6321 - DNA, 2566 bp, Homo Sapiens
  NM_152262
aaaaaattgctttatggaagaaagtaagtatagacagagagaaagggatctgatgaccaaagcagggaataaatgtttggagtccacggcatcctgagaacttcttgggaatagagtctaggcccccaatgctgtcactctcacccatcctcctctacacatgtgagatgtttcaggacccagtggcttttaaggatgtggctgtgaacttcacccaggaggagtgggctttgctggatatttcccagaagaatctctacagggaagtgatgctggaaactttctggaacctgacctctataggaaaaaagtggaaagaccagaacattgaatatgagtaccaaaaccccaggagaaacttcaggagtgtcacagaagagaaagtcaatgaaattaaagaagacagtcattgtggagaaacttttaccccagttccagatgacaggctgaacttccagaagaagaaagcttctcctgaagtaaaatcatgtgacagctttgtgtgtgaagttggcctaggtaactcatcttctaatatgaacatcagaggtgacactggacacaaggcatgtgaatgtcaggaatatggaccaaagccatggaagagtcaacaacctaaaaaagccttcagatatcacccctccttgagaacacaagaaagggatcacactggaaagaaaccctatgcttgtaaagaatgtggaaaaaacattatttaccattcaagcattcaaagacacatggtagtgcacagtggggatggaccttataaatgtaagttttgtgggaaagcattccattgtctcagtttatatcttatccatgaaagaactcacactggagagaaaccgtatgaatgtaaacaatgtggtaaatcttttagttattctgctacccatcgaatacatgaaagaactcacattggagaaaagccttatgaatgtcaggaatgtgggaaagcattccatagtcccagatcctgtcacagacatgaaaggagtcacatgggagagaaggcttatcaatgtaaggaatgtggaaaagcattcatgtgtccccgttatgttcgtagacatgaaaggacccactctaggaaaaaactttatgaatgtaagcagtgtgggaaagcattatcctctcttacaagttttcaaacacacataagaatgcactctggagaaagaccttatgaatgtaagacatgtgggaaaggcttttattctgccaagtcatttcaaagacatgaaaaaactcacagtggagagaaaccgtataaatgcaagcaatgtggtaaagccttcactcgttccggttcctttcgatatcatgaaaggactcacactggagagaaaccctatgagtgtaagcaatgtgggaaagccttcagatctgccccaaatcttcaattgcatggtaggactcacactggagagaaaccgtatcaatgtaaggaatgtgggaaagctttcagatctgcctcacaacttcgaatccatcgtaggattcacactggagagaaaccctatgaatgtaagaaatgtgggaaagccttcagatatgtccagaactttcgatttcatgaaaggacacaaacacataagaatgcactctggagaaagaccttataaatataagatatatgggaaacacttttattctgccaagttatttcaaacacatgaaaaaattcacactggagagaaaccctataaatgcaagcaatgtggtaaagccttaattgttccagttcctttcgatatctaaaaggactcacagtggagaaaaactctatgagtgtaagcaatgtgggaaagtcttcagatctgtcaagaacctttcaatttatgaaaggacacacactggagagaaaccctatgaatgtaagaaatgtggaaaagcgttccataatttctcttcttttcaaatacatgaaagttgcacagaggagaggcgccctaagaatgtaagcattgtgggaaagcattcatatctgccaagatcgtttgaatacatgcaaaacacacactggagagaaacctatgaatgtaaggaatgcaaacaagcattcaattatttttcttccttgcatatacatgaaaggactcatacgagagagaatccgtatgaatgtaaggattgtgggaaagcattcagcttgcttaattgctttcatagacatgtaaagacacaccagaaggaaaccctatgaatgtaagcaatgtggcaaaagctttcacttcttccagttcttttcaatatcatgaaaggactcacactggggagaaaccgtatcaatgtaagcaatgtgggaaagccgtcagatcagcctcaagacttcaaatgcatggaagcactcacacttggcagaaactctatgaatgtaagcagtatgggaaagccttcagatcggctaggattctttgaatacaaataatgaatgtaaacaattaactgtttataataactgtatactaacaaatgttattctttttaaataattaagaagctataataaaatatccattggtgtcatgtattagatcaagcttaaaaaaaaaaaaaaaaa

SEQ ID NO: 6322 - DNA, 7116 bp, Homo Sapiens
  NM_152263
agataaagactcaagtctggggacctcctggtcactcaggcagcagccccttctttcttgccccagtctccagttctccagtgttcacaggtgagcctaccaacagccactgctcatgatggaggccatcaagaaaaagatgcagatgctgaagttagacaaggagaatgctctggatcgggcagagcaagctgaagctgagcagaagcaggcagaagaaagaagtaaacagctggaggatgagctggcagccatgcagaagaagctgaaagggacagaggatgagctggacaagtattctgaagctttgaaggatgcccaggagaagctggaactggcagagaagaaggctgctgatgctgaggctgaggtggcctccttgaaccgtaggatccagctggttgaagaagagctggaccgtgctcaggagcgcctggccactgccctgcaaaagctggaagaagctgaaaaagctgctgatgagagtgagagaggtatgaaggttattgaaaaccgggccttaaaagatgaagaaaagatggaactccaggaaatccaactcaaagaagctaagcacattgcagaagaggcagataggaagtatgaagaggtggctcgtaagttggtgatcattgaaggagacttggaacgcacagaggaacgagctgagctggcagagtctaagtgttctgagctggaggaggagctgaagaatgtcaccaacaacctcaagtctcttgaggctcaggcggagaagtactctcaaaaagaagataaatatgaggaagaaatcaagattcttactgataaactcaaggaggcagagacccgtgctgagtttgctgagagatcggtagccaagctggaaaagacaattgatgacctggaagatgagctctatgcccagaaactgaagtacaaggccattagcgaggagctggaccacgccctcaatgacatgacctctatataattatcaccgtttctgctctgttctggatctgccccctttactcctcggggaacccaaggccccactctcgctctggattccatttgggtcagcctggctggtccccaaggcattaggatgggggagcaaaaagcaacttatgtattttcttccacccccaccccaaattaaaatgttaagctgctggaaacctcatgccaccctgcatttgtgtcattgacaaagctgttgctgtccctaagaaggagccttgggggtgtgatgtggggaagagctattgtaggctccccctcctctgacttatgtaatcaaagccacttttgtgtgtgtctattttttcttgacatttaaactcagctgatctgattctaccagagtgatggatttagtacaggttactcaggatagtaattttagttatactcctcaagctgaacaagattaaattccttatttccaggttcttaaatcatcctgcctgcagtgtttccattctctcttcaggtattcctcctttggtgtggtgtcattgagaagccattgaagtgactctcaatacacattctgtacccttttaccggtggttcaaatggtgcatcctcagaacacccagtgaacccaatacattattgctaagattgactaattatgtcaactccagtcacagaaaaatacacaatggatagaattctggacggtttttttactttttcttctttaaacctttcttacatatttgagacttgctaccatttgcctgctagtgtgtgactagtgggatataagataagtgataaattattattgggaaaactaaaatgaccaatcatgcatatttcaaataatgtgcatatgaggctaatgatttattacatacataaatttctgctagtaaaattttccttggttcatattgtggaattaaatatcaacattttagaaattcccattataggccgggcgtggtagctcacgcctataatcccagcactttgggaggctggggcaggtggatcacctgaggtcatgagttcgagaccagctcggccaacatggtgaaaccccgtctctactaaaaatacaaaaattagctgggcatggtgggtgggtgcctgtaatcccagctactcgggaggctgaggcaggagaatcgcttgcacctgggaggcggaggttgcagtgagcggagatcgcgccactgcattccagcctgggcaacagagagactccatctcaaaaaaaaaaaaggaattcgcattccaatttacacagcagagatttcttaatagtatagctgtgaattatactaatccaagcacgtaagtgttgttcacttagtactttagtttcccagcagggtatgtatttaaaatttgcttttcttttagctgggtgcaatggcacttgcctgtactgcctgtagcttcttgggaggctgaggcaggaggattgcttgagcccaggagttctgcactgtagtgtgctatgcaggtcagatgtcctcactaaatttggcatcagtatggtgacctcctgggagtggagaacaacaaggttgcctaagaaggggtgaactggcccaggtcggaaatggagcaggtcaaaattcctgtgctgatcagtagtgggattgcacctataaatagccactgtagtactccagcctgggcaacacagcaagattccatctgttaaaaacacttttgctcttcttttaaacagatataatcaggtagggaagttttccttaatctaaaactttaagtcatatcaaattcacgtttccttttgtccattccatttcttactgccgcatagcctttgagattaaggttcagattcatttattcagctgacacttcctggtatcttctaggtataggatattaagatggagacagaaataaagatggaggcaccattcctactctcaagttgcttagaatctactaggagagaaaacatacataaagctacagatactgtgtgatgaatgccacaaataatagtgttatgggaattgagtagaggggacgagattgatcctagtgggaatgaattggaaaaactcatggaagaaggcatgtaatgggtacttcataaacatgttaaaacttttttctttttttctttttttttttttttttgagacggagtttgactcttgtcacctaggctggagttcagtggcctgatctcagctcactgcaacctctgcctcctgggttcaagcagttctcccacctcagcctcccgagtagctgagatcacaggcgcctgccaccacacccagctaatttttgtattattagtagaggtgaggtttcaccatgttggccaggctggtctggaactcctgacctcaagtgatccacccacctcagcctcccaaagtgatgggattacaggcttgagccactgcgcccagccaacatgttaaacttgcatattcatttttattgggttccaaaagtggatttttgacaagcagagttgggttgtgggatagtgaatattgagcattccattatttatttatttttctctttttgagatggagtctcgctctgtcacccaggctggatggagtgcagtggtgagatcatggctcactgcaacctctgcttcttgagttcaagcgattctcctgtctcagcttcccgaggagctgtgattacagatacccaccaccatgcccagctgatttttgtatttttagtacggacggggtttcagcatgttggccaggctggtcgcgaactcctgacctcaagtgatccacccgcctctgcctcccaaagtgttgggattacaggcgtgagccactgcacctggcctgagcattccatttaaagagaaacaaaataataaaggcattgatagagatgagaaggccacaatagctctaaaggtagatttagacagagtagggaacaggttgtgtcttaaaatgaggctgaggagttataattttacttggagttaatggggatgccactggagattttgaataggatatgttgtgatctgaataacatataagaagaattaatttggtaactaatttgcagattagcaaagtgattcactaacatggtgtttctcacatttcagccatttatgttaccatttttgatggctttttccatattcattgctgcctacattgttttcttcagatctactcatttccagatttattttgttcttacttgacacaattctattttgaaatcaaagttttgatgtgttagtgttttttcctaatcacattaaagtaactatagcagtgaatacaccacactttggaaaaaattgggttaggttaatttagttttctaggagagaataatcagggtctgagctagagtagtggcaggagagatagcactaaataaagacaggcattgtgaaaggcctggccacttgatgtgaggaggaaagacaaggatgactggtttttagagtaggagaattagccgggtgcagtggctcatgcctgtaatccctgcactttaggaggctgaggtgagaggatttcttgaatccaggagttcgagaccagcctggcaataaagtgagaacctgtctctacaaaatataaaaacttagccaaacatggtggtgcgtgcctgcagtcctatctacttggagggccgaagccagaggatcctttgagcccaggagtctgaggctgcagcaagctgtgatcacactgctgcactccatcctgggtggcagaatgagaccccccccaaaaaaagagtaggaaagtggtggggttaaagatgtagggagatcatgttgtcctggtttggggagctgggggaagggaaagaagatacggctgacaatctggcaggtatctgggtgaaaacaaaattctagggcgtgaggcagagaggttgacataagagagttgggaatccatatggggtacaggtagtttatgccatggaggtaaattagaaccatgaaggacaattgcaaatacaaaaaaaagaggccaggcacggtggctcacgcctgtaatcccagcactttgggaggccgaggtgggcggatcacgaggtcaggagatcaagaccatcctggctgacacgttgaaaccccgtctctactaaaaatacaaaaaattagctgggcgtggttgcgggcacctgtagtcccaactacttgggaggctgaggcaggagaatggcgtgaacccgggaggcggagcttgtagtgagctgagattgtgccacggcattccagcctgggtgacagagcaagactctgtctcaaaaaaaaattaaacaatgaggaaaacgttatgtaagaggaggaaccaaatggaactgattggagggaaagaagacggttgagtagttctttaaaaagttccgggttggatgctttctagtggtttttcaacagagaggctaagaaggaagataactgaaaatgggacatgcattgatactttagtaatttgagggtacattttgagtgttaagaagtgaagaggaggagtcattttcaggggcaaaagagtgtattggtaggaagattatataggcaatataatttactttagagcagggctttccaacagaacttttggtaatgatgtctagtacattagccacatgtggcagtcaagcactcaaaacatggctagtgtggctgaggggctaaaatttaattgtatttcattgtagttcatttaaatttggctacctgtggctagtggctattatattggacaatgcatttctaaatattcagatcctgggcagaagttggctttgacatgaagaaagacttcttagaaaggaaggaagtagaccgggcatggtggctcatgcctgtaatcccaacactttgggaagccgaggcaggtggatcacaaggtcaagagatcaagaccatcctggccaacgtggtgaaaacctgtctctactaaaaatacaaaaattagctggacatggtggcacatgcctgtagtcccaactactcgagaggctgaggcaggagagaaaaaaaagaaggaaataagagggagattgggagaaaagtaaggtgttatagctctgatctgtggtatctcctgttttccttgcggtatgactagtgtgagccaaggatagagaccaacaaactggggtaccaaagtggacaatgaagtactatgtaattagtgctaatgctaaattcattcctttgtttaaggcttaatatccttgcagaagccatcctgtgttacttgagcctggactagtattggggtgaagtcaagcatcagagtaaaacatttgtccccttaatgttaccccctcttaatttctaagaaccacaggcccattttgcccttccttgttaccatcattgagataaggaataagatgtagtaaccccaagttatctgataggtacaactgacctattctgtttggcagctttatcttagacctattctgtttggcagctttatcttagccccaaccaaatctcttcctttcacatggtgttggttgaatactatccaactccatggggttggtttgtgtttttttttttttttttttttgagacggagtcttgctctgttgcccaggctggagtgcggtggtgtgatcttggctcactgcaagctccgcctcctgggtttaagtgatcctcctgcctcagcctcctgaatagctgggattacaggcacgtgcaaccaagcccggctaatttttgtgtttttagtagagactaggtttcaacatgttaggctgatctcaaactcctgacctcgtgatctgcccgcctcggccttccaaagtgctggggttacagacttgagccactgcacctggccatggggttgtttcttaattagatatagctgaaaagaacgctagaccaaataggttctctgccttgccttttcgtttgttttgttttagctattatcagggaaccaaaaactttaaggagctagtactggtcttaatttttaataactagagatagcagagttagaaactaagttcaaagtgagagaacagctgcatttgtctttctgacctcatgcaattcctaggaaactctgtgttctgtgatttagtcaggcaataaaatgctctcactcctaaaaaaaaaaaaaaaaaaaa

SEQ ID NO: 6323 - DNA, 2345 bp, Homo Sapiens
  NM_152265
aaagcaggcggggcgttggagttcagatgttcgctcccgggataggctgccccggagagggagaggcggggtcggctgtatcacgtggatctgctcccgccgccgccgccgccgccgtcgtctttctctgtctcggctgaggcagccatctttctcttgccgcgtgctggtgttggaggaccctccctgcttcagatttaccaacagcatgaatcaagaaaagttagccaaacttcaggctcaggtccggatagggggcaagggtacagctcgcagaaagaagaaggtggtacatagaacagccacagctgatgacaaaaagcttcagagttctctaaaaaaactggctgtgaataatatagctggtattgaagaggtgaacatgattaaagatgatgggacagttattcatttcaacaatcccaaagtccaagcttccctttctgctaatacctttgcaattactggtcatgcagaagccaaaccaatcacagaaatgcttcctggaatattaagtcagcttggtgctgacagtttaacaagccttaggaagttagctgaacagttcccacggcaagtcttggacagtaaagcaccaaaaccagaagacattgatgaggaagatgatgatgttccagatcttgtagaaaattttgatgaggcatcaaagaatgaagctaactaaaagtttggtttttggaagctggcatggactagatttaacaaatcagctatgtggttccaaagttttacagacatggagaacatcacctgttactagttcagtaatataaatattttgtatattaataatgctgtttgttcagcatttttcggtcatttgattttgcattttgcacttcctcccaggatatttttttggtcaaaatatgaagtattggtgcagtttgagggtgttttggtttttgattcctggtttttttgttttttgtttggggtatttttggtgtatgtatgtttatgtatgtgtgtgggtatgtgtgtatacagtggagagcaaattggaaaacagttctatttatcctcctccctccccagtagaaataaaaaaaatctttacatttgttacttttcttttccccccgtaagacacagaattaatggaaagtgagtatcttggatttcaaatctgaagagatttttaccattagtggtttgattttaatttgcttggttaactatcatatttttcatacacttctctggatttaaaatatcttgaggtattttgccactggcttcatgctggagtaatgggtaacatatctttggtatggttgccttagattaacttacctagtcagacccagaagaacttcttttactagcttgcttcctaaatgccttttttcctctccttttggtctccaaatggcctggtcagcttttggtaatattcttcctcatcttccacctagcttgagaaggatgttctccatatagagtttagcgagtgcctaatccctccttttgtaagattttgttccctcagcttgaggaacaacttcatcttcaactttttatttctccctgatgttacagtttggtagatttcaaactggaatagctagcatgtgcttgctaaataattttatgccagccttatcctgtatcctagctgttcttaacagcaggtacaaaaatgcctgtttttcagcaaggttgaaattgggaatgtccttttgaatcagaagaaaataggccatagactcatctcccagcacaaatgggcattctatgaaatggtactggccctaggaggatttcctcaaccactctcctactcttggccttgaacctacctctgggttggatcttactattgtagctgctcactataccctcctgcatgcttagaataatgctttgaggggagcactggtaaaacacagtatttatttttttacctcctttaagaggacttggaggtaagttgcattcattcactcaagtttccctcttgctgtctaatagaagcttactttttgctatatcagcatttgttacagccaatatttaaggacaaaatttagaaaatatatcatttcctggcccatcatcaaactaatacagcttaaccttgcagctaccaacttttgtgtcaagctagatatctttatttgatatctaaggtgcaagaccaacaatatattaagagatctgtagacatgaaggcaaagctcttgtattttttttcatccaaacacctcaatttattttataaattcgttcatttttcctgttatgttttatataatatatggactaaacaaaataaaataacagtgcaaaagaggagaatatttcctcttgtgcttttcttg

SEQ ID NO: 6324 - DNA, 1152 bp, Homo Sapiens
  NM_152266
gtgaacccggaaggtggcgcggccaccagtaacatgatctctagactgggacggtggggttcctgccggctgtattcgggccttggactggactgagaagctacggtggagaccatccatggaaaagaacccccctgatgatacgggccccgtgcacgtgcctttggggcatattgtggccaatgagaaatggcgcgggtcacagctggcgcaggagatgcaagggaaaattaagctcattttcgaggatggcttgacaccagacttttatctgtcgaacagatgctgcattctttatgtcaccgaagctgatttggtggcaggaaatggctacagaaagaggcttgttcgggttagaaattccaataatcttaaaggaattgtagtcgttgaaaaaacccggatgagtgaacaatacttcccagccctacagaagtttactgtgctggaccttggaatggtgctgcttccagtggccagccagatggaagcatcctgcctcgtcatccagttggttcaagagcaaaccaaagagcccagtaagaaccctcttctcgggaagaaacgggccctgctgctgtctgagccttcgctccttcgaaccgtgcagcagatcccaggagttggaaaagttaaagctccccttctcctccagaagtttccaagcatccagcaactgagtaatgcttccattggggaactggagcaggtggtcggacaagcagtggcacagcagatccatgccttcttcacgcagcccaggtgagggctggcctcagggccacggcatcttctcctgagaccacaaacaccaggatcttgttttcagctttaaaaaccaagagaatgggccgggtgcactggctcacgcctctaatctcagcactttgggaggccgaagacagcggatcatctgaggtcaggagttcaagaccagcctggccaacatggagaaacccctaaaaataggaacaattagccaggcatggtgacaggtgcctgtaatcccagctacttgggaggccgaggcatgagaatcacttgaacccgggaggcggaggttgcagtgagctgagatcgtgccactgcactccagcctgggcaccagagcgagactccgtctcaaagaaaacaacaaaaaaaaaaaaaaaa

SEQ ID NO: 6325 - DNA, 1692 bp, Homo Sapiens
  NM_152269
ttgctgtgaaactctcttctctgattggctctctgggagccagccgctgccacgagggaaagaagcttcagtttctcgcatgcgcagtgagtaaacatgagcctctggtagataagagaaaccgcgatcggagtacggcgcgtgcgcagatcagggatcgcgattgcgaatcctccgctgaggtgatttggatatccctagaacgttgagggcacgagtcgggtcctgagaccaggtcctcagccagcagagccacgttccttatgagcaccgtgggtttatttcattttcctacaccactgacccgaatatgcccggcgccatggggactccggctttgggagaagctgacgttgttatccccaggaatagctgtcactccggtccagatggcaggcaagaaggactaccctgcactgctttccttggatgagaatgaactcgaagagcagtttgtgaaaggacacggtccagggggccaggcaaccaacaaaaccagcaactgcgtggtgctgaagcacatcccctcaggcatcgttgtaaagtgccatcagacaagatcagttgatcagaacagaaagctagctcggaaaatcctacaagagaaagtagatgttttctacaatggtgaaaacagtcctgttcacaaagaaaaacgagaagcggcgaagaaaaaacaagaaaggaaaaaaagagcaaaggaaaccctggaaaaaaagaagctacttaaagaactgtgggagtcaagtaaaaaggtccactgagaaaagaattagagattccaactgacagaatctgccagaagctcccagggaataatggtggcgagttccatcaccagcattattatagtgcttcaaaagaaatatttttgatgaacttaaaagacaacaaatttatttaaatggtgcactaaactgtagtgaacagagacatgcacgattcaagaataaaactcggctgggcacggtggacggtgcctcacatctgtaatcccagcactttgggaggccgaggcgggcggatcacttgaggtcaggagtttgagaccagcctggccaacatggtgaaaccccgtctctactaaaaatacaaaaaattagccaggcatggtggcgggcacctgtaatcccagctactcgggaggccgaggcaggagaattgcgtgaacctgggaggcggaggttgcagtgagctgagatcgcgccactgcactcaagcctgggcaacacctgggtgacagagcgagaccccatctcaaaaaaaaaataaaactagttcaagtgcaatgacacacgcctataatcccagcaccttgggaggctaagacaggaagatcacctgagcccaggagctcaagattgcagtgagctatgaacaccactgcactccacctgtccacttgttcttgtgtgacagaacaagaccctgtctctaaaaaataagataaaaccataaagaaacacagtcagtactatacaagaataatggctacttctagagggaaggagttgtcattgtgatgaggcacttggaggggttctggggtgcctgacaaagttctgtttcttcacctgggtggtagttagaagggtgtccccgtatttcaaattgtacctttgtgagattgtatgttttgtaataataaaattttttttgtaattagtaaagtcaatttttatggagaactgg

SEQ ID NO: 6326 - DNA, 5015 bp, Homo Sapiens
  NM_152270
tcttgcatctcctgcgtgggatgtgcgtgggatggcgccaacccgctagtatataaggactcgacctgggcgcctccagggaaacgctaagggggcttcggaagcgctggagcttgagaggtcagagagggtccttgcccccagcctgggactccggagttgcgtttctacccgtgcttcagggtctagcccagccgaatccgcgtcgggctgtaactcgagtgccagtttcagctgtgagttcaacatggaggcaaatcagtgccccctggttgtggaaccatcttacccagacctggtcatcaatgtaggagaagtgactcttggagaagaaaacagaaaaaagctgcagaaaattcagagagaccaagagaaggagagagttatgcgggctgcatgtgctttattaaactcaggaggaggagtgattcgaatggccaagaaggttgagcatcccgtggagatgggactggatttagaacagtctttgagagagcttattcagtcttcagatctgcaggctttctttgagaccaagcaacaaggaaggtgtttttacatttttgttaaatcttggagcagtggccctttccctgaagatcgctctgtcaagccccgcctttgcagcctcagttcttcattataccgtagatctgagacctctgtgcgttccatggactcaagagaggcattctgtttcctgaagaccaaaaggaagccaaaaatcttggaagaaggaccttttcacaaaattcacaagggtgtataccaagagctccctaactcggatcctgctgacccaaactcggatcctgctgacctaattttccaaaaagactatcttgaatatggtgaaatcctgccttttcctgagtctcagttagtagagtttaaacagttctctacaaaacacttccaagaatatgtaaaaaggacaattccagaatacgtccctgcatttgcaaacactggaggaggctatctttttattggagtggatgataagagtagggaagtcctgggatgtgcaaaagaaaatgttgaccctgactctttgagaaggaaaatagaacaagccatatacaaactaccttgtgttcatttttgccaaccccaacgcccgataaccttcacactcaaaattgtgaatgtgttaaaaaggggagagctctatggctatgcttgcatgatcagagtaaatcccttctgctgtgcagtgttctcagaagctcccaattcatggatagtggaggacaagtacgtctgcagcctgacaaccgagaaatgggtaggcatgatgacagacacagatccagatcttctacagttgtctgaagattttgaatgtcagctgagtctatctagtgggcctccccttagcagaccagtgtactccaagaaaggcctggaacataaaaaggaactccagcaacttttattttcagtcccaccaggatatttgcgatatactccagagtcactctggagggacctgatctcagagcacagaggactagaggagttaataaataagcaaatgcaacctttctttcggggaattttgatcttctctagaagttgggctgtggacctgaacttgcaggagaagccaggagtcatctgtgatgctctgctgatagcacagaacagcacccccattctctacaccattctcagggagcaagatgcagagggccaggactactgcactcgcaccgcctttactttgaagcagaagctagtgaacatggggggctacaccgggaaggtgtgtgtcagggccaaggtcctctgcctgagtcctgagagcagcgcagaggccttggaggctgcagtgtctccgatggattaccctgcgtcctatagccttgcaggcacccagcacatggaagccctgctgcagtccctcgtgattgtcttactcggcttcaggtctctcttgagtgaccagctcggctgtgaggttttaaatctgctcacagcccagcagtatgagatattctccagaagcctccgcaagaacagagagttgtttgtccacggcttacctggctcagggaagaccatcatggccatgaagatcatggagaagatcaggaatgtgtttcactgtgaggcacacagaattctctacgtttgtgaaaaccagcctctgaggaactttatcagtgatagaaatatctgccgagcagagacccggaaaactttcctaagagaaaactttgaacacattcaacacatcgtcattgacgaagctcagaatttccgtactgaagatggggactggtatgggaaggcaaaaagcatcactcggagagcaaagggtggcccaggaattctctggatctttctggattactttcagaccagccacttggattgcagtggcctccctcctctctcagaccaatatccaagagaagagctcaccagaatagttcgcaatgcagatccaatagccaagtacttacaaaaagaaatgcaagtaattagaagtaatccttcatttaacatccccactgggtgcctcgaggtatttcctgaagccgaatggtcccagggtgttcagggaaccttacgaattaagaaatacttgactgtggagcaaataatgacctgtgtggcagacacgtgcaggcgcttctttgataggggctattctccaaaggatgttgctgtgcttgtcagcaccgcaaaagaagtggagcactataagtatgagctcttgaaagcaatgaggaagaaaagggtggtgcagctcagtgatgcatgtgatatgttgggtgatcacattgtgttggacagtgttcggcgattctcaggcctggaaaggagcatagtgtttgggatccatccaaggacagctgacccagctatcttacccaatgttctgatctgtctggcttccagggcaaaacaacacctgtatatttttccgtggggtggccattaggaagaactccaaatcaaaatgctatgtaaatgtctatgggtgacagtctgctgatggtagaaacctttctttttagttcacaagtcagagatttggacggagctgacacaaagagtttggagctcccccatttctggctctcctttcaggggttccttccccaaccctttcagcagcggtggctgccccccattctgacccctgactcttccagccagaaagatggtggttttctaaaggaactttagctgtcctgcacaatgccgatctgtgtcttgcattttgggtaaaagccataaaaataagaaactcagcctgtggcctttctttcttccaaggctgggcttctttttttaagtgacttcatgcagtttgttgcttttaaaaatttgtccagaatcgttttctgcagaagcatggtctgttaggagcttactggccgtagcagaagcaattgtttcctgaattcttgacatttatctttgctgtattcatttagggcttgggagagtccgaagataattcagtcactgtcagattaataattttgtcaggacaaagaataccgttatgattatttaatcctttaaaattgtggtctccagagcttgttctcagaatggcccagaccaagccttaattgtgatagtgaatattaatggtcactttaaggagaaattataggccaagatgaaatgaacataaacctgtttgccctggctttcagtggaagatgatattagagaccaaaatctggttctgaaggtgtgtatcagccctaaggtgaaccagacttgggaaagattgtctttaaaaatcaatgagtttatgttttaacttctcagcttagttctatgcattgctctataacacacctagttaagttttatgttattcttgaactgtgattttttttctatttactttcatggtttggtgggccattgttatggactgaatgtttgtgtcccacccttcacccccaaattcccgtgttgaagccccaacctgcactgtggagctggggctgctaaggaagtaattaaggttacatgaagtcatggtggggctctgatctgctaaggttggtgtccttatagggagagaccccagagagcttgttccctccctccctgtgcatgcaaacaagagggcatgggagcacacagagagatggcagccacctacaagccaagaggagaagcctcacaatcaaactctcgctgctggcgagagtcttggactctgtcttggacttccagcctccagactgtgagaaacaaatttctgttgtttcagcttctcagtctctggtgttttgttattgcagcctgagaacacagctgtacgattatttgtcaaacagaaaacactgatacttaacaatgctaatgcaattatttatttgcttttcagtctctacaaaacgttctaaaacactaatctaaatattaacagtaaaatatttgcataactaatggaaactaagaaatcatatgaccaatatttcacttattggtaatcttactctactgatttccccccagactgtgatttttgaacttccttgcctttctcctgtctttctgtgtttattcatggaattccagttatctgggcttgaaattgcaggctctcctaacttaagcaaaatctgacagatcagcaaaatgagataaatgtttcttttttctttctgactgcattaaatcagatacaactcagcattaaaaagctatctttgtaaatgttgttactaataaattagtcttataagatccctggactttggagttgttgcaatgtctttgagagtaattctttaaaagtctaatttcgactggttgtatctctttatgatttattgccccactaacaatatttgaaacaatataatattttaaaatgtataaataattatgaatttttgtttagaacaaagaggattactgatatttgtttccctatgaatggcaaaaggtttagcttactactgcatttctgttttaaataaaaagttgagagtttgtgtctcattaaactgaaaaaaaaaaaaaaaaaa

SEQ ID NO: 6327 - DNA, 3420 bp, Homo Sapiens
  NM_152272
gctgcctcctctgactgttatgcagcaggccggcaggtcaataaacttgcttgcctgactttgagtatactcgtcttttctcttggccaaccttacggtagctgtaccagtttgcatttccaccagcaatgaatgagagttcctgttgctctgcatcctcaccagcatttggtgtggtcagtattttggattttcaccattctaatagagattcacggatccatccgggtggtccgggcaccactggcgcccctctgcggctattccccagttccattttctgaagccacaggtcagaagccgctgtacaacgctttgccgaactccagaatcttgaaggagacgtaaggtgcagccacctgccgcgcaggcgcaagcctttctttcggcacaaagaccgtgggaggaggggtcggcgcaagcgctcggtgtctctctgaaaagaacttcatcatactgcctcctggctgacggagcgcagcgcaacgcatgcgccttgaagacttatggaacttatttcacgctcagggcggcggtgacgtgtgaacgagaaggaggtggtcaaggaacggaagccgggagggaacgagggcggaagcggaccagggccaggcttgtgttcgcagccttgccggggctggggttccgatgtggtccccggagcgggaggccgaggccccagccgggggagacccggcgggccttctgccccccgagtgggaggaggacgaggagcgcatgtccttcctgttctccgctttcaagaggagtcgcgaggtgaacagcaccgactgggacagcaagatgggcttctgggcgccgttggtgctgagccacagccgccgccagggggtggtgcgcctgcgtctgcgggacttgcaggaggcctttcagcgcaaggggagcgtcccgctggggctggccacggtgctgcaggacctgctgcgtcgaggggagctgcagcgggagtcagacttcatggccagtgtagacagcagctggatctcctggggggttggggtcttcctgctgaagcctctcaagtggactctttctaacatgctgggagataataaggttccagctgaggaggtccttgtcgctgtggagctgttgaaggaaaaggctgaggaggtgtatcgtctgtatcagaactcgcccctctcctcccaccccgtggtggccctgtcagagctcagcaccctctgtgctaactcctgcccagatgagaggaccttctacttggtgttgctgcagctgcagaaggagaagagggtcacagtcctcgagcagaacggggagaagattgtgaagtttgcccgagggccacgtgccaaggtctctccagtcaatgacgtagatgttggggtgtaccagctgatgcagagtgaacagcttctctcacgcaaagtggagtccttatcccaggaagcagagaggtgtaaagaagaagcccgccgggcatgccgagcaggaaagaagcagctggcactgaggtctctcaaggccaagcaacggacagagaagcgcatcgaggccttgcatgccaagctggacactgttcaaggcatcctggaccggatctatgcctcccagacagatcagatggtttttaacgcctaccaggctggggtaggagcactcaaactctccatgaaggatgtcacagtggagaaggcagagagcctcgtggatcagatccaagagctctgtgacacccaggatgaagtttctcagactctggctggtggggtaacaaatggcttagattttgacagtgaagaactggagaaggaattggacatcctccttcaggataccaccaaagaacctttggatctgcctgacaacccccgcaataggcattttaccaacagcgtgcctaaccctaggatctcagatgctgaacttgaagctgaacttgagaaactgtccttatcagagggaggtttggtcccaagcagtaaatctccaaaaaggcaattggaaccgactctaaagccattgtaggaccctcaagtgaaggaccctcatgtaaaagagagaccaggcttgctgggtgtgtacatagttatttaaacaagaaactctcagaatgtgtttggaagaggagaaaggagaaccactgattttatctggatgctactacttactacaggacagatagaatttctggaagcgatgctccaaaggcttgctcccagctgtatcatggacctgccttctcatctttatagtgccacgatttatacagtcctgtgtctgacctgtcatttcatagcctgcagttcttgccattggcacacttagatttgtcttcacccaccagcttcgttccagcccatgaaggggaaagatttgcagctttgccaaatctgaatcagttcccactcccccctgcggttttttagaggggtttatcctgtcgctaatgtcagttaaatagcttattcctgtcccacttgatttcactggtaagaatgagaatgaaatacttaaaggttttatttgaggggacttagctgccattttatggaaaaacatgtagtataaaaggtttttctccagggtcatttgacagaattctccaggtgttcagagaaagaggtcgccccaagtggcccagagtcgtgacagtccggaggggctggtgtggccggtgggcgctgcctcttcatctgatggagccaggaggtccgccggtgggggaaaggcttcttccgaggcttctgcactcgcctgggaagaggcccagtcactacaggaccctgagatgtccagaccccttatgcaaagaggcaaaattgttgccttggccccatcatggagtaacttaaaaatacatatctatcttccagaacaagccacacaacaacacacctcccctccttgagcctggcacacagcaccgggctctctgaatttggaaagtgtttcattttgtggcctactgctcggggcaggggggctgagccaggatgtgcaatagaagcaggggttgtcccctctgccagatctgtggggagctgcccaggccacccgtgcacctgtcctgcttcctgcagtccccactccctgcctcctttgagggactgggggacttggggtagggggacagacgggaaagggtctgaatgctctggcaatggcgagaagaagcgatcgccacactgccactctgctgcccagccaccaggatttctgcctggagccctttgccctgtccctgctgcctgaggtggcgtagagcagaggagaagaatttgctccaggccaggagcacaaatcgttgttcaatgaatttctctccaactcgaccttggtaaacggaaatgttgggggtgaagagaaacaatcactatttttttcttttttatctggtaaataattaaaagaaaaaccgaacacttaaaaaaaaaa

SEQ ID NO: 6328 - DNA, 1308 bp, Homo Sapiens
  NM_152274
ggacgcggccgggtggggcggcacgcccgccgcgagcacctccagttctgccggcttctgcgcgccggggccgcctctccttccgccggtgccgcggcgcctcatggaagccccggagggcggcggaggggggcctgcagcgcggggcccggaggggcagccggcgcccgaagccagggtgcacttccgagtggcgaggttcatcatggaggcaggtgtcaagctagggatgcggtccattcccattgccactgcttgcaccatttaccataagttcttttgcgagaccaacctggacgcctatgacccttacctgattgccatgtcttcaatttacttggccggcaaagtggaagagcagcacctgcggactcgtgacatcatcaatgtgtccaacaggtactttaacccaagcggtgagcccctggaattggactcccgcttctgggaactccgggacagcatcgtgcagtgtgagcttctcatgctgagagttctgcgcttccaggtctccttccagcatccacacaagtacctgctccactacctggtttccctccagaactggctgaaccgccacagctggcagcggacccctgttgccgtcaccgcctgggccctgctgcgggacagctaccatggggcgctgtgcctccgcttccaggcccagcacatcgccgtggcggtgctctacctggccctgcaggtctacggagttgaggtgcccgccgaggtcgaggctgagaagccgtggtggcaggtgtttaatgacgaccttaccaagccaatcattgataatattgtgtctgatctcattcagatttataccatggacacagagatcccctaaggtcctggcccaggcctgcccaaagagaagcccaggatggtcggctgcctggggacattgtcaccacgtcgccatgacggctggtccccacaggaccagctgggaggactggttgtgctgctggagaagggctggagaaggcaatggcatgctgccgctttgccagtccctagaagtcgcggtgcaggtgatggtgggagccgcgcctccagcgggcaggccgggagtgtactgtgtgcagctgacccaaggcagccacatctgcgtttgtcctttgagaggactttgactacaatacaggcatgacatcaatgaaaggaaagtcatgaaatcgatgagactgaatccctacggatttcttaaaagccagatttgtagggagaatgaatgtgcaacgtggctgaaatctattttgtgtaataaaaggtgatacaagtcaaaaaaaaaaaaaaaaaaaa

SEQ ID NO: 6329 - DNA, 5298 bp, Homo Sapiens
  NM_152280
attcggaagaggcggagtcttcttccgaggaccattcggaagaaggcggagcctacctctcatcaggaccagtctgactgcacctgcatccttagctcagcgcatccccggagcatcttaagagctgagcgcagctgacaactaggggccggaccgtcgcaggaggcgtccgctggataccttcccccttccctgacctagagctctacagctgctgcctcggtactgaccgagggttcccagagctgtctcaccattgcaaaaacgttatagcaacagcctctgattacgacatggctgagatcaccaatatccgacctagctttgatgtgtcaccggtggtggccggcctcatcggggcctctgtgctggtggtgtgtgtctcggtgaccgtctttgtctggtcatgctgccaccagcaggcagagaagaagcagaagaacccaccatacaagtttattcacatgctcaaaggcatcagcatatacccagagaccctcagcaacaagaagaaaatcatcaaagtgcggagagacaaagatggtcctgggagggaaggtggacgtaggaacctgttggtggacgcagcagaggctggcctgctaagccgagacaaagatcccagggggcctagctctggatcttgtatagaccaattacccatcaaaatggactatggggaagaactaaggagccctattacaagcctgacccctggggagagcaaaaccacctctccatcatctccagaggaggatgtcatgctaggatccctcaccttctcagtggactataacttcccgaaaaaagccctggtggtgacaatccaggaggcccatgggctgccagtgatggatgaccagacccagggatctgacccctacatcaaaatgaccatccttcctgacaaacggcatcgggtgaagaccagagtgctgcggaagaccctggaccctgtgtttgacgagaccttcaccttctatggcatcccctacagccagctgcaggacctggtgctgcacttccttgtcctcagctttgaccgcttctctcgggatgatgtcattggcgaggtcatggtgccactggcaggggtggaccccagcacaggcaaggtacaactgaccagggacatcatcaaaaggaatatccagaagtgcatcagcagaggggagctccaggtgtctctgtcatatcagcctgtggcacagagaatgacagtggtggtcctcaaagccagacacttgccgaagatggatatcaccggtctctcaggtaatccttatgtcaaggtgaacgtctactacggcagaaagcgcattgccaagaagaaaacccatgtgaagaagtgcactttgaaccccatcttcaatgaatctttcatctacgacatccccactgacctcctgcctgatatcagcatcgagttcctcgttatcgacttcgatcgcaccaccaagaatgaggtggtggggaggctgatcctgggggcacacagtgtcacagccagtggtgctgaacactggagagaggtctgcgagagcccccgcaagcctgtggccaagtggcacagtctgagcgagtactaatcctgttcttctctcctctaatccccgggggccaagctggggagggatgtggaggggaaaaagatgacagagaagtggactccaaacctcattttagttgtagaagaaaatttcttacaaaacaaattccacaaagaacaccctatatgaccacagctgcagatcagttcttagcaatgatgtttttttttctgctttgcaaggcgctagaatcttttattttactttattttttttgaggtggagtttcgctcttgttgcccgggctggagtgcaatggtgagatctcaactcactgcaacctctgccctccaggttcaagtgattctcctccctcagcctcccaagtagctgggattacaggcacccacgagcatgcccggctaattttttgtattttcagtagagatgggtttcaccatgttggccaggctggtctcgaattccagacctcaggtgatccacccgcctcggcctcccaaagtgctgggattacaggtgcgagccaccgtgcccggcctctggttttgttttgttttttttttttaatgggggacaaaagagagggaaagacccctataaatctatatataacaatgtaaccatatacttgcatgtctaatacaaactgaagaaattagcctaactgccaatatcaagttgcagattttaatccatggaaattgtgttttgtgctgaattgtatttgctgattacctgaaattggcttctttttattgggcttctctggagaatttctcccactccccacctctgcagaagaaaattttgctcttataaaacctcatgttttcatcattcccatcttttctttttattgcctcttatatctctgctctttgacctcaaggtctagaggtctgcagtaagccaagaaacaaaggtggggtggatgaggcaaggtttgcaggagaaagaggaattgagaaatggggtatttttgctatcagctcttctgctatgaagtagtaaaaggcagtctataattaactgacagacctaactgaagcacagagaatacatcagacttatgcatccaagacatcagaacttggattttatcaaacttgatgacttctctaaaaggagctttggaaacttcaaattcagctataggatagtaccaatgaacacatccagctgatcccaaaagctgttttcaggtataaggacaaggagaggagacaagtgacgacagccattcccctttgcagctatctactgtagtgacagccatttcttggttgatgggttggaagtcatcagaggtttgaagaattacactggcctttgtttttctggaaatgccgaccatggagatgctttagagtcttctcaaatagcttagatgttgtaatgaggttagctttgcttcataaaacaggggccctcagaagttctccttaaatttttcaataaaaatttagctcttaaaaaaataacagtgtgactgagtgaatgaagataagttggattctttcagagcattcttttcctcaaaacgagctgcataattcttggaatttatgtcttaccacatggtggagggatggaggaactacaggatgcaattcttcttctaccaatgggcaatagaggttgagagagattcagcatctttctgggattagaattcaagtctctttactcctacagcagctgtgtctccaacgttgagactttgcagatggcacagactccatggataataggtaaacttggggccgggcgcagtggctcacgcctgtaatcccagtattttgggaggccgaggtggaaagatcgcttgagcccaggagttcaagaccagcctgggctacatgacgaaactccatctctatcaaaaatacaaaaaattaactaggtgtggtgctgcacgcctgtggtcccagctattcaggaggctgaggtgggaggatcatttgagcccagaggtagaggctgcagtgagccatgatcatgccactgcactctgggctgggtaacagagtgagatcctgtctcaaaaattaattaattaattaattaaaataaactaggtaaacttggataggcagtagatatttttgcccacctgaggaggaactcagtcaagctgttgcttaacagcttgatccagggcgtgaaaggttagttgagactgaagtgttcacttccatagaagaacatcacttttaaccttgctttggcgaagggagtcggaaagctgagtctctatggacgggggggtgatcttgctttcagtgttccctcagcttttgtggatttaaaaccattctgctccccctaaaccttttgtttgatttcagcccatgttcttgacaatgcagagcaattctgagcagtcacaaagcctactctctgttcttgtccctgccaacccccaccccccataatctgactcacaacttcaccatcagttggggtcataccactagtctctgtcctataccccatgaaatgtaaatactgtatcataagtagaagaaaataatttttgttttctaaaaatgcattttgagatagtttaatgtaaatctgacaggagcattctgaagccccattaggaaaaaatttaaatggttcctcttcatcgccttaatgtctaaagatcagaaatcgctgagcaaacccgcttttgtttccttcccagaaacaatgcaaaacaacaggtggagatagtctggtctttgccctgctgtgtgtgcctctgtagctcctcctgacaaacgtctgggaaaacagcctcaccccactctcctctctcttccccatttccttgtagctttattccttgcatctttgggtctactgagcagtgggtgctgaggtgacaggggaggaaccagttgttctgtagcctaggaactgcctcagtgtctttgccagaaaaaggcaaagaggcggacagtgcagggctcctccctcctacctcaggcctgatccatcgtgcccttgactttgccgtctcaaagtttcttagctgactttggctttcacatttgttctttccagagctaactgataagagtggaggaggaatgccttctcctaagagtcagttgaaagaaagacaagagagtcacatcttagcttttgcacaaggcattcgtggtcaggaataggttagggaatggtcacttctgattttccaacagttgctccttctctgaagagatcttgattcctttgggaagacaagaatttttcttaataacaaaggtccctttatgagttattccttctttcagttcatctcactggagcacagccaagatggacatgtttatggacagtgctctagatgtgaaaacagatagaactggtttgtgggacaggggcagcttgctcaggagagggaataacgcaggtcccttttcttggaaggcttgtactatggccatgacagtgacattgccctcaccatgatccctctccaaagtggttgtctttctttaccttgtgtcttctcttgtaaaaatgaaactcaaaaataaaataaatgtgtcaaattttgaaaaaaaaagaaaactgaaaaagctaacatgaattgtgtgaaattgcataatgctgtaatgctaatctacaatatgtaatgctatcttgtatgttgaatttgttaatgcaccacacaagtgcaaaataaagactgattcacattacataggcaaaaaaaaaaaaaaaaaaa

SEQ ID NO: 6330 - DNA, 2583 bp, Homo Sapiens
  NM_152281
attggccgcggccggggaaaaacccggatgagctgggcagcagtgttggcagtcgcggctgcgagatttgggcacttttgggggtgccggtggcccgggccgatggcgcaaggttgggcaggcttctctgaggaggaactgaggagactaaagcagactaaagatccatttgaaccacagcgacgtctccccgcgaagaaaagtcgacaacaacttcagcgagaaaaagcccttgtagagcaaagccaaaaacttgggcttcaagatggatcaacctcattacttccagagcagctgctttcagcaccaaaacagagagttaacgttcaaaaaccacctttttcttcccctactcttccgagtcatttcactctcacctcccccgttggtgatggacaaccacagggcattgaaagtcagccaaaggaactgggacttgagaattcccatgatggtcacaacaatgttgagattctacctccaaagccagattgcaaattggagaaaaagaaagtggaattgcaagaaaaatctcgttgggaagtcctccaacaagaacaacggctaatggaagagaaaaataaacgtaaaaaagctcttttggctaaagctattgcagaaagatccaaaagaactcaggcagagaccatgaaactaaagcggatccagaaggagttgcaggctttagatgacatggtgtcagctgacattggaattctcaggaaccggattgatcaggccagcttagactattcatacgctcggaagcggtttgacagggctgaagcagagtacattgcagcaaagctagatatacagcgcaagactgagataaaagagcaactcactgaacacctttgtacgatcatacagcaaaatgagctccgaaaggccaagaagttggaggagttgatgcaacaactagatgtagaagccgatgaagagactttggagcttgaggtggaggtcgagagattgctacacgaacaagaagtagaatcaaggagaccagtggttcgtttagagaggccatttcagcctgcggaggagagtgtgacattagaatttgctaaagagaacagaaagtgtcaagaacaagctgtttccccaaaggtagatgaccagtgtggaaattccagtagcatcccctttcttagtccaaactgcccaaatcaagaaggtaatgacatttcagctgctttggccacatgaagttctggtattcttttgagctaatatggtattgagtaaagtatactttttgcagtagatcatgccctgacctccaataaaaacctctttaaaacaatgctgatttttgaattcatgattagttttagtaaattaataggtttggccattctaaaatccaaaattatgataactgtatttctaggggtatgtttcaccttgattttggcccggttctttcagtgttccgtttaccctttttactgaaagtaagtgacttaaaaggatggaagaaaaactacatggttggagtgtttttagatcagataaatatagaaaagtaaaatggaaaatgatactcaatacctagttaaactcatttcacttctcctgggagacgtattaagactggaagtcctattttatttaatcagtatcagtaaaaagacaaaaattacagtgtgaacaagagaaaaacaggaatagaagaaaaaagttgcaggttgaattatctatctggatattactagagttgtaaaacacaacttggaaactggaatttatgtgaagaaccaaacaacttaaaccagcatcacttttgtcttcaatttgccttccagtgattttagtttacaacctgcgttttgttatttgaaacacacacacttatatataaacacatgtaattttactattttattgtctttcctttaatcgatgaattgattaaatttagacaattaaaacatttctaaagtgagactgaaaataatatagaaaatctcattgctacttgtgattatcaaaaaaagtatgtattttctttctaaagttatctataaatatgtttttgatatgttggacatgaattaccctgtcatgaagcgtttaaattgttaaaatgctgattttcttattagtttgttaattgcctgttactagtacttgaccaatacattgtgctatatgtaaatgtgtaaataaatattgtaattttctcacaaagtctgtgaatatcacattatgatttatttatcagaaattccaaaaagtaaaaatattacctttgaggactttttttttttaaaaaaagaattattatcagagaacataagcacaagtataagattgtatccataaaagtttctgaaaaacttagggacatcctgtttttaaatgggtttgtttgagggtattatcttctggtaatatagatgagctttatatttttatattatgtaatttgagttgaaagtataacattttactactgacttctctaaacagaagcatttctatagatagttgtgcttttatttatgaaatacataaaagccaacagtttcattgtctaacacacttctttttctaaggaataaacaagtctgatgt

SEQ ID NO: 6331 - DNA, 4731 bp, Homo Sapiens
  NM_152286
gctgcccccatccccgccgcgctgggcctggctcctcttgacctgcttggatacgccccatctggctgctgttctgggttccgggacagccacgtgagggctgtttacagagggaaggaggtggctcctagcagatgacagacacttctcaaaagacagcttttcttcctggagaacagactttttcagcaggattttcctttcagtgaaacataatttgacttgaaaggaacccagggaaaagtgtccaggtgtgagcatgagcgggtagaggtgtgcccttgtttgcttcaggctgtctgcttttcgcccctgactgttttttctgtttctggccatggaggaagagaaagatgacagcccacagctgacggggattgcagttggagccctcctggccctggccttggttggtgtcctcatccttttcatgttcagaaggcttagacaatttcgacaagcacagcccactcctcagtaccggttccggaagagagacaaagtgatgttttacggccggaagatcatgaggaaggtgaccacactccccaacacccttgtggagaacactgccctgccccggcagcgggccaggaagaggaccaaggtgctgtctttggccaagaggattctgcgtttcaagaaggaatacccggccctgcagcccaaggagcccccgccctccctgctggaggccgacctcacggagtttgacgtgaagaattctcacctgccatcggaagttctgtacatgctgaaaaacgttcgggtcctgggccactttgagaagccgctgttcctggagctttgcaaacacatcgtctttgtgcagctgcaggaaggggagcacgtcttccagcccagggagccggaccccagcatctgtgtggtgcaggacgggcggctggaggtctgcatccaggacactgacggcaccgaggtggtggtgaaagaggttctggcgggagacagcgtccacagcctgctcagcatcctggacatcatcaccggccatgctgcaccttacaaaacggtctccgtccgcgcggccatcccgtccaccatcctccggcttccagctgcggcttttcatggagtttttgagaaatatccggaaactctggtgagggtggtgcagatcatcatggtgcggctgcagagggtgacctttctggctctgcacaactacctcggcctgaccacagagctcttcaacgctgagagccaggccatccctctcgtgtctgtagccagtgtggctgccgggaaggccaagaagcaggtgttctatggcgaagaagagcggcttaaaaagccaccgcggctccaggagtcctgtgactcagatcacgggggcggccgcccggcagctgctgggcccctgctgaagaggagccactccgtccccgcgccttccattcgcaaacagatcttggaggagctggagaagcccggggcaggtgaccctgacccttcggccccacaagggggcccaggcagtgccacttctgatctggggatggcatgtgaccgtgccagggtcttcctgcactcggacgagcaccccgggagctccgtggccagcaagtccaggaaaagcgtgatggttgcagagataccctccacggtctcccagcactcagagagtcacacggatgagaccctggccagcaggaagtcggatgccatcttcagagctgccaagaaggacctgctcaccctgatgaagctggaagactcatctctgttggatggccgggtggcgcttctgcacgttcctgcaggcacggtggtgtcaaggcagggagaccaggacgccagcatcctgttcgtggtctcggggctgctgcacgtgtaccagcggaagatcggcagccaggaggacacctgcttgttcctcacgcgccccggggagatggtgggccagctggccgtgctcaccggggagcctctcatcttcaccgtcaaggccaacagggactgcagcttcctgtccatctccaaggcccacttctatgaaatcatgcggaagcagccgaccgtcgtcctgggtgtggcgcacactgtggtgaagaggatgtcgtccttcgtgcggcaaatcgactttgccctggactgggtggaggtggaggccgggcgagcaatatacaggcagggggacaagtccgactgcacgtacatcatgctcagcggccggctgcgctctgtgatccggaaggatgatgggaagaagcgcctggccggggagtacggccgaggagacctcgtcggcgtggtggagacactgacccaccaggcccgggcgaccacggtgcatgccgttcgggactcagaattggccaagctgccggcaggagccctcacgtccatcaagcgcaggtacccacaggtggtgactcggctgattcatctcttgggtgagaagatcctgggcagcctccagcagggacctgtgacaggccaccagcttgggctccccacggagggcagcaagtgggacttggggaacccggctgtcaacctgtccacggtggcagtgatgcccgtgtcagaggaagtgcccctcaccgccttcgccctggagctggagcatgccctcagcgccatcggcccgaccctgctgctgactagtgacaacataaaacggcgccttggctccgctgccctggacagtgttcacgagtaccggctgtccagctggctggggcagcaggaggacacccacaggatcgtgctctaccaggtagatggcacgctcacaccctggacccagcgctgcgtgcgccaggccgactgcatcctcatcgtgggcctgggtgaccaggagcccacagtgggcgagctggagcggatgctggagagcacagctgtgcgtgcccagaagcagctgatcctgctgcacagggaggagggcccggcgccagcgcgcaccgtggagtggctcaacatgcggagctggtgctccggccacctgcacctctgctgcccgcgccgcgtcttctccaggaggagcctgcccaagctggtggagatgtacaagcatgtcttccagcggcccccggaccgacactcagacttctcccgcctggcgagggtgctgacgggcaacgccattgccctggtgcttgggggagggggagcaagaggctgtgcccaggtgggcgttctcaaggccttggcggagtgcggcatccctgtggacatggtgggaggcacgtccatcggggccttcgtgggtgccctgtactctgaggagcggaactacagccagatgcggatccgggccaagcagtgggccgagggcatgacgtccttgatgaaggccgcgctggacctcacctaccccatcacgtccatgttctccggagccggcttcaacagcagcatcttcagcgtcttcaaggaccagcagatcgaggacctgtggattccttatttcgccatcaccaccgacatcacagcctcggccatgcgggtccacaccgacggctccctgtggtggtacgtgcgtgccagcatgtccctgtccggttacatgccccctctctgtgacccgaaggacggacacctgctgatggacgggggctacatcaacaacctcccagcggatgtggcccggtccatgggggcaaaagtggtgatcgccattgacgtgggcagccgagatgagacggacctcaccaactatggggatgcgctgtctgggtggtggctgctgtggaaacgctggaaccccttggccacgaaagtcaaggtgttgaacatggcagagattcagacgcgcctggcctacgtgtgttgcgtgcggcagctggaggtggtgaagagcagtgactactgcgagtacctgcgcccccccatcgacagctacagcaccctggacttcggcaagttcaacgagatctgcgaagtgggctaccagcacgggcgcacggtgtttgacatctggggccgcagcggcgtgctggagaagatgctccgcgaccagcaggggccgagcaagaagcccgcgagtgcggtcctcacctgtcccaacgcctccttcacggaccttgccgaaattgtgtctcgcattgagcccgccaagcccgccatggtggatgacgaatctgactaccagacggagtacgaggaggagctgctggacgtccccagggatgcatacgcagacttccagagcacctcagcccagcagggctcagacttggaggacgagtcctcactgcggcatcgacaccccagtctggctttcccaaaactgtctgagggctcctctgaccaggacgggtagaggcctctgctaaagagcccggatgcagcgtcttccgtgggactgtccccaaggctgaggctcctgccaagtcctaggggcctctgtacctgccctgctggaagccctgacttccccggggccccaggctgtgttagggttctctgggcctcttctttgtaccagcagccctgcatacagggccctgtgagcccccctgcagtcctgtgaggcccctgaagctctgtgaggcccctgaagctctgtgaaccccctgcagccctgtgaggccccccgaagccctgtgaggccccccgaagccctgtgaaccacctgctgccctgtgaggcccccaaagccctgtgaactgcctgctgtcctgtgaactgcctgctgccctgtgaggtgtgggagccctgatgctgccgtgtgatgtttcaataaaggtggatctcactgtt

SEQ ID NO: 6332 - DNA, 2205 bp, Homo Sapiens
  NM_152288
tccgctgtcccgctccggctcctggggctccccgcagacgctgcttttcttgctccactgggggtgcctcttcctgggcgcccgccgcctgcatcctgctcgccctgtctgggaatggggccgcccccgggcttgggccggcccggctggggcccccgaggcgcttccgccccgtagtgaccgcctggtgccgccccccccccaggatgaagggcggcgagggggacgcgggcgagcaggccccgctgaaccctgagggcgagagccctgcaggctcggccacgtaccgggagttcgtgcaccgcggctacctggacctcatgggggccagtcagcactcgctgcgggcgctcagctggcgccgcctctacctcagccgggccaagctcaaagcttccagccgcacgtctgccttgctctcgggcttcgccatggtggccatggtggaggtgcagctggagagtgaccacgagtacccaccaggcctgctggtggccttcagtgcctgcaccaccgtgctggtggctgtgcacctctttgcactcatggtctccacgtgtctgctgccccacattgaagctgtgagcaacatccacaacctcaactctgtccaccagtcgccacaccagagactgcaccgctacgtggagctggcctggggcttctccactgccctgggcacctttctcttccttgctgaagttgtcctggttggttgggtcaagtttgtgcccattggggctcccttggacacaccgacccccatggtgcccacatcccgggtgcccgggactctggcaccagtggctacctcccttagtccagcttccaatctcccacggtcctctgcgtctgcagcaccgtcccaggctgagccagcctgcccaccccggcaagcctgtggtggtggtggggcccatgggccaggctggcaagcagccatggcctccacagccatcatggtacccgtggggctcgtgtttgtggcctttgccctgcatttctaccgctccttggtggcacacaagacagaccgctacaagcaggaactagaggaactgaatcgcctgcagggggagctgcaggctgtgtgagactggtgttagccaccgctcactgcaagcactgcctccctccggggtctgtaagaggccgcaggggcctacagacctcatccccccatcccctggctggagccacttccagtggccactctcaggcagagttcagattcctgcccgcagggtcctctgggctgggccttggggcagctcccacattcccagggattttccccatcagtctgtcccttgggttttgcaagctactctgcacctgggctggcctcagttgaaggatcatgcagtagatagaggggaggcagggagagcttgtgggaccttcagtgctgactttagccaccatttccattcctatacaggatgtgaaggtcagaaggcagccaattgttggtttaatttttttttttttttgagacagtctgtttcccaggctggagtgtagtgatacagtcacagctcactgtagcctcgaccttccaggctcaaaagatgctcccaccacagcctcccaggtagtgagtagctggtactacaggtgtgtgctgccacacccgactaatttttttgtagagacggggtttcgctgttcccaggctggtctcaaactcctgggctcaagtgaacctcccgcctcggcctcccaaagtgctgggattcctttctttatttctgtagaatctattttatggttggcattttgggggaagatttcgatgggttccacattcttgctttagttgttgtagagggatttgggtgtttctacccaaggcattggtctagcttttcctacaatgaacctatctttggaggttcaagctccccaccttcccccactgtggtgacctgtggccacttgcagaagggatggtgcctgacccactgccctagccccacgctatgcaccaaacttgttctccccgtcctggtccagggctggggtctttagagactgacagcctctgccccaggcctgagtccttagcaagggttgggtaaggaggttttaagggagaaggtccagtccttagcccttgaaatacaaagctcttctgacactgaatttggatgcaccttgttttatataataaatcgtgtttcacagaaaaaaaaaaaaaaaaaa

SEQ ID NO: 6333 - DNA, 2850 bp, Homo Sapiens
  NM_152295
gcatgtagcttctgcagttgctcctcctcaccctccgcgacctgatttcctagaagggctctgtcacccgaaaagattttccactggcttagaggagggagggcccgccttcccccgttatccattggctgctcgttccgccgcaagttgggggcggggttagggcgcctttcgattgcatcagctggtccagccgaggccaagtcccgggcgctagcccacctcccacccgcctcttggctcctctcctctaggccgtcgctttcgggttctctcatcgcttcgtcgttcgccaatgtttgaggagaaggccagcagtccttcagggaagatgggaggcgaggagaagccgattggtgctggtgaagagaagcaaaaggaaggaggcaaaaagaagaacaaagaaggatctggagatggaggtcgagctgagttgaatccttggcctgaatatatttacacacgtcttgagatgtataatatactaaaagcagaacatgattccattctggcagaaaaggcagaaaaagatagcaagccaattaaagtcactttgcctgatggtaaacaggttgatgcggaatcttggaaaactacaccatatcaaattgcctgtggaattagtcaaggcctggccgacaacaccgttattgctaaagtaaataatgttgtgtgggacctggaccgccctctggaagaagattgtaccttggagcttctcaagtttgaggatgaggaagctcaggcagtgtattggcactctagtgctcacataatgggtgaagccatggaaagagtctatggtggatgtttatgctacggtccgccaatagaaaatggattctattatgacatgtacctcgaagaagggggtgtgtctagcaatgatttctcttctctggaggctttgtgtaagaaaatcattaaagaaaaacaagcttttgaaagactggaagttaagaaagaaactttactggcaatgtttaagtacaacaagttcaaatgccggatattgaatgaaaaggtgaatactccaactaccacagtctatagatgtggccctttgatagatctctgccggggtcctcatgttagacacacgggcaaaattaaggctttaaaaatacacaaaaattcctccacgtactgggaaggcaaagcagatatggagactctccagagaatttatggcatttcattcccagatcctaaaatgttgaaagagtgggagaagttccaagaggaagctaaaaaccgagatcataggaaaattggcagggaccaagaactatatttctttcatgaactcagccctggaagttgcttttttctgccaaaaggagcctacatttataatgcacttattgaattcattaggagcgaatataggaaaagaggattccaggaggtagtcaccccaaacatcttcaacagccgactctggatgacctcgggccactggcagcactacagcgagaacatgttctcctttgaggtggagaaggagctgtttgccctgaaacccatgaactgcccaggacactgccttatgtttgatcatcggccaaggtcctggcgagaactgcctctgcggctagctgattttggggtacttcataggaacgagctgtctggagcactcacaggactcacccgggtacgaagattccaacaggatgatgctcacatattctgtgccatggagcagattgaagatgaaataaaaggttgtttggattttctacgtacggtatatagcgtatttggattttcttttaaactaaacctttctactcgcccggaaaaattccttggagatatcgaagtatgggatcaagctgagaaacaacttgaaaacagtctgaatgaatttggtgaaaagtgggagttaaactctggagatggagctttctatggcccaaagattgacatacagattaaagatgcgattgggcggtaccaccagtgtgcaaccatccagctggatttccagttgcccatcagatttaatcttacttatgtaagccatgatggtgatgataagaaaaggccagtgattgttcatcgagccatcttgggatcagtggaaagaatgattgctatcctcacagaaaactatgggggcaaatggcccttttggctgtcccctcgccaggtaatggtagttccagtgggaccaacctgtgatgaatatgcccaaaaggtacgacaacaattccacgatgccaaattcatggcagacattgatctggatccaggctgtacattgaataaaaagattcgaaatgcacagttagcacagtataacttcattttagttgttggtgaaaaagagaaaatcagtggcactgttaatatccgcacaagagacaataaggtccacggggaacgcaccatttctgaaactatcgagcggctacagcagctcaaagagttccgcagcaaacaggcagaagaagaattttaatgaaaaaattacccagattggctccatggaaaaggaggaacagcgtttccgtaaaattgactttgtactctgaaaacgtcaatttatattgaacttggaggagtttggcaaagtctgaataggtcaacctgcaggcgtaactatttttgacctagtcagtttttaaacaatgtgcatttgaaggagttaattaaaagagagccaataaaatgattttactcattcagtatctgagtactggaagtgaaacatgaggaatgctttagtgtaatgtgggagaacttttttgtaaatttaatgcaattgaaaaagttttcaaattcaattaagataactagaattggattatggtgtaaaaataaaaaaaaaatttattcacataa

SEQ ID NO: 6334 - DNA, 3345 bp, Homo Sapiens
  NM_152299
gcgcctacgcattttcctgggcgggaacagcaaaatggcgccagaactagtggcgggctgaggacgccgtacccctcggaaggcagccctgcggtccctttgccgcccgttccctcccggacatggaggacgtggaggcgcgcttcgcccacctcttgcagcccatccgcgacctcaccaagaactgggaggtggacgtggcggcccagctgggcgagtatctggaggagctggatcagatctgcatttcttttgacgaaggcaagaccacaatgaacttcattgaggcagcgttgttgatccagggctctgcctgcgtctacagtaagaaggtggaatacctctactcactcgtctaccaggcccttgatttcatctctggaaagaggcgggccaagcagctctcttcggtgcaggaggacagggccaatggggttgccagctccggggtcccccaggaggcagagaatgagttcctgtcgctggatgacttccctgactcccggactaacgtggatctcaagaatgatcagacgcccagtgaggtcctcatcatccccctcctgcccatggccctggtggcccctgatgaaatggagaagaacaacaatcccctgtacagccgtcagggtgaggtcctggccagccggaaggatttcaggatgaacacgtgcgttccccaccccagaggggccttcatgttggagccagagggcatgtcccccatggaaccagcgggcgtttcccccatgccagggacccagaaggacaccgggaggactgaggagcagccaatggaagtttccgtgtgcaggagccctgtcccagcactcggcttctcccaggagccaggcccctctccagaaggcccgatgcccctgggtgggggcgaggacgaggatgcagaggaggcagtagagcttcctgaggcctcggcccccaaggccgctctggagcccaaggagtccaggagcccgcagcagagtgctgccctgcccaggaggtacatgctgcgggagcgggagggggccccagagcctgcatcctgcgtgaaggagactccagacccctggcagagcctggacccctttgactccttggagtctaagcccttcaagaaaggtaggccttactctgtgcccccctgtgtggaggaggctctgggacagaagcgcaagaggaagggcgctgccaagctgcaggacttccaccagtggtacctggctgcctatgcagaccatgccgacagcaggcggcttcggcgaaagggtccgtcctttgcagacatggaggtcctgtactggacacacgtgaaggagcagttggaaactctccggaagctgcagaggagggaggtggctgagcagtggctgcggcctgcagaggaggaccacctggaggattccctggaagacctgggggcagcagatgactttctagagcctgaggagtacatggagcccgagggagcagaccccagggaagccgctgaccttgacgcagtgccgatgtccctgagctacgaggagctggttcgaaggaatgtggagctcttcatcgccacctcccagaagtttgtccaggagacagagctgagccagcgcatcagggactgggaggacacagtgcagcctctgctccaggagcaggagcagcatgtgccctttgacatccacacctatggggaccagctggtctcacggttcccccagctcaatgagtggtgtccctttgcggagctggtggctggccagccggccttcgaggtgtgtcgttccatgctggcctccctgcagctggccaatgactacacagtggagataacccagcagcccgggctggagatggccgtggacaccatgtccctgagactgctcacgcaccagcgagcgcacaagcgcttccagacctacgctgccccctccatggcccagccctgagtggggagcaccgaggcaggggtgggggaatgtgtactgaggagccgtgtgtctgctcctggctggcccggcctaataaagcagtgttgccatctcatcttccccctaaaaacccttttatgtacacctgcgcagagaagagggctgcctggcctccctgggccgctggtacagatcacacacacacacagattaaacgcagcccgtttaatgatggggcccagactgcagtggctcaagacaggacactgcggaaagccgccatgtgccgccgcacactgtctgagatctgctcagccgatctgctccggccgtagtaatccgtgaagaggccgtcagggttgagcaggtagatggcaatggagtggtccacgatgtagtcctggtcctcatccttggggcctgcattgtagtacacgcggtaactgtgactagcctgggcaacctgtttggtggagccggtcagacccaacagtcttgggtggaagtcctggacgtagcgggccatggcttcaacgtcgtcccgctcggggtccacagtgatgaagacaggctgcactggaggcaaaccaggctctgcttccagctgccgcaccacctgcaccagcttctccagctcgtctgggcagatgtcagggcagtgagtgaagccaaagtacatcagcacccactggccccggaagtcagccttgcagcgagcccggcctctgtgatccagcaggtggaagtcgccctggcccacagctgcctggcgcagggcttctgttcgcttttgctgctgcagcctctccttctcagccctcagggccagccaggccccaccgagtccagccccgaacaggcctgtgatcagcagccgggttcgaagcccagggccctggggctggccctgcccacctgtctctgcagggccctgccttgacaaaagccaggacctcagatgcagggcctggcctcccagggtcccagggaggacccgaggcttgagctgagagagcctgtgccaagctgtggggctccgagtcagcagcagcatggatctgatgctcctggaaacaagcacaggcgtcaggagccagaagggaaggcccaggacagtgcctgggctgcccctgcgacttgagaccagccacccatctgaaggacccagcccacgttcaggcttaacaggcatttgcagctgctcacctgagctcagaactccacctccaccaaacatccacacctgggcaaccacacctgtcactcctgtcctctacctgggatcaccagcctgtcaccgcaccctgccctgcacctgcacctcagcaaggtgaacctcttgctgacggaaagcattccaagtgcatgccttgcctgaactaaccacgttatctatttgcaataaacccatttcttaaaagga

SEQ ID NO: 6335 - DNA, 3552 bp, Homo Sapiens
  NM_152305
gtgctgcggctcccgggccatctttgtgcggggccgcgcttccgccagcgccgcagcggggaatctgcagtaggtctgccggcgatggagtggtgggctagctcgccgcttcggctctggctgctgttgttcctcctgccctcagcgcagggccgccagaaggagtcaggttcaaaatggaaagtatttattgaccaaattaacaggtctttggagaattacgaaccatgttcaagtcaaaactgcagctgctaccatggtgtcatagaagaggatctaactcctttccgaggaggcatctccaggaagatgatggcagaggtagtcagacggaagctagggacccactatcagatcactaagaacagactgtaccgggaaaatgactgcatgttcccctcaaggtgtagtggtgttgagcactttattttggaagtgatcgggcgtctccctgacatggagatggtgatcaatgtacgagattatcctcaggttcctaaatggatggagcctgccatcccagtcttctccttcagtaagacatcagagtaccatgatatcatgtatcctgcttggacattttgggaagggggacctgctgtttggccaatttatcctacaggtcttggacggtgggacctcttcagagaagatctggtaaggtcagcagcacagtggccatggaaaaagaaaaactctacagcatatttccgaggatcaaggacaagtccagaacgagatcctctcattcttctgtctcggaaaaacccaaaacttgttgatgcagaatacaccaaaaaccaggcctggaaatctatgaaagataccttaggaaagccagctgctaaggatgtccatcttgtggatcactgcaaatacaagtatctgtttaattttcgaggcgtagctgcaagtttccggtttaaacacctcttcctgtgtggctcacttgttttccatgttggtgatgagtggctagaattcttctatccacagctgaagccatgggttcactatatcccagtcaaaacagatctctccaatgtccaagagctgttacaatttgtaaaagcaaatgatgatgtagctcaagagattgctgaaaggggaagccagtttattaggaaccatttgcagatggatgacatcacctgttactgggagaacctcttgagtgaatactctaaattcctgtcttataatgtaacgagaaggaaaggttatgatcaaattattcccaaaatgttgaaaactgaactatagtagtcatcataggaccatagtcctctttgtggcaacagatctcagatatcctacggtgagaagcttaccataagcttggcacctataccttgaatatctgctatcaagccaaatacctggttttccttatcatgctgcacccagagcaactcttgagaaagatttaaaatgtgtctaatacactgatatgaagcagttcaactttttggatgaataaggaccagaaatcgtgagatgtggattttgaacccaactctacctttcattttcttaagaccaatcacagcttgtgcctcagatcatccacctgtgtgagtccatcactgtgaaattgactgtgtccatgtgatgatgccctttgtcccattatttggagcagaaaattcgtcatttggaagtagtacaactcattgctggaattgtgaaattattcaaggcgtgatctctgtcactttattttaatgtaggaaaccctatggggtttatgaaaaatacttggggatcattctctgaatggtctaaggaagcggtagccatgccatgcaatgatgtaggagttctcttttgtaaaaccataaactgtgttactcaggaggtttctataatgccacatagaaagaggccaattgcatgagtaattattgcaattggatttcaggttccctttttgtgccttcatgccctacttcttaatgcctctctaaagccaaaaaaaaaaaaaaagacaaagcctcttaataaatttaatggaactatacatagaacagcagctcttcctcaccctttgcatacctttaatatttttccttcttaaattggccacagcaggggtcattcacactctcactgtcttgcaggaatcacaagaagtcttcatatgtgaacgtgccattcagttggtagttaagagcattcaacttcaaatatatagaagatatttgttttagtgcaaatccatgatggagtgcctcccttttccttttttcactttttgaaaaagatgttttgggtagtagtttaatatctcagggtgctctttctaacatagtaaaaaatgaagaaaaatgtttagattaaaactctgtagtctgatgacttagaaccatccttgacccttaggcccaacctttccacagagaaatcacctctcttcctttgtcttttaagaactatttggtattaactagtttcagaattagtaaatgtgagattcagtcacataattatcagacattccatttgtcagaaatgtatttggctttttaaactcctttccacaaaagtttaagtctaatgaccttcttagagaagttgagcatgcctggcaagatcatttcatggaataagcagatgtttaaagttggatttttttttttttttttttttgagtactagcaatgcacagggaccgtgttcttaggttcttagtctgtgaatctagcaataggcagtccagatttctgagtcgtactatggttttgccttgtcactgtgaggccctactaggtgtaagcattctctctgaattttaatttcctctcattaaaataggaacaaaatttgctatcctttagattaggagctgaagattcatttccctgggaatgtttcccatttagcttcaagtttcagctcaaacatcaccttctttctgactcctttcattcattcctccaggcagtaaggggctaccatagtactttgtttatgcctgtattatatgacatcactgtagttgcttgactgtttctcctactgttctgtaaacttattaatgggtgagaatctaattttactcatcttgatggcttcatgatccagcacagtgcctcacacaaagaactattgggtgggtggatggatggatggaggaatggagacagttggcttaaccagatcctatatacagattattactggctccaaaggatgagtagataagaccataagaattggatcaatgtaaatcctcacctgccctttgaagagccaataagggcatctttgtctttaaatacagcaaatgttattcagattttgtacttgtctatctgtttacctcagtgtagatgatatgaggatggtataactatgtaaattgtttttgaaaataatttgtttccccacaacttttgaaggttttatttgttgttgttattactagttcagtcccaaacttaccctttccttttcagagagctaatggccatgcttttcttcaaggaaagaataatttatttgaatgaagtgggatacttgcataacacaaaaaaaaaaaaaaaaaaaaaa

SEQ ID NO: 6336 - DNA, 3257 bp, Homo Sapiens
  NM_152307
atcagcgggcgcggagccggaagtgttgtggccgccgccgccgcgcgtcgcggaggcacgtgtggagccccggcagcaggagcgtcgcaggtccttggcccttgccagacattagcaccatgagcttcgtggcatacgaggagctgatcaaggagggtgacacggccatcctgtcactgggccatggtgcaatggtggcagtgcgtgtgcagcgtggggcacagacccagacccggcatggtgtcctgcggcactcagttgaccttatcggccgccccttcggctccaaggtgacgtgcggccgaggtggctgggtgtatgtgctgcaccccacgcccgagctctggacgctgaacctgccgcaccgcacgcagatcctctactccacagacatcgccctcatcaccatgatgttggagcttcggcccggctctgtggtctgtgagtctggcaccggcagtggctctgtgtcccacgccatcatccgcaccattgcacccacgggtcacctgcacacggtggagttccaccagcagcgggcagagaaggcccgggaggagttccaggagcaccgtgtgggccgctgggtgactgtgcgcacccaggacgtgtgccgcagtggctttggcgtgagccacgtggccgacgccgtcttcctggacatcccatcaccctgggaggccgtgggccacgcctgggacgccctcaaggtcgaaggcgggcgcttctgctccttctcaccgtgcatcgagcaggtgcaacgcacatgccaggcgctggcagcgcgcggcttctcagagctgagcaccctggaggtgctgccacaggtctacaacgtgcgcactgtcagcctgccaccgcccgacctgggcacaggcacagatggccctgccggctccgacaccagccccttccgcagcggcacgcccatgaaggaggccgtgggccacaccggctacctgaccttcgccaccaagaccccaggctagggggccgcctcccagggcaccagggagctgggagcactgaagggctgggcagggaggccagaggcaccttatatggtcagcgatgcctgccagacacagacggtggggtggggcttgggggcctcctgggtggccagagtgggacagcaggaagggcggctgtgatggaggagcagtgctggggctgggcctcagccattcctgtccagccctgtggcccatcccagctgctgtttgttgccaatatgaagtatccactgccacaggctcccctgggtgttgaagccaaagggtgcaggtgggggagtctgaccccctcccaggtgggcctaagcaggaagggggtggaggagggaggggggcattgaccctgagaccacgctgcgtctgacccctgggcccccacggccctggctgccccacggggcctgagaccatctcgtgcttctccagtccccgggccgaggctccagccttggccagaagctggggtgagctgacccagaatccctgccctgctctccccagcgctaggagaccaggccagcccaggaaccagggaggtgaccctgctctctggcctcctggctgatgtcacagcactgagctcagcccaggccttcgtccactcatgtccaagaggcggggcatcccccacccagccagagcccctgacatgggctgcactcgctgaggccaggcagcgctgcggagaggagcggcagagtgggttgtctgccgcaggcaaccaggcaagtgtgtcggggctggggtgtgaatgccagcctgtgagtcccggaactatgtgggtacccctacccctcacagaagccaagggcatggaggaggtccctccacagtgacaacggtgtggggtaggggaggtgcattcaggacaccacccagggacagtgcctatgtgatcacctcttaaaggctaagcttaggggcatttcccaaagtggggacagagggcaggacgcccaggctgggggctctcctcgcccgccctggtgtctgacagcctcaaggaaggagcagtgcctgtgtcagccatggggcccttggagctgccgctggtgcctagggggcctgggtttctgcccaggcagccagtggctgttgggagcctctgtttcccctgtgctgggggccttgagtgctatgctagcaggggcctggccccaagtgtgagtgatgagcaataaacgtaccgtccccctctgttctgagtgatccctagcagccaaggccacccccagctgctgtctaggccagccctacctgcgctctgcccctggtccctgctcctccctgtcctggtttggcatgataggcgctccagtctccaggacaaaggggcaaatgtgtggccacccccatctggctgcagaaaaggccactccttcctggggttggggtggtccaggagtgctgggccttcttccacagtcctgggctggaattcagtgtggctgcctgggttacttgtatgcgcccctgaaggaagggtccactccaggccgcctggtccctgcgaagtgtcacactgtgggtcaccgggggctgtggctaatgtggtccgggaggcctgtgtccctgagagttgctcagccctgctccgagggcttgtcctctccttccaggacccagcttcccttctaaccttgttactcacctggggcacagaggaggggcccccagtcaggttcaacatggaagtgggtgaccctaatgccaggagctttggggtcaggctgtccctggggtgtcatgaactgggtgacgcacacccctgagatctcagttcccccaagcctgccctgcccctcctggccacagcaaaggcctgcatggtgtctgatgggtggacaccgggaggtgtttctttgaggcgcagctccatggtttataggacacataggcctcaggcaccgtagggtccaggttgtgcccattttccagccggggctggttgccctggtggcagccctgggtgagtcaccagggtccgcacatggagagcgggaggtcccagcccacccttagttgtcacatgggacagagttgctgtgtcaatcccctcggccctgctgctctgccctgcacacaggcccccatgatgaccttgagcctccaggcatccacccccaccgtatggccctctagacccagctgggcctcaccccactccctcagcttggatcctcacgtggcctggagccagcattaaactcctgtatgtccttcaaaaaaaaaaaaaaaaaa

SEQ ID NO: 6337 - DNA, 4817 bp, Homo Sapiens
  NM_152309
gaagcgccagagcggcggccggtcccgcgcggagcccggcgcccctccagcccgagccaggacgccgccggccccggtcccggccccgggcacgcagcgagccagggatgtgagcggcgccccgcggcatggcagcctcaggggtgcccagaggatgcgacatcctcatcgtctacagcccggatgccgaggaatggtgccagtacctgcagaccctgttcctgtccagtcggcaggtccgcagccagaagatactgactcacaggctgggccccgaggcctccttctcggcagaggacctaagccttttcctcagcacccgctgtgtcgtggtgctgctgtccgcggagctggtgcagcacttccacaagcccgccttgctgcccctgctgcagagagctttccatcctccgcaccgcgtggtcaggctgctctgcggcgtgcgggacagcgaggagttcctagacttctttccagattgggcccattggcaggagctcacctgtgacgatgagccagagacctacgtggcagctgtgaaaaaagccatttccgaagattctggctgtgactcagtcactgacactgagcctgaggacgagaaggttgtttcctactcgaagcagcagaacctgccgacggtgacttcacctgggaacctgatggtggtgcagccggaccgcattcgctgtggggcagaaaccactgtctatgttattgtgagatgtaagctggatgacagggtggcgacagaagcagagttttctcctgaggattctccctctgtaaggatggaagccaaggtggagaatgagtacaccatttcagtgaaggctcccaacctttcatctgggaacgtttctctgaagatatattctggagacttagtggtgtgtgaaaccgttatcagctattatactgacatggaagaaattgggaatttattgtccaatgccgcgaatcctgtggaattcatgtgtcaggcctttaaaattgtgccctacaacacagagacccttgataaactgctaaccgaatccctgaagaacaatatccctgcaagcggactgcacctctttggaatcaaccagctggaagaagaagatatgatgacaaatcagagggatgaagagctgcccaccctgttgcattttgctgcgaagtatggactgaagaacctcactgccttgttgctcacctgcccaggagccctgcaggcgtacagcgtggccaacaagcatggccactaccccaacaccatcgctgagaaacacggcttcagggacctgcggcagttcatcgacgagtatgtggaaacggtggacatgctcaagagtcacattaaagaggaactgatgcacggggaggaggctgatgctgtgtacgagtccatggcccacctttccacagacctgcttatgaaatgctcgctcaaccccggctgtgacgaggatctctatgagtccatggctgcctttgtcccagctgccactgaagacctctatgttgaaatgcttcaggccagtacatctaacccaatccctggagatggtttctctcgggccactaaggactctatgatccgcaagtttttagaaggcaacagcatgggaatgaccaatctggagagagatcagtgccatcttggtcaggaagaagatgtttatcacacggtggatgacgatgaggccttttctgtggacctggccagcaggccccctgtcccagtgcccagaccagagaccactgctcctggtgctcaccagctgcctgacaacgaaccatacatttttaaagtttttgcagaaaaaagtcaagagcggcctgggaatttctacgtttcctcagagagcatcaggaaagggccgcccgtcagaccatggagggacaggccccagtcgagtatatatgacccttttgcgggaatgaaaacgccaggccagcggcagcttatcaccctccaggagcaggtgaagctgggcattgtcaacgtggatgaggctgtgctccacttcaaagagtggcagctcaaccagaagaaacgatcggagtcctttcgtttccagcaggaaaatcttaaacggctaagagacagcatcacccgaagacagagagagaagcaaaaatcaggaaagcagacagacttggagatcacggtcccaattcggcactcacagcacctgcctgcaaaagtggagtttggagtctatgagagtggccccaggaaaagtgtcattccccctaggacggagctgagacgaggagactggaaaacagacagcacctccagcacagcaagtagcacaagtaaccgctccagcacccggagcctcctcagtgtgagcagcgggatggaaggggacaacgaggataatgaagtccctgaggttaccagaagtcgcagtccaggccccccacaagtggatgggacacccaccatgtccctcgagagaccccccagggtgcctccgagagctgcctcacagaggcctccgaccagggagaccttccatcctcctccacctgttccacccagaggacgctgattccacctcctaaaacctgcctacttcaggactttaagactcacagtcttcagcctgttaatgatgtcttcatgttgagttttatagcatgactgttgaccttaagatccattctcattgctgataatgctgcagccctgctggtttgggcttgcctcgaagattttattaaggcacgaagaagtgaaaaactaagggcttcattcaccatcaccaagtatatcgaaccatatacttgtttgccaaaaggatgaagacttaatcgaaatacttacctctaatttgccatatcagaagcctaaaaagaatgatcataaatgtacttcaccagtgattttactgaaatgcacttatattagtctttatgtatttgctagttcagcctgatttctagaagaggttatagtgtgagacttgtagtattcaagtaagataagtgacctaattttaaaataattcttctacttttctgtatattcagcagggtatttaagtgctagggctggtcacacacaaccaactgaaaaagactagagggattagtacaaactcctcttatacagaaggcaaatctgaggttccacagaagtctggaaccaagactattcagttggttaaataaagaggttagtctagactgggcctgctcattctaggtcaccacattttccatctccaaatagccaggccctctctccctcaagaaatgcccagatgtagaaattcatcagtgcctattggtcttccagaattttccatcttccgtatctcccaggcatgagactaccaagtttgtttgttttctttccaatttgggaatttatacttcagtatggtttcaacgcagttatgtttccagagaacatctagaagtggctggaaaccagaagctggggattccagggaccccacttagtgctctatttcctttataggttttatttctggtcatagagagagaaggacctttgactttttcttcgttgaggcttctgaggaggaaaaacaaacctaaaatagaaatacagtcagcctttcaaatccatgggttctgtgtccgtggattcaaccaaccttggatcaaaaatatttgaaaaaaaatctacaaagtttcaaaaagcaaaacttgaatttgctgcatgccaagaagtatgttgaattcatgtaaatgaagtgatgtgtaggcattgtattagatattataagaaatctagaaatgatttaaagcatacaggaggatgtgcataggttatatgcaaatactatgctattttatatatgggacttgagcatttgtggattttgatactgggggatcctggaaccaatcccccatggataccaaagtacgactgtagttatctattttttacatacttattattaccaccatgctcagtaagtccatttttgcatggaatatggagccttaaaacatgtcatgaatttggagtccctggcacataaatctaccttcaaatcagaggtccttaatgatgcctaaacatacagtaaaattagaatcagaaatacttctttaaaaaatattcaaaatgtgtttgtttcccatgggattattctctatcccacacgaatgtaaaaaaatccacattaatgatccatttaagtatagttttattgggtccttttctaatgattaaaggttctttctcaatttcattcctcagtcctgcaagtaaggactcatactgaagagtactgaaacaaggacttcttgtcagaaacagcttctggaatcttgggttttgtttttgttttttgacaaaatacactattggccatgtccatcacgagagtgtttgtagtaattaattaccttgtacaggacctggcacttagtagcattcttcaaatgttccctcagtgatccttttactctccttgtcacttatttgggagaaataggggcacgtgagataagaagaagaataattttgatgttggtatgcttgccctgttacttatagacagtctttgtcataggcaaacttgaatttgatttaaaatagggctgggaaaaatattcaataactgtaagcccccttttggatgccaaacttagaattttgtacattctctgatgaacaagcatttagatcgtaacatggtaaagcctattaccagccaatgttgttagcatctttgtatgcacatcactgtttgtgcaatatatgaatattttgttgcattgtattcttatataaaaataagtagaaaacataaaattgaaattgctgatgagaaaaaaaa

SEQ ID NO: 6338 - DNA, 1347 bp, Homo Sapiens
  NM_152310
cgccgccgcgcacatgcctaggttcgacgccctcctccctttgcccaggagttccttctgtcccggctctgttccgtctcgccccgaggttcacgccatcctcggagccccagcctttcacccagcgcctccaagctttggaccttgacttctgcaaaactagatggtcacagccatgaatgtctcacatgaagtaaatcagctgttccagccctataacttcgagctgtccaaggacatgaggccctttttcgaggagtattgggcaacctcattccccatagccctgatctacctggttctcatcgctgtggggcagaactacatgaaggaacgcaagggcttcaacctgcaagggcctctcatcctctggtccttctgccttgcaatcttcagtatcctgggggcagtgaggatgtggggcattatggggactgtgctacttaccgggggcctaaagcaaaccgtgtgcttcatcaacttcatcgataattccacagtcaaattctggtcctgggtctttcttctcagcaaggtcatagaactcggagacacagccttcatcatcctgcgtaagcggccactcatctttattcactggtaccaccacagcacagtgctcgtgtacacaagctttggatacaagaacaaagtgcctgcaggaggctggttcgtcaccatgaactttggtgttcatgccatcatgtacacctactacactctgaaggctgccaacgtgaagccccccaagatgctgcccatgctcatcaccagcctgcagatcttgcagatgtttgtaggagccatcgtcagcatcctcacgtacatctggaggcaggatcagggatgccacaccacgatggaacacttattctggtccttcatcttgtatatgacctatttcatcctctttgcccacttcttctgccagacctacatcaggcccaaggtcaaagccaagaccaagagccagtgaaggtttggagagaacaatgaagctccaggctctctcttctccagggcaccaagaggctgggcttagttttgggagaatgattaggttgccttacctgcatggtttccccagaggatgtgtgccccaaggtggctggaatttttgacagacaagaagggtgaccttgggatgggggtgtggtctgttactttaatgtttctgtttttaatgtgaaggccaagcaggccctgggatgggagtggggcggaggagggtcctaagagctgattatttaatttctatccagaaatctttcttcttcttgctctgtttttttaaattaaagatttcaacaaaaaaaaaaaaaaaaaaaaaaaaaaaaaaaaaaaaaa

SEQ ID NO: 6339 - DNA, 2493 bp, Homo Sapiens
  NM_152313
ccctccgggcaggggaggtaggcctgggcctgacgccggccacgcagcggcgggagagtgagcactcgggcggcggcgtcctggagacccgcgagagatggaagcggcggcgacgccggcggctgccggggcggcgaggcgcgaggagctagatatggatgtaatgaggcccttgataaatgagcagaattttgatgggacatcagatgaagaacatgagcaagagcttctgcctgttcagaagcattaccaacttgatgatcaagagggcatttcatttgtacaaactcttatgcaccttcttaaaggaaatattggaactggccttttaggacttccattggcaataaaaaatgcaggcatagtgcttggaccaatcagccttgtgtttataggaattatttctgttcactgtatgcacatattggtacgttgcagtcactttctatgtctgaggtttaaaaagtcaacattaggttatagtgacactgtgagctttgctatggaagtgagtccttggagttgtcttcagaagcaagcagcatgggggcggagtgtggttgacttttttctggtgataacacagctgggattctgtagtgtttatattgtcttcttagctgaaaatgtgaaacaagttcatgaaggattcctggagagtaaagtgtttatttcaaatagtaccaattcatcaaacccttgtgagagaagaagtgttgacctaaggatatatatgctttgctttcttccatttataattcttttggtcttcattcgtgaactaaagaatctatttgtactttcattccttgccaacgtttccatggctgtcagtcttgtgataatttaccagtatgttgtcaggaacatgccagatccccacaaccttccaatagtggctggttggaagaaatacccactcttttttggtactgctgtatttgcttttgaaggcataggagtggtccttccactggaaaaccaaatgaaagaatcaaagcgtttccctcaagcgttgaatattggcatggggattgttacaactttgtatgtaacattagctactttaggatatatgtgtttccatgatgaaatcaaaggcagcataactttaaatcttccccaagatgtatggttatatcaatcagtgaaaattctatattcctttggcatttttgtgacatattcaattcagttctatgttccagcagagatcattatccctgggatcacatccaaatttcatactaaatggaagcaaatctgtgaatttgggataagatccttcttggttagtattacttgtgccggagcaattcttattcctcgtttagacattgtgatttccttcgttggagctgtgagcagcagcacattggccctaatcctgccacctttggttgaaattcttacattttcgaaggaacattataatatatggatggtcctgaaaaatatttctatagcattcactggagttgttggcttcttattaggtacatatataactgttgaagaaattatttatcctactcccaaagttgtagctggcactccacagagtccttttctaaatttgaattcaacatgcttaacatctggtttgaaatagtaaaagcagaatcatgagtcttctatttttgtcccatttctgaaaattatcaagataactagtaaaatacattgctatatacataaaaatggtaacaaactctgttttctttggcacgatattaatattttggaagtaatcataactctttaccagtagtggtaaacctatggaaaatccttgcttttaagtgttagcaatagttcaaaaaattaagttctgaaaattgaaaaaattaaaatgtaaaaaaattaaagaataaaaatacttctattattcttttatctcagtaagaaataccttaaccaagttatctctcttttatgctactcttttgccactcacttgagaacagaataggatttcaacaataagagaataaaataagaacatgtataacaaaaagctctctccagatcatccctgtgaatgccaaagtaaactttatgtacagtgtaaaaaaaaaaaatctcagttatgtttttattagccaaattctaatgattggctcctggaagtatagaaaactcccattaacataatataagcatcagaaaattgcaaacactagaattaattttacactctaatggtagttgatcttcatagtcaagaggcactgttcaagatcatgacttagtgtttcaatgaaatttgaaaagggactttaaaacttatccagtgcaactcccttgtttttcgtcagaggaaaaggaggcctagaaaggttaagtaacttggtcgagaccactcagccttgagatcaagaaaacctaatcttttgactcccaggccaggatgttttatttctcacatcatgtccaagaaaaagaataaattatgttcagcttaaaaaaaaaaaaaaaaaaaaaaaaaaaaaa

SEQ ID NO: 6340 - DNA, 1770 bp, Homo Sapiens
  NM_152316
tcagtggtagcgcggggactggctgggaagcggtcggtcgagtgtggcctgtgtggactcgcatcttgcccgaagccgggcggaggagagctcaagctaagggtgatcagcccatgacctaaacctccagacaaaataaaacggaaaatttgctagaatcaagaatgatggatccatgttcagttggagtccagcttcgtactacaaatgagtgccataaaacctactatactcgtcacacaggttttaagactttgcaagaattgtcatcaaatgatatgcttttacttcaacttagaactggaatgacactttctgggaacaatacaatttgctttcatcatgtaaaaatttacattgacagatttgaggatttacagaagtcatgttgtgacccatttaacatacacaagaaattagccaaaaaaaatttgcatgtaattgacttagatgatgccacttttctgagtgctaaatttggaagacagcttgtacctggttggaagctttgtccaaaatgcacacagataatcaatggaagtgtggatgttgatactgaagaccgccagaaaaggaaacctgagtcagatggaagaactgctaaagctttgaggtcattacaatttacgaatccaggaaggcaaactgaatttgctccagaaactggtaaaagagaaaaaagaaggcttacaaaaaatgcaaccgctggttcagacagacaagtgataccagcaaagagtaaggtctatgatagccagggtctcctgatttttagtgggatggacctctgtgactgcctggatgaagactgcttaggatgtttctatgcttgtcctgcctgtggttctaccaagtgtggagctgaatgccgctgtgaccgcaagtggctgtatgagcaaattgaaattgaaggaggagaaataattcataataaacatgctggataatctgcggtaccaaactatggagcctttaaaggtctttatttctaaaaatctgttactctaagatacattttaagcttgattatcatatgacaaagattttaaaaccatctcagtgtgccctaatttttcatcttgggtgctttaagattcactatttgatataaattcagataggctatttttcagtagtcagcgttaagcctgtctggatcaatataaacaagtagggtgtaggcagtcctctatttgcatgtttcccatgggcacaaatttcagtgacctagatttagtttaaataccagtttccttaccaggaaggaaagaaaactggtaaggaaactgttgttgttaaaatctaggttaaaattttagttagcacattgtaactgagtaattacatgaagtacaaacctctctgctagctcttcagtctacaaatcgctatgtaaataacagatatgcttcatgattgtgaccagtcatgttatttctttcaaattcttccagtggtttgtccctgtgcatctgttaattcagttcacgtacagcagagcatgtagttatgctgtctctctgtcatctacttgacattctatagaagtgaacactcgaaagaactggtcaacaaagatgaaagtgcagcaaagcaatgaaaaatgataacactggaagtgaaattttaatcaaacataaatgaatttgtagaagaagtcactgaccatgggaatgttgttcttgctgctgtgtattcataggagcttagtgaaggcaaacttaccaacacaaataagcaaagtggttgcaataaagacagatacgtccc

SEQ ID NO: 6341 - DNA, 622 bp, Homo Sapiens
  NM_152318
atccgggcctgagagtgcaggcttgagggaagcatggaggtccatggcaagcccaaggctagcccgagttgttcgtcgcccacccgggattcctcaggagtcccagtgtccaaggagctgctgacggcgggaagcgacggccgcggaggtatatgggacaggttgctcatcaactcccaacctaagtccagaaagacctccactcttcaaacagttcggatagagaggagtcccttattggaccaggtacagacatttctcccacagatggcacgggcaaatgaaaagctaagaaaagaaatggcagctgcaccacctggtcgtttcaatattgaaaacattgatgggcctcatagtaaagttatacaaatggatgtggctttgtttgagatgaatcagtcggattcaaaagaagtggacagttcagaagagagttcacaagacagttcagagaacagttcagaatcagaagacgaagatgacagcatcccatctgaagtcaccatagataacattaagcttcccaattctgaaggtggaaaaggcaagattgaagttttggacagtccagcaagtaaaaaaaagaaatagtcaaataaattatctgaaaagaaacaggtga

SEQ ID NO: 6342 - DNA, 2711 bp, Homo Sapiens
  NM_152322
agcgtttgtctcgttaatggagaacacagtcacaggatcaaaagggctaatttcaggataattctcctgaaatcctgctaatttcaggataattcactgcttccagaattttagagtactggtaaagaatgaagtgatcagccagcagctgtgcgtcatcttcacacactgctacgggccctaccccatccccaagctcacagaaatcaaacggaaacagacctcgcgcttggatcctcattttcttaacaataaagaaatgtctgatgttacatttctggtagaaggaagaccattttatgctcacaaagtgctgttatttacagcctctccaaggttcaaagcactcctctccagcaagccgacaaatgatggcacctgcatagagattggttatgtgaaatactccatctttcagctggttatgcagtatctctactatggtggcccagagtcactgctcattaaaaacaatgagatcatggagcttctgtctgctgctaagtttttccagctggaggctttgcagcgacactgtgagattatctgtgcgaaaagcatcaataccgacaactgtgtggatatttacaaccatgccaagtttcttggagtcacagagctctcagcatattgcgaaggctactttctcaaaaacatgatggtcctcattgaaaacgaagcattcaagcagctcctgtatgacaaaaatggtgaagggaccggccaggatgtgctccaggacttacagaggacgttggccatcagaattcagtccatccacttgtcgtcttccaaaggttccgtggtatgaaacgcctagtgcagggaatgcttcccgggaactttccagttctcctgccgcattggctttacacaaacacagacaaattccacctggcacctgtttttggctgggccaaggagctgcctctactgctcccacgtgttcctgttgaaaaacaaaggactttccactggtctgcagatcagatcagctgggtccagagtttaatgggcaactggacaaccaagttaaccccaattgaaagcacccctaggaccattgaacacccactgccggggaccactgtccagtgaatggattgaggccttttaaaggtcactcaggttccaggttgacagttggaggacttcaccgtaccaaccctgaagagattgtattacacattaaggaccttggtagctgtgcttcagcaaacgtcaaccatggtagcaaattggtgaggctgtgaccaataatgaggaaataatctggcaaatttttaggggtgggaacttttttaaatgttcatttaaaaaaaaacaaaaacagggcagtcttgtagtttaaaatatatttctaaaagcttaacagttcgttttcaactaaattgtgtttagggatctgtgtttgagatttttctttatttcttttttttttttaaatagtaagtcacaggtccacactgtgtaaacatgcatctgataagatactgctgatattctaaacaagttgaaataatcttgccttagtgatcatgattacacaaaagaggtgcactgccaataagtatctctaattcaatagttgaaagcaacctgcatgctaatcgtggtttcggggtgagaataaaacacccccacataacatgcatttgcatgggcccgaacctgtgaaatgttacgtttgtgcttcatttttgccaaggtaaaaatgttccatcatttctagctaaaactccatttggtgaaaccaacatatccatttcttttcctagttacggatgatttggggatgcttttgcagaaatgtgttcatagatgatgctgaatgggggaggggggcagcacgtcagagaatttactattaatcccagagttttctctgtattctcagaagatgttaatagtttgttactagccagagagtatgactatgttagattatttttaaagatgaaacatgtatgataggatggattctttctgtattctgagagtgtacagtacaggattattataatgaaagtttatatcaacagggtttcgttggctctgccatatattataagcaaaagagattggtaaagtgccacagtattccagataacttttcagttgcggcctttcttctcgttctttaatttgaaacctagatacatgcagtaaaaactaggagaatgacttttacccttggggacagccaagttttgttgataaacctatttcctagcatgccttcaggaagttgtgccagaccctagattgtgaaggacccactgttcttctgttgtacgagctccctgaaccattgttcagaggaccaatgtcacatcgcttcatgggcatggcccatggagcatctgggtgatatctgtctacagtattggctcttctgcgaggctgatacacaaggcctctcttccacatgatcatttgcaaacctcccccagcccctaccatccaatgtggaaggaaaacaagaactgcctgaagaagagtccaagctacagatacacagcgtgtgcattgcggctgtcaccttcctcctcccacttctgtatcctcagagatgctgcgtggatgtttccttaacctcagctgacttccctgtgaatgtctaatgctagttcagggcctccaggcattgatttgtacagtggtaactcccaatgaggcttctgttatcatttggtgtgctttctctgtca

SEQ ID NO: 6343 - DNA, 1626 bp, Homo Sapiens
  NM_152326
gacggtcccgctgtcctgcctggccggggccgcactgcgccgcccgccgcccgccgcccgccgcccgccgccggcgacggcaccgccgccctgcgatccggccgcggcggctcagagcgcggctgcggcgggcgcgggcggcggtggctccctcccgtgcgtccgtcgtgggacctttgcccgctcgcccgcgggggacagcgcgcgctccggtccgcggcaggggcggggacgcccggcctgtggcccccgcgccccccatggcctggctctgccgtggcttgctgaccttggagaattggagaagcttgtgccctgctggaaagtgggatggcagtacccgcttcatctagtagtcggggagatcaagagaggtatgggacctgaagaggatggcagactgtgcagtgcggtgcacaccggtctccaggttgttttcaccctcctatctcctcccaggagctaacgtataaagctgaggctcggccagggactgtgatatacccacatccccggaactaggtgatcgcggtgcaggaaccaggtgtgccttcgcgggatccatgccttgaggcccaggaacgccccgccgccagcatgccgtgggacgcgcggcggcctgggggtggcgcggacggcgggcccgaggcctcgggcgcggcgcgctcgcgagcgcagaagcagtgccgcaagtcgtcgttcgccttctaccaggcggtgcgcgacctgctacccgtgtggctgctggaggatatgcgcgccagcgaggccttccactgggacgagcgcgggcgcgccgccgcctactcgccctctgaggcgctgctctacgcgctcgtgcacgaccaccaagcgtacgcgcattacctgctggccacgttcccgcggcgcgcgctcgcaccgcccagtgccggcttccgctgctgcgcggctcccgggccgcacgtggcgctggcagtgcgctacaaccgcgtgggcattctgcgccgcatcctgcgcaccttgcgcgacttcccggccgaggagcgggcgcgcgtgctggaccggcgtggctgcagccgcgtggagggcggtggcacgtcgctgcacgtggcctgtgagctggcgcgccccgagtgcctcttcctgctgctgggccacggcgcctcgcccggtctgcgggacggcggcggcctcacgcctctcgagctgctgctgcgccagctgggccgcgacgccggggccactccctccgccgccggagcccccgcctcagctcccggggagccgcgccagcgccgcctgctgctgctggacctcctggcgctgtacacccccgtgggtgccgccggctcggcccgccaggagctgctgggcgaccggccgcgctggcagcggctgctgggtgaggacaagttccagtggctggcgggcctggcgccgccctcgctcttcgcgcgcgccatgcaggtgctggtcaccgccatctctccaggccgcttccccgaggccctggacgagctgccgctgcccccattcctgcagccgttggacctcactggcaaaggctaggcccggagcaccctaggcgctggattttgggacaaaactatttttcagagcgttgtaccggcactttatatatat

SEQ ID NO: 6344 - DNA, 1769 bp, Homo Sapiens
  NM_152328
ctccatttaatggcgcggacgccggcggcggcgggctcctggccgggccagcgcagcggaagagccaagccagcatgtcggggacccgagcctccaacgaccggccccccggcgcaggcggcgtcaagcgggggcggctgcagcaggaggcggcggcgaccggctcccgcgtgacggtggtgctgggcgcgcagtggggggacgagggcaaaggcaaggtggtggacctgctggccacggacgccgacatcatcagccgctgccaggggggcaacaacgccggccacacggtggtggtggatgggaaagagtacgacttccacctgctgcccagcggcatcatcaacaccaaggccgtgtccttcattggcaacggggtggtcatccacttgccaggcttgtttgaggaagcagagaagaatgaaaagaaaggcctgaaggactgggagaagaggctcatcatctctgacagagcccaccttgtgtttgattttcaccaggctgtcgacggacttcaggaagtgcagcgccaggcacaagaggggaagaatataggcaccaccaagaagggaatcggaccaacctactcttccaaagctgcccggacaggcctccgcatctgcgacctcctgtcagattttgatgagttttcctccagattcaagaacctggcccaccagcaccagtcgatgttccccaccctggaaatagacattgaaggccaactcaaaaggctcaagggctttgctgagcggatcagacccatggtccgagatggtgtttactttatgtatgaggcactccacggcccccccaagaagatcctggtggagggtgccaacgccgccctcctcgacattgacttcgggacctacccctttgtgacttcatccaactgcaccgtgggcggtgtgtgcacgggcctgggcatccccccgcagaacataggtgacgtgtatggcgtggtgaaagcctataccacacgtgtgggcatcggggccttccccaccgagcagatcaacgagattggaggcctgctgcagacccgcggccacgagtggggagtgaccacaggcaggaagaggcgctgcggctggctcgacctgatgattctaagatatgctcacatggtcaacggattcactgcgctggccctgacgaagctggacatcctggacgtactgggtgaggttaaagtcggtgtctcatacaagctgaacgggaaaaggattccctatttcccagctaaccaggagatgcttcagaaggtcgaagttgagtatgaaacgctgcctgggtggaaagcagacaccacaggcgccaggaggtgggaggacctgcccccacaggcccagaactacatccgctttgtggagaatcacgtgggagtcgcagtcaaatgggttggtgttggcaagtcaagagagtcgatgatccagctgttttagtcacagactgagctgatcccaacaggccctggcagcgtctggacttgtgtaaacagcagcagtcacgttcctcggccgccacaaccaacaccaaagcaggaaaaccattttctgtacttttatatttctgttcaacctgttggtttctacaatgattttaaacattggaaagccagccttgtgtatatttttaaaaattatattcaaaatgagccaaagtgctcagagaccttctatgacacattagtgtcacatggttgcgtgtccagccgaagcagtgtaataaacatctccaatggccactgaaaaaaaaaaaaaaaa

SEQ ID NO: 6345 - DNA, 1760 bp, Homo Sapiens
  NM_152329
aaccaccgctgccagctgcgcgctcgggggaaaagacgttgcgcccccgccgactgccggtttcccgggcgcgagcccggatccaggtggtcagtcccggtacgcaaccacggcgagaacccggccctgctaagggagaagggaagccgtttcccgcgggcttcatacagacacggtgctaagacagcccgagtcgcggaccagtccaacaggcaggcagatcagtgggcagcccgcgtgcgcgaggaccccgatggcggcgccgggtggcgggaaggaggaagtttcaaagccagcttgacgtggttgtggccgttgggcgagatgaagctacactgtgaggtggaggtgatcagccggcacttgcccgccttggggcttaggaaccggggcaagggcgtccgagccgtgttgagcctctgtcagcagacttccaggagtcagccgccggtccgagccttcctgctcatctccaccctgaaggacaagcgcgggacccgctatgagctaagggagaacattgagcaattcttcaccaaatttgtagatgaggggaaagccactgttcggttaaaggagcctcctgtggatatctgtctaagtaaggccatttccagcagtttaaaaggtttcctttcagctatgagactggctcatagaggctgtaatgttgatacaccagtttcaacgctcacaccagtgaagacttcagaatttgaaaactttaaaactaaaatggttatcacatccaaaaaagactatcctctaagtaagaattttccatattccttggaacatcttcagacttcttactgtgggcttgtccgagttgatatgcgtatgctttgcttaaaaagccttaggaaattagacttgagtcacaaccatataaaaaagcttccagctacaattggagacctcatacaccttcaagaacttaacctgaatgacaatcacttggagtcatttagtgtagccttgtgtcattctacactccagaagtcacttcggagtttggacctcagcaagaacaaaatcaaggcactccctgtgcagttttgccagctccaggaacttaagaatttaaaacttgacgataatgaattgattcaatttccttgcaagataggacaactaataaaccttcgctttttgtcagcagctcgaaataagcttccatttttgcctagtgaatttagaaatttatcccttgaatacttggatctttttggaaatacttttgaacaaccaaaagtccttccagtaataaagctgcaagcaccattaactttattggaatcttctgcacgaaccatattacataataggattccatatggctctcatatcattccattccatctctgccaagatttggataccgcaaaaatttgtgtttgtggaagattctgtctgaactctttcattcaaggaactactaccatgaatctgcattctgttgcccacactgtggtcttagtagataatttgggtggtactgaagcacctattatctcttatttctgttctctaggctgttatgttaattcctctgatatgttaaagtaatgggtgagaccagaaaaagaaatttcaataacagatcagtttggggtgcatgtatgattttgcagcgtcaaattggagtaagggaagatttctgtatacttgctggagaggaggaatgtgtatagttactcatttagatgactccaaaacttttattaaaaccaattttagttttaaaaaaaaaaaaaaaa

SEQ ID NO: 6346 - DNA, 1703 bp, Homo Sapiens
  NM_152331
ttgggcgccacaccttgcgcgccccggggcccaaggagacgaccctgaagaggagcctggctacttttgcctcagacgagtccggagcgccgggttaaccggtctgaagtcccaggggctttctgggactgctcagccaccggcagcttccggcaccaggggacgccggacgccgtccggacattcggcgcgcttgccacgatcttggacgggtctcgggcctcgacctttgaattccccgctccggctccaagatgtcagcaacgctgatcctggagcccccaggccgctgctgctggaacgagccggtgcgcattgccgtgcgcggcctggccccggagcagcgggttacgctgcgcgcgtccctgcgcgacgagaagggcgcgctcttccgggcccacgcgcgctactgcgccgacgcccgcggcgagctggacctggagcgcgcacccgcgctgggcggcagcttcgcgggactcgagcccatggggctgctctgggccctggaacccgagaagcctttttggcgcttcctgaagcgggacgtacagattccttttgtcgtggagttggaggtgctggacggccacgaccccgagcctggacggctgctgtgccaggcgcagcacgagcgccacttcctcccgccaggggtgcggcgccagtcggtgcgagcgggccgggtgcgcgccacgctcttcctgccgccaggacctggacccttcccagggatcattgacatctttggtattggagggggcctcttggaatatcgagccagcctccttgctggccatggctttgccacgttggctctagcttattataactttgaagatctccccaataacatggacaacatatccctggagtacttcgaagaagccgtatgctacatgcttcaacatccccaggtaaaaggcccaggcattgggcttttgggcatttctctaggagctgatatttgtctctcaatggcctcattcttgaagaatgtctcagccacagtttccatcaatggatctgggatcagtgggaacacagccatcaactataagcacagtagcattccaccattgggctatgacctgaggagaatcaaggtagctttctcaggcctcgtggacattgtggatataaggaatgctctcgtaggagggtacaagaaccccagcatgattccaatagagaaggcccaggggcccatcctgctcattgttggtcaggatgaccataactggagaagtgagttgtatgcccaaacagtctctgaacggttacaggcccatggaaaggaaaaaccccagatcatctgttaccctgggactgggcattacatcgagcctccttacttccccctgtgcccagcttcccttcacagattactgaacaaacatgttatatggggtggggagcccagggctcattctaaggcccaggaagatgcctggaagcaaattctagccttcttctgcaaacacctgggaggtacccagaaaacagctgtccctaaattgtaatgcatttgtctgttgttgacatgagagattcaagatcagattctagtgttcagtaaccctatgtgaatcagatgtctcctggataacattaaagccatgtctttgtcattaaaaaaaaaaaaaaaaaaaaaaaaaaaaaaaaaaaaaaaaaaaaaaaaaaaaaaaaaaaaaaaaaaaaaaaaa

SEQ ID NO: 6347 - DNA, 5030 bp, Homo Sapiens
  NM_152332
agtggaggggagggggtaagtgatagggtaggggaggccctgggaaaggcaggacctcgaggcgcggccgcgcgaggtgaccggagtcacagttcccgcaggcggcgacagcagagcgcccactgcctccagcaggtaaccggccgcggccgcgcggcgccggcccagcgcgggcgtgggacgtggagacccggaggagggcggcgggacccgggcggggaaaggcgcggcgtggcttggctcaggtgcgcttctcccacctggcagctcgctcagggctgtggggggcgcctgtgagggcggccccgccttgcgggctggagattaatattaagattggaagtttgtgtcttttgctggatattggaaattgaatgtaatggcaacagaatttataaagagttgctgtggaggatgtttctatggtgaaacagaaaaacacaacttttctgtggaaagagattttaaagcagcagtcccaaatagtcaaaatgctactatctctgtacctccattgacttctgtttctgtaaagcctcagcttggctgtactgaggattatttgctttccaaattaccatctgatggcaaagaagtaccatttgtggtgcccaagtttaagttatcttacattcaacccaggacacaagaaactccttcacatctggaagaacttgaaggatctgccagagcatcttttggagatcgaaaggtagaactttccagttcatcccagcacggacctagctatgatgtgtataacccattctatatgtatcagcacatttcacctgatttgagtcgacgctttcctccccgttcagaagtgacgagactgtatggatcggtttgtgatttaaggacgaacaaacttcccggttcccctgggctaagcaaatctatgtttgatcttacaaactcatctcagcgattcatccagagacatgattcattgtccagtgtacccagtagttcttcttcaaggaaaaattctcaggggagtaacagaagcctggatacaattactctatcaggagatgaaagggactttgggagactgaatgtgaaattgttttataattcttcagtagaacagatctggatcacagttttacagtgcagagatttaagttggccctctagttatggagacactcctactgtttctataaaaggaatacttacattgcccaaaccagtgcatttcaaatcttcagccaaggaaggttccaacgctattgaatttatggaaacgtttgtatttgctattaaacttcaaaatctacaaactgtaagacttgtatttaagattcaaacccagactcccaggaagaaaaccattggagaatgctcaatgtcactcagaacccttagcacacaggaaatggattactctttggatataacaccaccttcaaaaatttctgtttgccatgcagaacttgaattggggacttgttttcaagcagtaaatagcagaattcagttacaaattcttgaggcacggtaccttccaagctcatcaacacctctgactttgagttttttcgtgaaggtgggaatgtttagctcgggagagttgatttataagaaaaagacacgcttactgaaggcctccaatggaagagtcaagtggggagagactatgatttttccacttatacagagtgaaaaagaaattgtttttctcattaagctttacagtcgaagctctgtaagaagaaaacactttgtgggccagatttggataagtgaagacagtaataacattgaagcagtgaaccagtggaaagagacagtaataaatccagaaaaggttgttatcaggtggcacaaattaaatccatcttgaagacttcacacattaatttggtgaagaacttgacattcttttagaagacttatgatttcaatttgctaccaatgagaagaggcaaatcaacaaatttgtcaatttatgggggctataattatggtatataatgtatctgatagaaaatttgataagaaaatgtaatgaattttatcagatatccaaagtaaaggaaatgttttaaaactgcaacaagagacacagacagtaaaatcaaagtattattaggatgactaaataaattataaagtctgtgagaatatcaaccatagatagttctttctatattatgtttttgcttttgtattttaagctttacttagatattcaaaacctggtatatcaagtctctgttagtactattggcatttagaagactttaccattatttcagtgctaggcattattgattaggtcttggctccactgtttacctcttgctatgtattttctcccggtaaaaatgaattgaaccatttcaactattttctatatttggagaaagtttgtgccctgtgttttataatttttttacccataagacatcacattatccctttgtaagctacttatctccaaaaaacttcagaaatagaaaactacattttggcaggaataattgaaaacaccagaaggttgaagtttaattggaaacccagaatatacatactttgctgttttcttccctcaaatattttactatttgttttatttggagttaaaataagagtatcatccatatggtccatcctaattcacagaattaaatgagcttaaatagaaaattcagtattttatgataatcacttcgtttttagtttttaaaatttagattattctataatttaccgtgtttgagtattttctcatttttttcataaccatacctgattatactgtgtaacaaatattttctattgcagttttctttccagtacttattagaactcagtatttggaaataatttcagcttaattgaccataagaactgtggccaaaaagaacagttttttggagaggcagatgacattatacctgattttagaaaatctcactttatttttgctaataagtagactaagtgctctgtgttctcagtcttccctttttttctgcccccattcttactttgtcccaggcatgcagagaaagatggtgatattttaggccaggagtataccttgctataacctaagcatgccttctttattccagctcctatgttctgtgtatatcattaacattttcccaaataaacacttaattctcttttccctaggtgccatctcctcaagctacaaaatgtccacatcttatatcccctttgcttctactgctctgattttgtggtaccagtactctctgccactgaacattttgaaatatttttgttttagatttgcaaaaaatgacatataggtcagtactcacatggatttttaagataaatcacctgtgtgataatattttgaatctgagacgaatacaacttttaaaaattgtttttaaaaatagacttttttttttagagcagttgtaggttaacagaaaaattgagaggaagatagagatttcctttctcccctgacaaagccctcaacagcctcccaggctatcagtatcctgcaccacaatggtacatttgttacaatcaatgaacctactctgaaacatcattatcatccaaagttcatggtttacattagagtcccctcttggtgttatacatgctagaggacaaatatatgatgatatgtatgcatcattataatatagtatagtttcgctgccctaaacatcctctgcaaatgcaactattttaatgggtaccaaagaagtaaatgtatttactggcttttagataataaataacgggctttattgtttattttaaaagctacaatttgttttagctggtttctctgttctattaatgctttgaatttccaaatttaatatatgtagtcatgcatttaacttaatatttaattatttgatttatttaattttctatattcttacaatgtatgtatgatgtataatttaagggaaagctatgacttctcagtttcttagaatcctaggtaaataaaacaataaaaagaaaacccttacatttaaaagagctttcaggtacagaagtattgatacaactaagatcctaaatgttttaattagtgtttacttaagcctttttcaggtgaggaggtactaatgctggttatttccttgaagctttatgtggacctataaataaaaatccaatctcctgctaataggtatgcatattgtgagaaaaacgttaggagctggtagtaaaaaatgagattctatgccaaaataacttctcttcatatttgcctaggcatttcttgacctttacccacttacgcaaggagaaggaaatcataatgatgtcatgtgatcaaaggaaaccatggaagggttcacgctgatagctgatagcttttacagtgctcattcctaacagtggatttacttgtaagctttcagatcaacacaaatagctgcagcctgggttaaaatataacatcactatttggcttttgttttgcatgatttttaaaagcagtactcctagggaaatggcctctgaagtatatcagtttcatctcttaccaagactgttaagaagaaactagtgggattttgaacaagttatataattgtggtctgaaaagaccctaaactgaagttctgtttaaatatagttacatgaatttctctgatactaatgtactcaacagccaggtataaactatatctcctagtaacattttccatttttgtttaatcaaatacttgcttatgaaggatttcagaaatttgtaataaatgtcagcttttgatagcatagcagtaattgacatttcaaaaatatatatttctttctgtgtttggttgggtgtaatgaggaaaatacctgataaaatgtctgaagacactttctaatgttatcttggtgcataagctgtaatttttattcaaaattaaatttcaaatgtttgcagttttggctaaaacattgagttgaaagaattatgaaaagtgggcccatatgaagtaccatgttcattttgaaatatagatttaagatttagaaatatattaaaagagttaatggagcctcctaaa

SEQ ID NO: 6348 - DNA, 2507 bp, Homo Sapiens
  NM_152344
agcagtaaatagcaccgtccttggaaataggcagactgtttttgctagttgtggaaccgtggacaagtttagtctaaaacttagtttatgtaaaaggaggacattgattcctacctcaaagggctgttagatgctcaagaagtgacaatacaaatgcctatgaagaaacaggatcaggatcccgccccaaccagcgccaggccacgccccggcgtgtgacgcaagcacgctccgtgcgcgccgtcgcgtcgcggcgctcactgggggcccggctttcgcccgctgctgccgccgccgccgccggccgcggctgcactcccaagatggcggctcctccgggcgagtacttcagcgttgggagccaggtgtcgtgccggacgtgccaggagcagcggctgcagggcgaggtggtagcctttgactaccaatccaaaatgctggctttaaaatgtccctcttccagtggaaagcccaaccatgcagacatcttgctcataaacttacagtatgtttcagaagtggaaataattaatgaccgaacagaaacccctcctcccctagcttcactcaatgttagtaagcttgccagcaaagcacggacagagaaggaggagaagctgagccaggcctatgcaatcagtgctggtgtctctctagagggccagcagctcttccagaccattcacaagaccattaaagactgtaaatggcaagaaaaaaacatcgtagtcatggaagaagttgttattacacccccatatcaagtggaaaactgtaaaggcaaagaggggagtgcactgagccatgtacgcaaaatagttgaaaaacattttagagacgtggaaagccaaaagatactgcaacgttcacaagcccagcaaccacagaaggaggctgccctgtcatcctgagtccgtacacatggaggactcttccagcatccagccaaggaggcgctggtggtggcttcagcggaggcaggccgggggagggaagggatcctatatgtcctgttggctcttaacaaagggtcagcatttccaaatcttagacttgaacaaacaaaacacccaacaaaaaagaacaagagaataatttaaaagttgaatcattacttgactaacagacttcggtccaccatgtccttttcacagccctcttctggaacagtcaccttgttaattttatttttgaaaattattttcccactctgccctttacttctgactttcctttcctagtttgttcctgccattctgtttttataagtggctacacttgccttctgaatgattgaaagaaacttttacatcttttcttccaaaataaaagtaacaagctgactgtgattcttaaattgagaccagagcagcaaacgtctcactttaaatttttgttttcttttcctttttttttcttttttctttttttttttttttttgcacagggcatggcttgaattagttttatttttcttaactttaaatatatatatgaaaatatatattaaaatgttctctaaatattttctgcttcttgcaggtctctttttactagatcatggctgttcttcccacctcatccctctgaaaataaaaatgtattgccctccccaccatccatcatagccaggccactaacttgacttggtgcaagagattcttgctgcgaactttgtagagccagtgtgcagatagaatttggctttgagggttcctgatggctttttagtctttaactgtgtgtgtaccagtctcacatttggcccaaacctcaggattctccctctgcctgtcttacttcatggtactagaagaccttcctcgccactctctccacatgagagagtcagctgccctttctcctgtgcctctgcaggaagaactctcttgcatggcacatctcagctcctcattgagggatagttttctttgataagaaacctggagtccatttactctgacctctctttaaatctatatccagagccactagcccaggaaaaacttgggtgacccgtaatttctcttctcctgctgtccttttgctcttacgccccaccccaactccccttaaattttacaggcttatgacagtttgtatgtgctcagccaatgagcagaaaacctggaaagaatttctggactttagcccaccagtttgtctggttgactaacctgctgagagctaaaattggcacccattgccccgtgccttcaggcagtctcctggggcagagtatgccaccatccgaatatcaggcactgagtgggatgtgggtgatgctcacatgactggctagagctttgggggtggggtgggggttaactactatttttttggccatgatctctttccccttccttttttttttaattaaataaatggatcaaattaaataattcaagccctgccttcaaaatgaaattttttttttagtattatttagcaaaaacaataaaacccaaatttttttaaccatcaaaaaaaaaaaaaaaaaaaaaaaa

SEQ ID NO: 6349 - DNA, 3821 bp, Homo Sapiens
  NM_152348
aaacgagagtcctaaagagcaggcgaaagccacggcgtctgcgtttgcaatgcatgctggtccgtgtagttctcagcctgacaccgtcgttcccagaacccagcgcgctctgtgctggcgggcgcagaggcctcccaggaggagagcaaggacctggcaggggctgctgaggaggaggagagcgggctgcccggggccgggcctggctcctgtgcttttggggaggagattcccatggatggggagcctcctgcctcctcgggcctggggctcccagactacacgtctggcgtcagcttccacgaccaggctgacctccctgagacagaggacttccaagccgggctctatgtgactgagtctccccagccccaggaggctgaggctgtgagcctgggccggctgagtgacaagagcagcaccagcgagacctccctgggtgaggagcgggctccagacgaggggggtgcccccgtggacaagagcagccttcgatcaggtgacagcagccaggacttgaagcaaagcgagggctccgaggaggaagaggaggaggaggacagctgcgtggtgctagaggaggaggagggggagcaggaggaggtcaccggggcatctgagctcactctgtctgacacggtgctgtccatggagacggttgtggccggcggcagtgggggagatggagaagaagaggaggaggcactgcctgagcagtcagaaggcaaagaacagaagatcctccttgatacagcctgcaagatggtccgctggctgtctgccaagctcggccccacagtggcctctcgccacgtggcccggaacctgctccgcctgctgacgtcttgttatgttggacccactcggcagcagttcacagtgagcagtggcgagagcccaccgctgagcgccggcaacatctaccagaagaggccggtcctgggcgacatcgtgtcagggcctgtgctcagctgcctcctccacatcgcccgcctgtatggggagcctgtcctcacctaccagtacctgccctacatcagctacctggtggccccagggagtgcctcaggccccagccgactgaacagccgtaaggaggcggggctgctggccgcggtgacgctgactcagaagatcatcgtgtacctctcagacaccacactcatggacatcctgccccggatcagccatgaggtcctgctgcccgtgctcagcttcctcacctccctcgtcacggggttcccaagtggggcccaggctcggaccatcctgtgtgtgaaaaccatcagcctcatcgccctcatctgcctgcgcattggacaggagatggtccagcagcacctgagcgagcccgtggccacctttttccaggtcttctctcagctgcatgagcttcggcaacaggatctgaagctggaccctgcgggccgtggtgagggccagctgccacaggtggtcttctctgatgggcagcagcggcccgtggaccccgccctgctggacgagctgcagaaggtgttcaccctggagatggcatacacaatctacgtgcccttctcctgcctgttgggtgacatcatccggaaaatcatccccaaccacgagctggttggggagctggcggcgctgtacttggagagcatcagccccagcagtcgcaaccctgccagcgtggagcccaccatgcccggcaccgggcccgagtgggacccccatggtgggggctgccctcaggatgacggccactcagggacctttgggagcgtcctggtggggaaccgcattcagatccccaatgactctcggcctgagaaccccggaccactgggccccatctcgggggtgggtggcgggggcctgggcagcgggagcgacgacaacgccctgaagcaggagctgccgcggagcgtgcacgggctgagcggaaactggctggcgtactggcagtacgagatcggcgtgagccagcaggatgcccactttcacttccaccagatccgcctgcagagcttcccgggccactcgggggccgtcaagtgcgtggcacccctaagcagcgaggacttcttcctgagcggcagcaaggatcgtaccgtgcgcctctggccgctgtacaactacggcgacgggaccagcgagacggccccacgcctcgtctacacccagcaccgcaagagcgtcttcttcgtgggccagcttgaggccccgcagcacgtggtgagctgtgacggggctgtgcacgtctgggaccccttcacagggaagacccttcgcacagtggagccgctggacagccgggtgcccctgactgcggtggctgtcatgcccgccccccacaccagcatcaccatggccagctctgactctaccctgcgctttgtggactgcaggaagcctggtctgcagcacgagttccgactgggcggtgggctgaaccctgggcttgtccgtgccctggccatcagccccagtggccgtagtgtcgtggccggcttctcctcaggcttcatggtgctcctggacacccgcacaggcctggttctgcgaggctggccagcccacgagggggacattctgcagatcaaggcggtggagggcagcgtcctggtcagctcctcctctgaccattccttgaccgtctggaaggagctggagcagaagcccacccatcactacaagtcagcatccgaccccatccacacctttgacctgtacggcagcgaggtggtcactggcaccgtgtccaacaagattggcgtctgctccctgcttgagccaccctcgcaggccaccacgaagctcagctctgagaacttccgcggcacgctcaccagcctggccttgctgcccactaaacgccacctcctgctgggctcagacaacggggttatccgcctcctggcatagactgaggcaggagctggccgggcaagggtgggaagacatctgcgggcgcgtgtccactcaccctgttccctgagcagcagctccctccagggaggccctgggtcccacgccctgggtgcccacatggcctgccaactagggcctgcaaatggagtgggggagtcctggcccctgaatcaccagagccaccaagcctgccagaggggtctcattcatggcttggggacacagggctcctagcaagcaggaagttaagagcaggaggaagcgttgctaccttcacttctccccagctctgccctctgggtccacatgaggacagggaagctcgggaaggggaagggagactggccctgcccagccggtctctagcccctcagcccccgctgggcactctctgtcccatccctctaggacagggaagctggcctggtccagggcactgatggtgcttggattccagcctaaggaaggctggccgtggtccaggagttaagggcttgggtctggggtttaagtggccacccatccaggccctggccagtgtgggaccgggacgggaaggaagaaggaggctaggagcagggggaaaaggtgcacttggccagtggcgcctgccaggagtgagtccatgcgttgtctgcccacccctaccacagtgtttgtgccttcagctgagggggcagcctctgggccctgaacccctgctggggctccacgaccctgagagaaggggtgagaagaatcatctctgcacctcgggtctctgccagaggaagacttaagcatccctgcgacctcacattctagacagagatgaggtccaggggttggcccctgctgccttctcacaatttgcaatagatgtaaataggaccaataaatcctttggaagagccatggggtgaactgag

SEQ ID NO: 6350 - DNA, 1259 bp, Homo Sapiens
  NM_152350
ggattgggatattccgactccttaagggcctggcgcacataaggtgtgaccttttcattcccgttgttatggaggtaggctctctaggaatctgggagtagtagctggggggcaagagcaaataaagagctcgagcttctgtggtctctggggagatgttcccgggaagcctgtctagagggcggagggcagctgttgagatggcgtggctccccggctcctgcgcccgcgtggctttcgcggcgggcgctgcggcccggtattggacagcctggcagggcagcgcggggccgaatccggctgccgtggctgaggctcatggatcactcttttgtggtagggccacatctgccagagcctggagtctgcgaaggccgggacccggttccccggcccacagtgggggtgtgcaaacccgagagaactggattgcgtacccactgcagagtgctgaagacggggtagccacgaggttgcaaattcgtgaagaatcagcatcatgtttggcagctgagtattggagccaggagcctgccatgaggttttgagaacagagtgctgttttagagctggcagcagcatctcagcccaagagaaggttatattcccagaggatgtcagtcccaaggaccagtagctgccatcagtttggattctgaaaactaactggcatcaacactgggtgtagaaacatgcttgccttatgtatcagaggacatgctcagcagatccaagagatatatttggcaactttttctagaaaaggcacattgggtatcattcattacattcttgagtttttttgggtttttttttttttttttgagacagtcttgctgtattgcccaggctggagtgtggtggcacaatcacagctcattgcatcctcaatcacccaggcctaagcaatcctcccaccttgtagctgggactacagctcacagcacacctggctaaaattttttttttgttgagacggattctctatgttgcccaggctggtctcaggctcctgggctcagatggtcctcctgcctcagcttccaaaggcacaggccaagttgtagctttgtcccttgccatcatgcccaacaagaggttctataccttttaatgaattgactttcataaattggttatgttggtgggcaaagttctttaagctggaaattgtaaattcctcctgaaatgttttttcatgcagttaccatgaactaatactacaataaaggatggtcttgggtgtcaattcttgaaaa

SEQ ID NO: 6351 - DNA, 990 bp, Homo Sapiens
  NM_152353
gtctctctgggctctgtgtctaaggagccctagggcactgggtgtgagtcacttaggtgggcctgtgtggaggggtgtctggggaggacattgaacaggctgggctgaaagggcgttcggctgtcgggggaggtctctgggaagacaggttcctcacagcaaagcctgtggtgaaggtctcagaggcctctcaggggaagtctcaaggtctccagtaaggggaacgaggtctggagggaggaggttgtggatcctcaggcagggttgttgagggaggggggtctccaggtccccagaagcagggacctcaggcaggagtaccaggggaggagtgtggaggaagcgggctcctcagctgggggcctcggggtaggaaaggcctgggcccatcctgcccttgtggcccccggctgcagcctcagtggcatgggggtgaagcggagcctccagagtgggggcattctgctcagcctcgtggccaacgtcctcatggtgctctccacggccaccaactactggacccgccaacaagagggccacagtggcctgtggcaggaatgcaaccacggcatctgctccagcatcccctgccagaccacgctggcggtgactgtggcgtgcatggtgctggcggtgggtgtcggcgtggtgggcatggtgatgggactgcggattcggtgcgacgagggcgagtcgctgcggggccagaccacgagcgccttcctcttcctcggcggactgctgctgctgaccgccttgataggctacaccgtgaagaatgcgtggaagaacaacgtcttcttctcttggtcctatttttctgggtggctggccttacccttctcaattctcgcgggcttctgctttctgctggcagacatgatcatgcagagcaccgacgccatcagtggattccccgtgtgtctgtgactgcagcctgcctggggcagaataaaggaacggctttttttagcaaaaaaaaaaaaaaaa

SEQ ID NO: 6352 - DNA, 2703 bp, Homo Sapiens
  NM_152354
ggtactggacgcacgctgcgggcgacattgtttgggacgctgggttctgcttttccagaatcctgccctttccaaaaggaagacggtatgattaagttccaggaaagggtgacattcaaggatgtggctgttgtcttcaccaaggaagagctggcactattggataaagcccagataaacctgtaccaagatgtgatgctggaaaacttcaggaacctcatgttagtgagagacgggattaaaaacaacattttgaatcttcaggcaaaggggttaagttacctttcgcaagaagtgcttcattgctggcagatttggaaacaaaggatccgggatttaactgtgagtcaggattatatcgtgaaccttcaagaagagtgttccccacatttagaagatgtttccctcagtgaagagtgggcaggcatttctcttcagatttctgaaaatgaaaactatgtagtaaatgccattatcaaaaatcaagatatcacagcatggcaaagcctgacacaggttcttaccccagaatcgtggaggaaagccaacataatgaccgagccccagaactctcagggaagatataagggaatttacatggaagagaaattgtacagacgtgctcagcatgatgacagcctcagttggacctcatgtgatcatcatgagtcccaagaatgtaaaggagaggaccctggtagacatcccaactgtgggaaaaacttgggtatgaaatcaacggttgaaaaacgtaatgcggcccatgtattaccacagcctttcccatgtaataactgtggggtggcctttgcagatgatacagatcctcatgtccatcacagcactcacctaggagaaaaatcttataaatgtgaccagtatggaaagaactttagtcagagccaagatcttatcgttcattgtaaaactcactctggcaagactccctatgaattccacgaatggcctatgggctgcaaacagagctcagaccttcccagatatcagaaagtctcctcaggagacaaaccctacaaatgtaaagaatgtggcaagggcttcaggcgcagctcttcccttcacaaccatcatcgagtccacacaggggagatgccctacaaatgcgatgaatgtgggaaagggtttggatttaggtcacttctttgtattcatcagggagtacacacagggaaaaagccctataaatgtgaagagtgtgggaagggctttgatcagagctccaaccttcttgtccatcagagagtccacactggagagaagccctacaaatgcagtgagtgtggcaagtgctttagttcaagctccgttcttcaagtccactggaggtttcacacaggggagaaaccatataggtgtggtgagtgtggaaagggcttcagccaatgtacacaccttcacattcaccagagagtccacacaggggagaaaccatacaaatgcaatgtgtgtggaaaggattttgcgtatagctctgttcttcacactcatcagagagttcacactggagaaaaaccatataaatgtgaagtgtgtggaaagtgcttcagttacagttcatattttcacttacatcaaagagatcacatcagagagaaaccatataaatgtgatgagtgtggtaaaggcttcagccggaattcagatcttaatgttcacctcagagtccacacaagagagaggccctataagtgtaaggcatgtggtaagggcttcagtcgtaattcatacctccttgcccatcagagagtgcatatagatgagacacagtacacacattgtgagcgtggaaaggaccttctgactcatcaaagactacatgagcagagagaaacattataaatgtagtaagtcagggttcaattagtaaaacagaagccacactgtattccagatgatagaggcttactcagcctgtgggagggctaggggagcaaaagacagggacactgccatcgataatgtcagcctgcagcactgaagtgtgccaggcaaggactgtggatttcaagaacttctgtgaagctcccatcaactgctgtatgctacaatggcaaagaggttacttttgacaaatgggtggtttgtggtagtggttgtagttagtggtcaaatttccattaaagggtgtgtccaggaaggaaattctaattgggatgatcatggtaaggtcttcagttcagccaacgtctttagatttttttttagtccccagtagaaaaatactctctgtatgaagaacattcaaaagtgtgctcaaaaatgaaacccatgctcttactatgaaagaacgttagtacccaggttttccatgagattctctacacaggcaagaagctccatagaagtggcatttgaagggtgtggcagaggcagtgctgtgtttatcacactggttccatttccttgcaaataagaagtctatttcccagtaacccttgcagttaagagtgtgcccatgtgattgagttctagccaatggagtgtgagcaaaagtgatataagccactttcaggtctagcctttacaaacatcctcaggcttctctatccctgccaaggtgaccttggaggctgcttattccagactgggttgatagaaggtcactacttcatctgtgttggatttctttttagagtaagaaataaaagttcattgtgtctcaccaaaaaaaaaaaaaaaaaa

SEQ ID NO: 6353 - DNA, 2823 bp, Homo Sapiens
  NM_152356
gttgctggggtccgttgcgttctgcatccagtccttgctgctccgagaggccccaggtgcctccgccacggctcctgtgacgctgtcacctgcgctgtgacctgctccggagtcataaagaggacgccgggacaccaagaagcagggaaatggacccagtggcctttgaggatgtggctgtgaacttcacccaggaggagtgggccttgttgaatcctttccagaagatctctacagagatgtgatgcaggaaaccttcacgaacctcatctgtatagaaattttatgggagagagactctttgagagtgcagaaggtagtcagtgtggagaaactttcacccaggttccggaagacatgctgaacaagaaaactcttcctggagtaaaatcatgtgaaagtggtacatgtggagaaatcttcatgggatattcatcctttaataggaacatcagaactgacactggacaccaaccacataagtgtcagaaatttttagagaagccatataaacataaacaacgtaggaaagccttgagccatagccactgctttcgaacacatgaaaggcctcacactagagagaaaccttttgattgtaaggaatgtgaaaaatctttcatttctcctgcaagcattcgaagatatatggtaacgcacagtggagatggaccttataaatgtaagttttgtgggaaagccttggattgtctcagtttataccttacccatgaacgaactcacactggagagaaacgatatgaatgtaaacaatgtggtaaagccttcagttggcacagttctgttcgaatccatgaaagaactcacactggggagaagccatatgaatgtaaggagtgtgggaaatcattcaatttttccagttcctttcgcagacatgaaaggacacacacaggagagaagccgtacaaatgtaaggaatgtgggaaagccttcaattgtcccagttcttttcacaggcatgaaaggactcacacaggagaaaaaccctatgaatgtaaactatatgggaaagcattatctcgccttataagctttcgaagacacatgagaatgcacactggagagaggcctcataaatgtaagatatgtgggaaagccttttactctcccagttcatttcaaaggcatgaaagaagtcacactggagagaaaccctacaaatgcaagcaatgtgggaaagccttcacttgttccacttcgtttcaatatcatgaaaggactcacactggagagaaacccgatgggtgtaagcaatgtgggaaagccttcagatctgccaagtacattcgaatacatggaaggactcacactggtgagaaaccctatgaatgtaagcaatgtgggaaagcatttcattgtgtcagctcctttcatagacatgaaaggactcacgctggagaaaaaccttatgaatgtaagcattgtgggaaagccttcacttgttccatatatattagaatacatgaaagaattcacactggagagaaaccttaccaatgtaaggaatgtgggaaagccttcattcgttccagttactgtcgaaaacatgaaagaactcacactattaatatatgagagaaatgctattttttaatttttattttaatagagacagggtctcactatcttgtccaggttggtcttgaactcctggcctcaagcatccctcccagcttgaagtgtcaataaaggaaggcaataaaatgtagagatggagttaggtgatgccacgctgggattcactggtggcctatcttacatatgatttcgaaggcagacatgaggaaggccttagtcacattttagagccagccaaattcacatgggctgtgtggccccctgattctagcccattttcctgattctctggcttgtcaatcaagagtatcctccaaatctcttgactttccttttttcagaggtgtaggtttccaaagatgtccccagaagctccacattcaagttctatctacagtttggtttttctttaagtattgtaatgtacataccagagagataatgcagactgtcatgggtggggaatgttctctgatgctcaactcccctagtctgcagattgagttggtaggaggtgtgatttgtttacatgcacctttgttcctgctggtagtgaccttgttcttgattcagcctgacagctactatgctgccatcagaaccaacttgatgagagctctgctgccctgtgcagtgactggtctcatccaggactctcatgtgagaaggaacaccttgctctggtcaggaaatgtccagtgtttcctgttatccacaggagaatgtaatgcctcagttcattttcagttatctttgattatatgtgattgacaatgtgtatttttgagggagcaaagatttctgtacatatttcttaaaaatagtttattcagctgggtgcagtggctcatgcctgtaaccccagcactttgggaggccgaggtgggcggatcacgaggtcaggagtttgagactagcctggccaacacagtgaaaccccatctctactaaaagtaccaaagttagccgggtgtggtggtggatacctgtaatcccagctactcgggaggctgaggcaggagaatctcctgaacctgggaggtggaggttgcagtgagccaagatcacgccactgtactccagcctggacaagagagcaatactctgtctcaaaaaaaaaaaaaaaggtttattcactgtttttcagttgtgtacttgcaaatgtttttctcttttttttgtatactgagaagctctattaaaatatcccttgtcaacatg

SEQ ID NO: 6354 - DNA, 2516 bp, Homo Sapiens
  NM_152360
acccaatctatggcttcccttccgttttcgcgtggttcttttgcaagctctggattctctggagtttgaatgtttccagtattggaaccccaccaagtaggactgatcaggtcttacaattctaaaaccatgacctgtaactggggaagacctttgaagttctgtccaacaaagtatatgaagtttcaggaattagtgacattcagggatgtggccatagacttctctcggcaggagtgggaatacctggaccctaatcagagggacttatacagggatgtgatgttggagaactatagaaacctggtatcactgggaggacattccatttctaaaccagttgtggttgatttactggagcgaggaaaagagccctggatgattttgagggaagaaacacagttcacagagatgggggtctcactgggttgctcagctggtctctaactcctgggctcaagcagtcctcctgcattggcttcccaaagtgctgaaaatacagatggagtcttgctctgtcgcacaggctggagtgcagtggcccgatctcagctcactgcaacctccgcctcccaggttcaagcaattctcctgccacagcctccaagtagctgggattacagatttggatttacagtgtgagataatcagctacatagaagtacccacttatgaaacagatatatcctctacacaacttcagagcatatataagagagagaaactctatgaatgtaagaaatgtcagaagaaatttagtagtggttatcaacttattctacatcacaggtttcatgtcattgagagaccctatgaatgcaaagagtgtgggaagaactttcgtagtggctatcaacttactctacatcaaagatttcatactggtgagaaaccctatgaatgtacagaatgtgggaagaactttagaagtggttatcagctgactgtgcatcagagatttcatactggtgagaaaacctatgaatgtaggcagtgtgggaaggcctttatatatgcctcacacattgttcaacatgagagaattcacactggtgggaagccgtatgaatgtcaggagtgtgggagggcctttagtcaaggtggacatcttagaattcatcagagagttcatactggcgaaaaaccatataaatgtaaggaatgtgggaagacttttagtaggcgctcaaatcttgttgaacatgggcagtttcatactgatgagaagccatacatatgtgagaaatgtggaaaggcctttagaagaggtcaccagcttactgtacatcagagagttcacactggtaaaaagccatatgagtgtaaagaatgtgggaagggctataccactgcctcatactttcttctacatcagagaattcataaaggtggaaaaccctatgaatgtaaggagtgtaagaaaacctttactttgtatagaaatcttactcggcatcagaatattcatactggtgagaaactttttgaatgcaagcaatgtgggaagacctatactactggttcaaaactctttcaacatcagaaaactcatactggcgagaaaccctatgaatgcaaggaatgcggaaaggcctttagcttgtatggctaccttaaacaacatcagaaaattcatactggcatgaaacactttgaatgtaaggagtgtaaaaaaacctttactttgtatagaaatcttactcgacatcagaatattcacactggtaagaaactttttgaatgtcaggaatgtgggaaggcctatagtactggctcaaaccttattcaacatcggaaaactcatactggtgagaaaccctataaatgtaaggaatgtggcaagacctttagcttgcatggatatcttaatcaacatcagaaaattcatactggtatgaaaccctatgaatgtaaggtatgtagaaaaacctttactttctatagaaatcttactctacatcaaagtattcatactgatgagaaaccttttgaatgtaaggaatgtgggaagacctttagacgtagttcacaccttactgcacatcagagcattcatgctgataaaaaaccctatgaatgtaaagaatgtggaaaggcctttaaaatgtatggctaccttacccaacatcagaaaattcatactggtggaaaaccttatgaatgtaaagaatgtgggaaggccttcagtcgtgcttcaaaccttgttcaacatgagagaattcatactggtgagaaaccctatgtgtgtaagcagtgtgggaaaaccttcagatatggttcagcccttaaagcccatcagagaattcataggagcataaaagtgtaagaccgtaaagagtacgagcgcgccattcatcatcagacagcccacactggtgagaaatgatggaatgttagtcttataggtatggctttagcaattgagagagttcaaaatgcagatcttgccacattagaaagcattcaatgtcagtcctgttttaatggaatatctgactattcaatggtaaattaag

SEQ ID NO: 6355 - DNA, 1865 bp, Homo Sapiens
  NM_152361
gcatacagcagtgcagtgccgttattccagtctccgtagaaacgctgggactatggcggagccgactgggctgttggagatgtccgagctccccggagatagcagtgtcccacaggtgggcaccgcgagtggcgtcagcgacgtactgcggggggcagtcggcggcggggttcgggtgcaggaggcccgggaaggcccagtggccgaagctgcgcggtccatggcgcggatgccgggccctgtgcccgggcccatccccagcagcgtcccgggcctggcctccgcgccagacccccatcagcagctcgctttcttagaaattaaccggcagctgttgttccgcgagtatctggatggtagctccatgattccggtcagattactacgggatttcgaggaacgccgcaggctgtttgtggaaggctgcaaggcgagggaagcagcctttgacgcggatcccccgcagatggacttcgctgctgtcgcgtttacggtagcgctgactgcctccgaggccctcagtcctctggccgactgagtcggctgtgatgatgacattggtggcaaggaatagccaagtgacccttttgggatcaaaagaacaggcaggctgtgccagtttagttaactcagtcattagggggaatgcaaactggaagggaatacggcaatgtgcaattgaaggaggaagcacactccgaaatggaaacagacaagactgttgaatcttgttttctttcttcttttttagtattatttaaatagagaagggagtctcgcatccctaggctggtcccgaacgcttggacccgagcgatcctcccgcttcggcctcccaaagtgctgggattactttacaggcgtgagccaccgcgcccggccgaatcttgttttcaaacaggtcccaagacacttctgacttagcactttgttagcaatgcattttcctgcatttgtgaagaatccttcatgactttcaccataaaggatggttttgcaaagatatgagaaaaaaaaaatgccaataacagaacccatagaaatgaacctaagtgatgaaagaaaacaaagaaatagagttgtcaggaatccaggtgtacctgagttactaggattggaaggctattgagaggactttgaaatttcacaatttgtggtcatgtcaacaaatcctagtgtaagattcatatttgtgttttctgaggtactttagatgaacagtaaatattcaatagaaaaaaccacgtattatatgatcagtgttttcaagtctatgtgaaattgggtaggtgtggaataaacttgttttttgttaattttaagctttttattttattctagaatatgtattctattcacaagactcaacaaaaaaaagtatcggccgggcgcactggcttacgcctgtaatcccagcactttgggaggccacggtgggtggatcacctgaggtcaggaattcaagaccaccctggccaacatggttaaaccccatctctacgaaaaataaaaaattaactgggtgtggtggcacgcgcttgtagtcccagctactcgggaggctgaggcaggagaatcacttgaacccgggaggcggaggttgcagtaagccgagatcacgccactgcactccagcctggtcaacagagtgggactccgtctcaaaaaaaagaaaaaaagtatcaaaagatgctgtgagaaatctctcttgttgctgtcctttgccaaactcagaactattccatgcaggtgccattgcttgtggcttggagttttgttgttgttttcttggttttgcttgttttttgctttttcactgtacgcctttcaggttttctaatgcatatgcaaataaacatcaatct

SEQ ID NO: 6356 - DNA, 3817 bp, Homo Sapiens
  NM_152362
cggccccggccccggctccggcgctgctcccaccgccgcggcaacggccccggcccacggaggcggctggacggacccccgacggttggacgtacggactctgcttcgagagtaggccatggacaccttcagcaccaagagcctggctctgcaggcgcagaagaagctcctgagtaagatggcgtccaaggcagtggtggccgtgctggtggatgacaccagcagtgaggtgctggatgagctgtaccgcgccaccagggagttcacgcgcagccgcaaggaggcccagaagatgctcaagaacctggtcaaggtggccctgaagctgggactgctgctgcgtggggaccagctgggcggtgaggagctggcgctgctgcggcgcttccgccaccgggcgcgctgcctggccatgacggccgtcagcttccaccaggtggacttcaccttcgaccggcgcgtgctggccgccgggctgctcgagtgccgcgacctgctgcaccaggccgtgggtccccacctgaccgccaagtcccacggccgcatcaaccacgtgttcggccacctagccgactgcgacttcctggctgcgctctacggccccgccgagccctaccgctcccacctgcgcaggatctgcgagggcctgggccggatgctggacgagggcagcctctgaaccccggcgccgcccaaccgcgcccctcgcgccttttggggctctcctgctgggcgcgggtggggtttgtgggtttttttccacctcttttctcccaatcggactccggccaaactcccctagacagatgggtgacctgtctcctttgagaggatgctgaggcatctgtagcagctgtttcaaacaccaatgtcacctctcctcctggcccccgcccaatggggagaggaatttggggccctactctggggaccacctttcacccgtttgtactttctgggccacgccgacccctgggtcgcttgatgtaaaagccaaaagctgctgcctcccacttggatcatgtcgcctgggattttcatccctcgcacaaggactacgggttcacacggtgaactgggggaagggaagtgttagggggcaagtcgcggcacccccccttccataaactcacgtcctaacccccaggacctcagaagatgatctgatttggaaataggatcattacagatggaattagttcagatgatctcatcttggagtagggtgggccccaattcaaggactggggtccttaaaaaaagggggcctggggcagggcgcggtggctcacgcctgtaatcccagcactttgagaggctgaggcgggcggatcacgaggtcaggagatcgagaccatcctggctaacacggtgaaaccccatctctactgaaaatacaaaaaattagctgggcatggtggcacatgcctgtagtcccagctactcgggaggctgaggcaggataatcacttgaaccaggaggaggaggttgcagtgagccgagattgtgccactgcactccagcctgggtgacagagcaagactctgtctcaaaaaaagaagcgggggagtgggggattgaggccacgtgcagtggctcactactctaattccagcactttgggaggccgaggcaggaagattgcttgaactcagaagttcaagaccagtctgggcaacatggtgagaccctcgtctctacaaaaaaaaaattatcgtggtgggccgggcgtggtggctcacacctgtaatcccagcactttgggaggctgaggcgggcagatcacaaggtcaagagatcgagaccatcctggccaacatggtgaaaccccgtctctactaaaaatacaaaaattagccgggcatggtgttgcgtgcctgtagtcccagctacttgggaggctgaggcaggagaatcgcttgaacctgggaggcgcaggttgcagggaggcggaggttgcagtgagccgagattgcaccactgcacttcagcctggtgacagagcgagactcgtctcaaaaaaaaaaaaaaaaaaaaaaaaaaaagtgactgtggtggtgcacacgtataatcccagctacttgagagatgacgagggaagatcacttgagcccaggagttaagaggctgcagtgaccgatgatcatgccactgcactccagcttgggtgagagtgggactctgtcttagaaagaaaaaaaaaagtatttggacacagacatgcatgcaaggaaggccaatgatgccggccaccaccaggagctgggagaggcccagggcagatccccttcagccttggagggacctagccctggccacaccttcatctcagacttgcggcccagagaactgaatgagaataaatgtgcgtgaagcccctcagtccacaggatgtggtactggaagcccccactcaagaaggctccagtgaatgctggcacgttcagccaggatgcctccgtgaagctggagacctctgccctgggtcgggaggggaaactgctccaatccagggactgccacatgggaggggacggagcgtgcccacctcccaggggtgaggggggacccacctgagatgtgtgcacattttatttatttattgttttgagacaaagtctcgctgtgtcacccaggctggagtgcagtggtgaaatctcggctcattgcagccccttccttccaggctcaagtgatcctcccacctcagccccgggtagctgggactacaggtgtgcacgagcacacccggctaatctttgtattttttgtagacagaaggtctcaccatgttgcccaggatggtctcgaactcctgggctcaagcgacctacctacctcggcctcacaaagtgtgcacattgtaatatcgtgatttcatatttggagaatcagcaaccaaccagccaaccatgttgcttttataagacagagctgagaaagcaaagcttggctgtcgtcttggctctggtaccacccacgagatgcgggcgattctcagctcagggcgtggaggcgtggtgtgggggagtctatttgccatttttgtttgtcagcagggggcaggggttctcaaagattgcaaaatgctgctgcaggtcaggaaggttattttgggtgcctgtgggggaggtgaaacaaggtcccatgactgttttgcagaaccttgtctgtggagggtagaggttgcggcaggggcctgtgggccttacttggtgagaaggtaggtctagctggctccattcagtatttgagacatttggaatttgtctgcatttaaaaccaagagatcacacacacctgtctggatttggagtttctcttgaaaactcgccagtccggccgtctgagcctgcactgacgcctggtgaagctgtgcaggggccgcccctctccctttcaccacagtcctctccactccctttcgcctctccctggcctgctgcactcactgataggaaattctgaccccagactcggagcagccttcccgtggttcggtttttgcttccgcgaaaaagccaaaggccttggccagagagccagctgttcctacctctaccccacgcttccaaggcaaccttctccacttatcttaggccgagagacagctcttcaagaacgtacatggatcctgattttctcacgaagtcccgatggaaccctgtgctgttgagacatcagtgtgtaaaactctctgtgtccctgttgggctgtccagacagtctggactcttgtaaatttgagatttaattaaaggaaacaaaccaaataggactgcggaacaatttaaataaaagcacacaccagcctggg

SEQ ID NO: 6357 - DNA, 3229 bp, Homo Sapiens
  NM_152367
atttttactgccagctttcaagttggaagagggaaattacgtttaaaggtcagcagatgacagatggattttcacaatttggaaataaaaacatgagtgaagggttcggaaggcaagtctctggtccattacacacttccagaaaaacttagtacccagagactcacattactgggagtgctatctactcacaagtgttgcactccattgagaaaaaaaaaaaaaccaggaagttgctgttctactgaggactgaccaagaagccatgaaataccttactgtgggagacttagaagattgcctactgaataaggtggacttgaggcgccagcagatttcccaggctgtggaggaggtgcagaaagtcgttcatcatttgaccacaaacatcagcaaccaagacattagatttcaagctgtgccttactctgacacgtacaatgaaaatattaaggttttggctcccagtcagttcctcgtcacagtcccaataaaaggcctggccgggtacagggaggccagggagcagcactggcggtactacacactgcagggcaccaggctgccctgcccgttgcgggaccctgagggtctgcagcagtggctggaggtggaacagtttatgaagagcctgtggcagtggcatgagacagatgtgaacatcgacggagacattgtgcctgccaaggtcctcctagtgttccggaagctggtggaaaatgcagttagaacctgtcacctctcaggtaaggtcagcctgctaggaaaccgctctgcagtttgggttgctgtggaaacatctgcatatcaggtggaactggagctggtccccgcagtggagatccccaccacctggtccaagaaagcccggtggcctcgatgtctgcagcgctggccttcccaagagagagtggagtgcatcaagtcgtttggatttaacttgttggcctgttcaaattatcactggcagctgagcttcctccgtgctgagcaggtgttactggaacagctggatgaagatgggggctgccgtaggaagtgttttcaggtcatgaggcacctgaaggaggacatctggtgcccagggaacaggccggttatcacgtcccaccatctgcagactgtgctcttttggacctgcgagaaatatccccactttaaagactggcaggtcttcagcaaagcatttctgcgcctggtgaggaaactgcacaagtgcgtgagccagcacttcctgaaacactatttcgtccggaacagcaacctctttcagtgcaccaacccgactgaactggacactgtggcccaaaagctggccaccttcctgaagaacccccagatcggcccgccctgatggttgccccggcctgggaggctcttggacattttattctggcttaacattgttctttggatggttcctcagtcaggtgccaggatcctgcctaggagaaaggccacgaatggcagcggaaattacatcaaaccagaaacacttcagcagggggaaaactgtgccccaggatgtctggcccaggcctccctggagcccagcaagcatttctgccctagctaattctcctggagacagctctcatcaggcttccccaggcacagatttggaactggtgacagttctgaacttagtttcccttgttcaggctgtgatcgtctcacagtgaagatggagacagaacccctggaagtctggacatgagcctgctggccaatactgtgcccagcccactgatcatgggcacattctcctgccatttgtaaaatgggaatgttaacgtgcctacctctgagcagggctgtgtgcctatgaaactgtgctggcgccttttcaaggggaaggcattggatcaacacaaagtgttcctggttggttgagtagctggtgtttgcatcctggatcggtacccacagcactgacgcaaaattgcacctgatgagttagtgagcctgtgcttccttgctgccctccagcttccttagcatgtgggtcagtggctcctgatgttctgtctgcttcgctggtattctctaagcagggaggggaatggttttgatgataagtgtaagtcaaagatgaaagtacaactcttggcctgatcccaaccatagccctctctttgcttcccatgccatgggccatggatggaacttccttatatatttatgtaaataacctagtactatgatctgcatggagtgaccttaggtgtctgtcactgctcagtgtgttcctttgctcacttcattcactcactcactcattgacaaataatgctcattaggcaccgggaacacagcaaagagcaaagtggatgaggacctccccctggggatgccacctaatggtggagacaagaaatgaacgacagataaacacgcacagttattacagatggaagcaagtgcttcaaaggaaataaacagaatgttgaagtagagtccacagaaaggtccccgaaggatgaaaatgcaaatagctgaaggggaaggaaaagtgaccaaaggcaggcatggtggggctggcatgagtcagagcacctggccttgtaaagccaggaaggaatcagtattttattctaagatcaaaggtgtgacatttggcctctccagaagcagaagagtatcacgatctgactgcattttaaacaattgttctggtaactgcatgaagaaggtctggggactcacacaggagctgggcactgagtgctcttgagccacccatttggaatttcacagaggcccacaaggcaacatattctgtgtggcacaaccgatcaggaattctaggagttctcggtgagatcaatggtttttttctggcgtttatgtaatgcttctcaactcaaggggctcctttattacttttgaatgtttttgcccaaatgtctataccaaagataaatttctaaagcatgaactactgattttgttttcatgaaaattcacatttgaaaatgaaaatgattacttttcaaaagtactgtaaacggcaggaaagatccaaaattgacaccctaacatcacaattaaaagaactagaaaagcaagagcaaacacattcaaaagctagcagaaggcaagaaataactaaaatcagagcagaactgaaggaaatagagacacaaaaaacccttcaaaaaattaatagatccaggagctggttttttgaaaggatcaacaaaattgatagactgctagcaagactaat

SEQ ID NO: 6358 - DNA, 1486 bp, Homo Sapiens
  NM_152379
gtcgcggaacccggaagcgggggtgcagcgcggcagaatgagggttgattcctcggctgaccccacaatgtcgcaggagcaagggccggggtcctccacgcctcccagttctccgacacttcttgacgctctgctccagaacctttacgactttggaggtacagaaggtgaaacagaacagaagaagatcataaagaaaagggaaaacaagaagagagatgtgatggcttcagcggccttggcagcagagccatctcccctacctggttctctcataagaggccagaggaagagcgcttcgagcttcttcaaggaacttagagaagagcggcattgtgctccttctgggacccccacaggaccagagatccttgctgctgcagttcctccctcttccctaaagaacaatagggaacaagtagaagtggtagaatttcacagcaataaaaaaagaaaattgacgccagatcataacaagaacacaaagcaggctaatcctagtgttttggagagagatgtggatacacaagaatttaacctagaaaaagctcgtttagaagtgcaccggtttggtatcacgggttatggaaaaggaaaggagagaatcctggaacaggaacgtgccattatgctgggcgctaagcctcctaaaaagagttatgtgaattacaaggttttacaggagcaaattaaagaaaaaaaggcagcaaaggaagaagaaaagagactggcccaagaaacagatattttcaagaaaaagaagaggaaaggacaggaggacaggaaatccaaaaagaagtccgctcccagtattttgtcaaatggacggattggacaggttggaaaattcaaaaatggaacactgattctgagcccagttgatatcaagaaaataaattcttccagagtggccaaatgaagtactttgtcaaataaaacgaggatgggaacaactgagtcaactgcagcggccctggaccctgtgcgactctagatagatcgttcttaacacgcatttcacagactgctttttcattttagaaaaaaagtcaaacagaagtaacatttctagttgccgaagtgtctgcttcatggtgctgaacgtgtcaggcccagtgcagcatgaatgtgaagtgaacccactgaaaagtgatttttaatgttctccagcaaacttcactcctgtttcatgttcactggtatttggtgcatttgcttgtaatacagttttttataactttactgttttgtaaatgctagtagtttacattaaattgccttatatttttaatgatttaatgttatgatatcatgaaagaaccaagaatctagtaatttatcagttttgtggaaaagcagttttaatttttagcctaccatgtgtacaaaatctacttcataagaagttatataaataaaataggtttgtagtataaaaaaaaaaaaaaaaaaaaaaaaaaaaaaaaaaaaaaaaaaaaaaaaaaaa

SEQ ID NO: 6359 - DNA, 1812 bp, Homo Sapiens
  NM_152391
gcggaggggcgggccctggccgggtggtcccgggcggatcccgggaaggcggaaggcttcggcagagctgcgccgccgaggctgagcggtcccttctcgctgcggccgcccaggtgcccgcgcccgtggcgctatggaggcggcgctgctggggctgtgtaactggagcacgctgggcgtgtgcgccgcgctgaagctgccgcagatctccgctgtgctagcggcgcgcagcgcgcggggcctcagccttccgagtttacttctggagctggcaggattcctggtgtttctgcggtaccagtgttactatgggtatccgccgctgacctacctggagtaccccatcctcatcgcgcaagatgtcatcctcctgctctgtatctttcattttaacgggaacgtgaagcaggccactccttacatcgctgtattggtgtcttcttggttcatccttgccctgcagaagtggatcatagacctggccatgaatctatgtactttcatcagcgcggccagtaagtttgcacagctccagtgtctgtggaagacgagagactcaggaactgtgagtgcgctgacttggagcctctcttcctatacctgtgcaacaagaataatcacaaccttaatgaccaccaatgattttacaattcttctacgttttgtgatcatgctggctttaaatatatgggtaacagtgacagtacttcgctaccggaagaccgctataaaggctgaatgatggatacattattccttcacacagtggattttgagtaactgaaccaaaggaaaaagaagctctttgctaaattaaggtcttttataaatttagtaaatcagtttataatctttaaagccaaaggtttttttagacttgaaagaaagagccacttaaattcttgtttaaaaataccaatttgcctcctccttcctcacttcgttaggttatggtagtgctcagacatctgcagtgttgaggccagtcactgttggaagtcatccaagaagcccattttgaggccattttgagccttactcttaagttctctatgaagaactacattgatttgttggctttcagaatcttttaggaaataaatcctctccaggacaaaaatgaacatgaatggagtggcattttgttccaagtcagaggtgggcacctataataaatgactagggttcactttctgggactgatgtttaattgtaacacagatacaacagggtggccttgttgtgtataatacggtattatacccgcatgtgctctagcaaggataccaaggcaagcatacatgtagctggcttgagtttgtaccaaaacagtccttcaactttgcactgtgccttaagtaattactaacaaaaggtactaggattagctgcaatctctactttcgatgaggaaatcccagtaagctttctgattcaagtacaatgctgccattttttaaagggccacaactatagaattaccactgttggaatttggtacaaaatatgttttgtctattgaaaacatacacggtaaatggtgttgttaggtaggttctgtccagttcttagggacttttttcacattatagcatttttaccctaaacatgatgttgagattattatatactgtattttcttctaaattaaccctaatgtttaaaaactcactttccccctttaattgaaggcattgttttgttagatgcagtaatgatgtttaccagagattattgtttcctatgcaaaataaattttcatattttgaattctgctgagtcttaaaaaaaaaaaaaaaaaaaaaaaaaaaa

SEQ ID NO: 6360 - DNA, 659 bp, Homo Sapiens
  NM_152398
acaaagggccggaaggaagccggggagacaggtggggtactcgggaagctggagcgggccggcggtgcagtcacgggggagcgaggcctgctgggcttggcaacgagggactcggcctcggaggcgacccagaccacacagacactgggtcaaggagtaagcagaggataaacaactggaaggagagcaagcacaaagtcatcatggcttcagcgtctgctcgtggaaaccaagataaagatgcccattttccaccaccaagcaagcagagcctgttgttttgtccaaaatcaaaactgcacatccacagagcagagatctcaaagattatgcgagaatgtcaggaagaaagtttctggaagagagctctgcctttttctcttgtaagcatgcttgtcacccagggactagtctaccaaggttatttggcagctaattctagatttggatcattgcccaaagttgcacgcactgcctccttacctgtgaggaatgcaaaataaagcatggattaagtgagaagggagactctcagccttcagcttcctaaattctgtgtctgtgactttcgaagttttttaaacctctgaatttgtacacatttaaaatttcaagtgtactttaaaataaaatacttctaatggaaaaaaaaaaaaaaa

SEQ ID NO: 6361 - DNA, 2730 bp, Homo Sapiens
  NM_152400
gagccagtgacaggaggggccgggctggtacttcaggcgcccaggccggcggggcgcgctccggcggctcctgtcagcggcgggtgcggcggatcccagggcagccttcgggcggcggcgctgcctggtgcgtcgcggcgtggtcctccggcggctgtccggggcggtaggagttggctgcgggatgtgctcagccggggagctgctgcggggcggcgacggcggggaacgcgacgaggacggggacgcgctggcggagcgggaggcggcagggaccgagtgggatcccggggcgagcccgcggcggcgcggacagcggccgaaggagagcgagcaggatgttgaagactcacagaaccacactggtgagccggttggagatgactacaagaaaatgggaacactttttggtgaactgaacaaaaaccttatcaacatgggcttcacaaggatgtattttggagaacgaatagtggaaccagtaatagtcattttcttttgggttatgctgtggttccttggcctgcaagcccttggactagttgctgttctttgccttgttattatttatgtgcaacagtaaaacatggccgaattgaattgtttgacatttggtagccatatatgtaattgaagaagttatatatttcactttttgacaaccgaaaaagtttgccttgtttcaaatcatgtgctggctgttttgtaagtaaatttatacatggatgtcacttaaaactaaactcttgatcataacagggttgaatatatattttgaatatacattagcttattcaaaactcttgtttcactactgtgatctctgtctcctttatacacctctatccccatgccaaatcttaagtaacaccaccagaaagtgaacagggaaaataacaggacatggaattcaaatcaagcaatatagttcttataaagagttccaataaaacatttcagaagaaaaagtatgaaacaagctaaaagtaagtttcacttagaaaacttctccccactcacactccccaccaaataatctcatattatttgggaaatatttggatttcaattgtccctacccagcctaaactaaggtaaatgataattagcatacactaccttaatattgtgatgaaaatcagtaaagatagaacgttttctaaaggtcaaaaataatatatttattattactggggaaagctcccaggttaaatataacttttttaaaatgtaacatttggacctagacctactttaatatatcatttgaagtttcagacaattttggtgctaattactttttgtgagtttttaaagtctcatagcctagttgactgcaccctatggtaatgccatattttcttgtatctaacaagttgcatattttttcctagagagacattttcagtgtatttttttttagaaatttataattttatagttctttcataacacttattctgagttttgaaacaatgtatttcctatcttgacatggattttttcacaaaaaatttgtattttactgttgttttcaggaaaaaaatcagatcatttttctttgatatctatatcagaaaggtacaatattaacagtataaaaccaaatgcttaaatttggaacttagccaattttgataatctttttctaaggctaaagtcacatcagtaattggctagccatgttattaaggtgtcttaattcagcattttcaggttttatattgaaatacgcatttctttaaatattctttgaaaatggagaatggctttagtgatattttgggttttgttagagaacctaaaatctttacactttcatctcaaagattataaaggaaaggggggtagttaagatttagaattcaagttaaatttcagaaattggggcagtcaggcatttgtatctttggtagggcaacaagtaaaacatgtagagtgcttgctatcccacttcataaagcttttacccaatcttatttctaaacctctgtgcattcttagtgtcttctcattctgaaacagaaaataaggaaaaacatttaacttagttttctaaaatcagataatcctaaacaaaaatgttagtcagggtcactaaaaagtattgcacatttatataaatacagtccttttaaaatttgacttttaaaaaacaaaagactttgtacgatattgtgtttttattgcttttgcaatatttttatagtagcctttatgaactcagtataagtgcaagttgtttgaaaaggtgtttttattagtgcacaatagaattgtgaggttttcaatagatgtcatgagattttgtatatctacataaaatatcagtacatttttttctaatgctactggaaattttacttttcctttgcaacacataaatgatatgatgtacaaaataacagctctggttccaccagtacctaatgttgaaaacatttttaaagtaatttttaatactaactatttagtatactgtcagtactgtacatctgcacactggtgttaatagggtatatattaaattatataaagaaataagatattttgctgttattctttctacatatattattggtcagtacatcaaataatatttggctttgatatgggaaaaaacaaactttgcctatgtaatggaaataaaatattttcttttatgaaatatattagaatgcagattatactaatatcctgaaataaaactggtaatttatttggttaaaa

SEQ ID NO: 6362 - DNA, 4105 bp, Homo Sapiens
  NM_152407
ggaagcatagcgttcctgtccggaagtcctgagagggaaacgcccgcaaaggctggtttttaagcgggagcatctcttcactcgcagcaagtgcgcgtgcgctgcctctcagcccaaattggaaacatggccgtacggtcgctgtgggcgggccggctgcgggtgcagcgcctactggcctggagtgccgcgtgggagagcaagggatggccgcttccattcagcactgccacccagagaactgctggtgaggactgccgttctgaggaccctcctgatgagcttgggccccctcttgctgaacgagccttaagggtaaaagctgttaaactggagaaagaagtccaagatttaacagtgagataccagagagctatagctgattgtgaaaacataaggaggcgaacccagagatgtgtggaagacgccaagatatttggaatccagagtttctgtaaggacttggtggaggtggctgacattttggagaagactacagagtgcatttctgaagaatcggagcctgaggaccaaaagctcactctggagaaggtcttccgagggttgttgcttttagaagcaaagctgaaaagtgtgtttgccaagcatggcctggagaaactgacacccattggtgacaaatatgacccccatgagcatgaactcatctgtcatgtgccagctggtgttggggtgcagcctggcaccgtggcattagtaagacaagatggctacaaacttcatggccgcaccattaggcttgcccgagtggaagtggcagtggagtctcagagaagactgtgaagaggccatcaggaactggatgttctcccagagcgcagtcacctatgtttcttttatttattaaactaggtttgtattgtacatgaggtacttcatgtgatatgttttggatttagtcatattggctttatttctaagatattctattgatttaatgtgacctgtttggtctcatcagaagtcttaccattgggcatttgaacagtgtgacaggtgttccaatggcctttatcaaaacatgtttaggaaaattggtactgtgataaatttgaatccaaaatccttttaactatgggttttcaactacatgtttcttcctagcggtctctataacaggaattgtgtagtatcttgtattttgtggaaaaaggagatggtagggattggttcaacatttgggtacttagaggataaagcttcgtggtcgtataaatttagatcatttggattgatttttatacacatagattttcaggactttaccttttgttttgtttttttccttttagccatcttttgttcttgtaatcccaactagataggctttatgctcacatcattgtcccatacccacccctttctcatccccatttgcaggggctaaaggtctagatgagacttggaaggcaaggagcatcgaaatttgagatacccaggaccctttcaagcaagaatggccaaaaagccttgtgctgtctttgctcttcaaattattttcagcctccttgtcatataatcatttcaggcaaactgaggcaacactaacagctaatgacccagatggctctatttgggtaatttacctacaacttattccaccagcctttactcctctgcccttttgtcaattttaccttataatcctttattaaatgatgggaggtggtgatcaggacaaaagtgttaggttcccatgatttctcatttcatttattaatagttaatgctgaatttttttttaagtttcctctggctctatttatgttactttttgcgataagaacacttaacataagtattctctcctcttggcaattttttttttttttcctgtgttgcccaggctgacctccaactcctgggcccaagcaatcctgcctcagcctgccaagtagctaggactacaggcgttcaccactgcgcccgcaaagtttttttgttgtttttttttttaagttggtactcacaaatcactacctctgttatattgacaagctctatttcctattctttgtatctgttaagtcacatctgtgtaaacattgagctcaccttttatatattaacctctagaattaatgggcctatgtggttttttttcagtcttatagctggtgttctgtaaaagatttgtccaataaacgacttaatgaatgatacatcagtcagattttaggaaggcagtcaattatggatattttaatgttggaagaggccttaatgatcaaatctcaccctttctgcttctgaagtatgaaaatctagtctttttaggactggacacaaggaaaataatctctaaactattgactaaattccagtgagagtatgaatgaagaacaactagatattaatgtcaatcatttaagattaatgggcatgcaattaagtctccatttaagattaatgggcatgcaatgaagtctccagcagacaatcagatgttgttggatgtctagattatataggtttaggttgaagttataaaataaaataaaattcattttccactggaactctatgacattcagtggagtggtggaaagttaacctcttatacattatagataattctaagacagcacacaaacttatcaataaagccatctccttgtgggccttaccatcttcatcagatttagacccttaaaaaacaagtaaatatgcacttttaaaatgcaatcaaaagactggtggttaagcttgtaaaaccagaacatcttttggcattccactaagtatatattgtaaatttaatgaacaatcaaggttcacaataggaagttgtctttttttgccttccattctgtgagatttgacagatggtgacaataagaaaatgagctgattgtaattactctctgtgtgtttttttattgctagctatcattaccagttagaattaacattaattacaattaacaataattttaggtatggaatgttatgattacctaaagagatgtctctacctaatgagctcaagtgatcctcccacctcagcctaccaagtagccaggaccacaggcaagtgcaccaccatgactggctagttttgttttttggtttttggtttttggtttttggttttttttttttggttggttggttgttttttacaggcggggtctcactatattgtccaggctagaagaattttctaatggtctattacacctcccgttttggcaagtaaattcagaataattttaggttcttttgttattcagtagttttgcagacttaaaagtgtaaatttagaattagaagatgaagctatagtagtaagaatctcaagctgaagggctttggggagccaaagcagcatattagagcataggcttgaacttaaatctcagctcagtcacctgcaggactttaggcaccagtgatttcacccttctgagcctgtttctttattcgtaaaatgattataataattctttcacagcgttgtgaggattaagtgaaatgtgttaaatgcctactacagtaggtgctcagatatttatttttatttttttattatgcacattgtttttcctgcctttttatggctgtctaaagtctagggaaaagggaagactggttaatgatgagtagaaaaaacttgtaagctaatcattcactgacttattttccttccattttctggtttttaaaattagccacaccacaggaaacccacatttttagatggaaagagcaagaaaattgtgtcagtgctcttagttattttcatcttaatggtatagtgaaaagacattgacttgagatgatactaaggaagctttggctcactctcacttgaagaggggatcttggtgttgtagtacttggactgtacaaatgttttactgacttttcttactgctgtaaaggaatcaggcagttgggtattgatatgttatttggtgctctcattcatggcaaaggatttgataaataaaagttctttaaacactaaagcaaaatcaaatgagcaaaactaaggatgaaatgtaatattcatcagaacaaggatcactgagaaaaaatattcagaaacaactttaataaaacctgaattgaaataactgca

SEQ ID NO: 6363 - DNA, 1969 bp, Homo Sapiens
  NM_152408
tgaggtttggtctctgttgtcacaacattcagtacaatctgctgcccaggacctggacattgacagataaaatgaagtgggaagaatatgaagaactgcttcattatgctatagtgactccaaatattgaaccctgtgcttcacagtcatctcatcctaagggagaattggtgccagatgtcagaatttctacaattcatgatattcttcatagtcaaggaaataactctgaagtaagagaaactgcaatagaagttggaaaaggatgtgatttccatatttcaagtcattcaaagacagatgagtcatcaccagtgttatcgccaaggaagccttctcacccagtcatggattttttcagttcacatcttttagctgactcttcctcaccagcaacaaattctagtcatacagatgcccatgaaatacttgtgagcgattttcttgtttctgatgaaaaccttcagaagatggaaaatgtgcttgatctttggagttcaggtcttaagacaaacatcatatctgaactaagtaaatggagacttaattttattgactggcaccgaatggaaatgagaaaagagaaagaaaaacatgcagcacatttaaaacaactgtgtaatcagatcaatgaattgaaggagctgcaaaaaacctttgaaatctccattgggagaaaagatgaggtgatttctagcttgtctcatgccataggcaagcaaaaggaaaagatagagttgatgagaacattcttccactggcgaatcggccatgtcagagccagacaggatgtttatgaaggtaaactagctgaccagtactaccagagaactttactgaagaaagtctggaaagtctggcgttccgtagtgcaaaagcagtggaaagatgtggtagaaagagcttgtcaagcaagagctgaagaagtttgtatccagatttccaatgattatgaagccaaagttgctatgttatctggagctttggaaaatgcaaaagctgagattcaaagaatgcaacatgaaaaagagcactttgaagattccatgaaaaaagctttcatgaggggtgtatgtgcattaaatcttgaagccatgactatatttcaaaacagaaatgatgcagggatagactccacaaataataaaaaggaagagtatggtcctggtgttcaaggaaaagaacattctgctcatttggatccttcagctcctccgatgcccttaccagttacatcaccactgctgccatccccaccagccgccgtcggaggagccagcgcgactgccgttccctcagctgcttcgatgacttctaccagggctgcttccgcatcttctgttcacgttcctgtttctgctcttggtgcaggatctgcagctactgctgcatcagaagaaatgtatgtgccaagagttgtaacctctgcacaacagaaagcaggaagaactattacagcccggatcacaggaagatgtgattttgcttcaaaaaatagaattagcagcagtttagctataatgggagtttctcctcccatgagctcagttgttgtggaaaaacatcatccagtcacagtgcaaaccattcctcaagcaactgcagcaaaatatccccggaccattcatcctgaaagtagtacctcagcttccagatcacttggaaccagatcagctcacacccagtctctcacaagtgttcattccataaaagtggttgactaaagtgaatatgtccatagtggggtcttttaatccctctggtcttaccaagggttagaagtcttttggttttaacttttccatattgttagaacatcatggagacatcatgttcatctgttcaaaattacaagaggctttttcaagctctaccatgctttgtaactatatgtagaaattattttaatgttattttttatttaagcaattaagtaaaacttttttaaattaaaaaagaaaaaaaaaaa

SEQ ID NO: 6364 - DNA, 4585 bp, Homo Sapiens
  NM_152415
gcagagggggcggagagcgcccccgggggcggggcacgcaagtgacggcggcgcgggtggtggagcgctgggcggccaggctccctggctggccggtttgggcgtctgggccgtgaaggtgggacctcctgttccgggccgcaagtttccctctccagccgcccgccgttcgtagcatgtcccccagaactcggggagcgcaggcaggacaggcttagagaagacgcggtccccagcgcttgggccacggacgtcccaccccgctcctctgtcgctggagaaccgccgggccgagccactgggagaagcaggccagagccttccagggcctccggcccgtggacccgaggaggatgagctggctttttcccctgaccaagagcgcctcctcctccgcggctgggtcccccggtggcctcaccagcctccagcagcagaagcagcgcctgatcgagtccctccggaactcacactccagtatagccgaaatacagaaagatgtggaatacagattgccattcaccataaacaacctgacaattaacattaatatattgcttcctccacagtttcctcaggaaaaaccagtgatcagtgtttatccaccaatacgacatcacttaatggataaacaaggagtgtatgttacctctccattagtaaacaattttacaatgcactcagatcttggaaaaattattcagagtctgttggatgagttttggaagaatcctccagttttagctcctacttcaacagcatttccttatctatacagtaacccaagtgggatgtctccttatgcttctcagggttttccatttcttcctccatatcctccacaagaagcaaacaggagtatcacttctttatctgttgctgacactgtttcttcttcaacaacaagtcataccacagccaagcctgccgctccttcatttggtgtcctttcaaatctgccattacccattcccacagtggatgcttcaataccgacaagccaaaatggttttgggtacaagatgccagatgtccctgatgcatttccagaactctcagaactaagtgtgtcacaactcacagatatgaatgaacaagaggaggtattactagaacagtttctgactttgcctcaactaaaacaaattattaccgacaaagatgacttagtaaaaagtattgaggaactagcaagaaaaaatctccttttggagcccagcttggaagccaaaagacaaactgttttagataagtatgaattacttacacagatgaagtccactttcgaaaagaagatgcaaaggcagcatgaacttagtgagagctgtagtgcaagtgcccttcaggcaagattgaaagtagctgcacatgaagctgaggaagaatctgataatattgcagaagacttcttggagggaaagatggaaatagatgattttctcagtagcttcatggaaaagagaacaatttgccactgtagaagagccaaggaagagaaacttcagcaggcgatagcaatgcacagccaatttcatgctccactatagattttcctggaaacatgaactgccaagagaggaatgggacacaaaaccaaacactgttttatatttatggtttgcaaactggcatttcatcagtggctaaattcacagatatcctatatagattgtatacagaactgagactgattttgtaccgattagaatgattgctatgatctttgagaaatttttctgcactatttgcactgaaatgtttatttattgttgataaattgtatcatatttaagttccactgctgttcctcttaccttgattaaatgcctatgcatgtacttttagctagtttttaatattttataaaacttcatttaaatttgtatttttaacttgaagttccatttctttatcaaggatggtatttagatttttttcctcttaaccttttttcaaaaactattttcaactgtgaggaaacccttatttttctttctttgtggataaaactttcaaaagcaatttaagatattcatagtgttaggaaacaccaaacctgcctatgtgccatctcacaaaagaaacttttaatacctacaataaatcaaaagaataaaccagctgttcttatatattgtttcatttttaaaactaaagatgcatttaagaagcaatacaagtaaatattttacctaataggaaaaaaaaaagttgcctttcatttaaaccattccaacagaaattcttatgctaatttaaaacatatatatatctggtaggtttgtggttggataggttttctaaattcctaatgttaaaaacaatctttatgttaatatacactaaatctatacacaaaaaaagtcagtgaacttttctgacctttactgtgagttaccttttcctaagaggaaagctatagtaataagtaaaatttaatttttaggcaatcctgatttttaatgaatttaattgagtgttcttgtatactacattgagcagtttgcttctataccgtgtcacaaaattcatgtatttcttgagaagccctaaaagctcataaaggaaaatgccgtgaactatgtagctcaggcttggtaaggtgccatctaaattacaaaacaaactaatgcataattttgcttaaatttcatcccagtatgattgtcttcccaacaccagcatatagtatagattgtctgtcttttttatattttttagttcttcctgtacatgtttttggcaataaagttataggaagaacaaaattattttgttagaattaaaacatgcttaatatttagtctgtttgtggagggcaggtattcacgtggactgagatacaatgttggatacagaaaataactttcattgtcttcctgacactgtgctaaggacatgctgttaaagcttcaaagtgaccagatgaggaaggaataattaattattactcctgatttgtagataactgaggtaagagtgtttcaaatttatgatagtcttttgggtattcagaaacctttccttatactgcactggccaccagagcttaattttcccagcagttacagcaatgggagatagaacagtctcaatcttttgccaaccatcaggttcctagaaaccaggtaggtgtatcccataacaagggaggagcataccacagcccctcatttgattaattcatttgatctatctatgttattaagtacctactaggaataaggcattgtggaaatactatacaaagataaacattgtttagatgcttatctactttccttttcaccagaaaaacagaaaaaaaagaaacattttcttacagagtaaaaatgttctacataatcacatgagtagttcatctcagtgttttttattctttaaagttgaactatcccagtttcattctataccattcattggataaccttgttacaacccagtcatgaaacagagcagtgtgatcagttatctgcatttaacaaatagacaaatcagtttacataaaggttatgtatgtcacccacgatgaaaagaatctgcatttgaatatgcccgtatgaatgtgggttctgtttttgcaacagagattaagtgaccattttttctaattttatggctatatattttcttcataaaaattggtcacatcggagaagcagtgccacaggaaaaatgaaatgcatgtgaaagtttgtattctgattttacaagatgagatagaaatcagaattaaagaggaatacttaggagttactaggctaatcagtgtacgaatttgtcataggtagagatttaaaggttaatatcttaaaatagaagaaaattctaaatcaatcaatcagtgagatataaactaaacagacccacttcaaagttgaaagaaatttctaggcataaattgagactaggaaatttatatcagaatagagggtgcttgacacatatatatgcttaaattgaaggacagctcagattcatttttaggagaagaaagtaaactaatgtgctcttaaagaataaaaatttattctatggtttctgtctctgatcatcaccttccattctataaaaagctcagttactgatttgctgggtcatggtcaaaattcttacctatttatttcatatcaactttaaaaaataaattacttgcattctatatattactaattgggaagtaatatgcctcaaatcagttttatactggattattccctatgctttaaaccactgctctcaataaaacacttcctgattaatgtttgattattagatattttagtcttgttggggatattttagtcttgttgggttagccatgctctgaagaatctgtgaaagtacagtaaagttttaataagcaataaatgtaaccttttatataaatctcagtgctaggttaacttctaataagcagacgaacatgttacataaattataatgtctgtcttgtaaaaaagttgaggggactaaaagtttatgactctgatatggaagttgtcatattaaaaaactacattttaaaacatcaaatatttatactatttgcttttcaaataaaagcatagtgctgtttggcata

SEQ ID NO: 6365 - DNA, 3339 bp, Homo Sapiens
  NM_152418
gttcttccgtgccaagtcgtgcttgtaaagaagcggtacttcctcttactcccgggacagaacttcccctcaggagggagaacatccgccgaacgaaatggagagcaaaagaccgcgactgctcgaggaagcagacaagcagaaaaagacagtcagagtgggactcaatgcaccttccatgctacgaaagaaccagctaggtttcctcagattcgccaactattgccgtatagctcgcgagctgcgtgtaagctgcatgcagaggaaaaaggtccagattcatagctgggatccctcctctttggcaagcgaccgatttaaccgcatactggcgaataccaacactgaccagctcttcacagtgaaccaagtcgaagctggaggctccaagtacggcatcatcaccatgcgaggcctgacgacccctgagctccgggtatacccgcacaaaaccctctacgtccctaatcggaaggtgaattctatgtgctgggcctcactgaatcacttggattcccaccttctgctgtgcttcgtgggacttgcagatactccaagctgtgccgtgctgctcccagcgtcgctgttcataggtagcttcccaggaatgcgtcggcctggcatgctttgcagtttccagatccctgatgcctggtcctgtgcctggtccctgagcatccacgcgtatcactctttcagtacaggcttgtctcagcaggtcctgttgaccaacgtggtgacgggacaccagcagtcatttgggactagcagtgatgtcttggcccagcagtttgcaatcatgactcctttgctgtttaatggctgtcgctctggggagatctttggcattgatctgcgctgtggaaatcaaggcagcgggtggaaggccatttgcctgtcccatgattcagcagtgacttctctgcaaatcctccaagatggccaattcctggtgtcatcagacatgactggaactatcaagctgtgggacttgagggccactaaatgtgtaacacagtacgaaggtcatgtgaataactccgcctacctacccgtgcatgtgaacgaagaagaaggagtcgtggcggccgtgggccaggactgctacacgagaatctggagcctccgtcatggccacctgctcacaaccataccctccccataccccgcctcggagaacgacattcccagtgtggccttctcttctcgcctcgggggcttccgaggagcaccagggctgctcatggctgtccgggaggacctttattgtttctcctacggttaattcttcaggatgcagcccggaggaacgtggatttgacttaaagaagtaaagagcatcgtattaccgtttctatgagcgcattttaagagatgttcggtgtttgtagatcccatccatccggctgctaggggtaaggtgctgttttatgtgaagatagttctgtaaagttgtttcagttaaactgggctgagagagcttgaaagtccttttcataaaagataactatttccttttcttgttgaataccttagaatagttatccccccctttttttttttttttaacaaaaaaacacttttctaaggactgaagattggcaaaaactaaaataaattaaaactgcttacaccagaagccttttagagaagcatgagactgtttgactagtcctacctgggttccggaaatacatgcatcatctgtacttgaagaggccagtgggagaggagaggagggggaggtcatttatctgagtctctccagaagtttttaaggctacattttggaatcattaaacttggccttctcaaactcaatagcagatctctgagattctccttttattattttccataggcaatgggaggaaaggtggatctttttaaataatagaagttttaaacagtccttaacgtgcttttgttgaggcatcttccagaatgtaaggtacagcagctccggtttctattattgtgacttgaatgtcaggattcaagggctcagtgtcaaagataattggctttgactttttgtaatctaggagcagcagtttgtgagatgtttattcaaagtgttagcctgtttttctaccaacaataagctagaaaagacaaaaaaaacaaaaaacaaaaaaacgtgtaataaagttagtggctacttcttaatagccaaagcctggaaatgatctcactttacaatatgctaaaattgataaataatttgtgctgtagtcatacaattggataaagcataatataaaataaggcacaattgctatatgaaactgtggattaatctcaacatgttgattgtaaatgtaggtagaaatgagtacaaactgattcagttctaaagttccaaagcactaaaaacttatctatggtgattacagtttgaatagtaggtatctctgtggaaggaagaaaggatattgtttgtttttttcccttttatttttaggatattgtttggaaagtaacacggggaaactttagaaatgctgttttctttttcttgatccttgatacatacatattttgtatgtctatacacttcacactttatataatacctcaaaaataaaaatatgaaaacagtacactgttgtaggttggtcaggaaagggaatgattgtggcttggacctgactatgagaagtagaaataatcagaaaaatcagaaatgattgcattggaagatcattcgaaggtagtattagtaagatttgctgatgagagtaatctagaaagtgaaagacagcataaagattgcagcttttttgttaactttaggactggtggatggttggtgtcatttactaaaatggggaggatttgaggtgaaaaaattttaggtgaagagaataatgctgagttttaggcaactattaaaatgtccattctgtagattagaggtgatgtcaggacataaatgaggttaatgtaatattacatattgatagaggaataggtcaatagagaagatacaaaagagtggttaggtgcatagatttttgaaatcagttaaattagtttttgatacttgatgtgtgacaggggaaactgtgtaagctgtacttgttatttctttgtaaaatgtcttagataataaaactaaatcataaagtagatattggtttaaaggatgtatacattgtcccttttacattgtaagcattcaataagaactagctgcggatgtaattttttttaaaaaagtccaaaagcagctatgggcagttgacaaaagaaaatgtaatgactacgtaacttgcgaatctgtttaccctcacttgcaaataaaataagtgcaaataaagcaaaaaaaaaaaaaaa

SEQ ID NO: 6366 - DNA, 4398 bp, Homo Sapiens
  NM_152422
agtgaaagttcctcactgagtgagtggggctgactcttcctgcctccggctcttgcctcccagtgccatgcaggtgcaggatgcaaccaggcggccctcagccgtgcgcttcctcagctcctttctccagggccgccggcactccacctcagacccagtactgcggctgcagcaggcccggcggggctctggcttgggctccggctctgccacgaagctgctgtcctcgtcctctctccaggtgatggtggctgtttcctcagtcagccatgcagagggaaacccaactttccccgaaagaaaaagaaatttagaacgtccaacaccaaagtacacaaaagtaggggagcgtttacggcatgtcattcctggacacatggcatgttccatggcgtgtggcggtagagcttgcaagtatgagaacccagcccgctggagtgagcaggagcaagccattaagggggtttactcatcctgggtcactgataatatactggccatggcccgcccatcctctgagctcctggagaagtaccacatcattgatcagttcctcagccatggcataaaaacaataatcaacctccagcgccctggtgagcatgctagctgtgggaaccctctggaacaagaaagtggcttcacataccttcctgaggctttcatggaggctggcatttacttctacaatttcggatggaaggattatggtgtagcgtctcttactactatcctagatatggtgaaggtgatgacatttgccttacaggaaggaaaagtagctatccattgtcatgcagggcttggtcgaacaggtgttttaatagcctgttacttagtttttgcaacgagaatgactgctgaccaagcaattatatttgtgcgggcaaagcgacccaattccatacaaaccagaggacagctcctctgtgtaagggaatttactcagtttctaactcctctccgcaatatattctcttgctgtgatcccaaagcacatgctgtcaccttacctcaatatctaattcgccagcgtcatctgcttcatggttatgaggcacgacttctgaaacacgtgccaaaaattatccacctagtttgcaaattgctgctggacttagcggagaacaggccagtgatgatgaaggatgtgtccgaaggacctggtctctctgctgaaatagaaaagacaatgtctgagatggtcaccatgcagctggataaagagttactgaggcatgacagtgatgtgtccaacccgcctaaccccactgcagtggcagcagattttgacaatcgaggcatgattttctccaatgagcaacagtttgaccctctttggaaaaggcggaatgttgagtgccttcaacccctgactcatctgaaaaggcggctcagctacagtgactcagatttaaagagggccgagaacctcctggagcaaggggagactccacagacagtgcctgcccagatcttggttggccacaagcccaggcagcagaagctcataagccattgttacatcccacagtctccagaaccagacttacacaaggaagccttggttcgcagcacactttctttctggagtcagtcaaagtttggaggcctggaaggactcaaagataatgggtcaccaattttccatggaaggatcattccaaaggaagcacagcagagtggagctttctctgcagatgtttcaggctcacacagccctggggagccagtttcacccagctttgcaaatgtccataaggatccaaaccctgctcaccagcaagtgtctcactgtcagtgtaaaactcatggtgttgggagccctggctctgtcaggcagaacagcaggacaccccgaagccctctggactgtggctccagtcccaaagcacagttcttggttgaacatgaaacccaggacagtaaagatctgtctgaagcagcttcacactctgcattacagtctgaattgagtgctgaggcaagaagaatactggcggccaaagccctagcaaatttaaatgaatctgtagaaaaggaggaactaaaaaggaaggtagaaatgtggcagaaagagcttaattcccgagatggagcttgggaaagaatatgtggcgagagggaccctttcatcctatgcagcttgatgtggtcttgggtggagcaactgaaggagcctgtaatcaccaaagaggatgtggacatgttggttgacaggcgagcagatgccgcagaagcactttttttattagagaagggacagcaccagactattctctgcgtgttgcactgcatagtgaacctgcagacaattcccgtggatgtggaggaagctttccttgcccatgccattaaggcattcactaaggttaattttgattctgaaaatggaccaacagtttacaacaccctgaagaaaatatttaagcacacgctggaagaaaaaagaaaaatgacaaaagatggccctaagcctggcctctagctttcactcgtggtgaatatttcagacctaaagatccagatagtatctctgttcatatgtgaataagttgaagattgtggggctactttttctcatagcactttattttgaatgttgttagtttgtgctgagaatggtcgtccgtatttgaaccaattatttattttaaaatatatttaagctacatttttgttttgaaaaattgccataaatttggtgccactttcttttatttatttgactgagttaatattattgtattaacattttaagtatatggtgtttacattcttatttcttttgacattttggaaataatcataacttgtctttccaaaataaccattttcttgatggaactcttcctagagtttttaccaaatagctaactttagtagtaaaacctcattgtgtatccattcccccacagatgaactaagaaagtcaccaagtgtcttaagctgttttatatttgttacgaagaaggctattgctacaatatttttaaaggtttcttttttaactttgaaattttttgtttttccttttctttttataaatgtaacagagggtttcaaagcatattatttttcagagagatttagttttactttaatggagtgactgtgaagtggttgggattttttgcttgtagaaagtagacttgctctttgtcagatttccaaacaaccttgccagccttggctgtcaaaaggaggcaggagcagttctcaacacaccaagccttattcccactcccttgggttgctgctgagccaaatagcatctttacagaggaagtgggatcagaggcaggaagtgtggaaagttgctaagaagcagggcttgcctctgtcctcccggggactccacagggatattcgtgcagggcaggggctctgtgccagccctgctctctcagatgccacagccactctgcagaggtgactcttggagctggaggaagtcaaaactgggccactgtttgtactgatggtgtattagcatgagcagcgtggccctggccccacactcccaaatctgccactccatagacccacttgcctcaaggctttatatttggctgctttcttacaatgagaattaagatttttaaactgaagttgaccatacaggttgcattagccctaactggcttcatgtaagaagggtgactgcctaaactagttccttgtaagctgaaccatcaattatcagttgaagccatacttttatttaaattaatatacgtagataccagaggccaagccacagagaggataatagttcttcccaataaaggtgatattaatcagactaatttcgaactaaagaagttactgcttaaagacggaatttcaggggaagcaagactcatttagaacaaatgaaatttctccagtcctacatttctgaattgacttctagcacatcaaaaatatttcagtcattatcagtctcattaactgaaatgccaaatgctaaatgcagtgttctttcacactgttttaattttcttgggaaattgagtccagtggatgttaatggagtgggttgcccatccctgaaatgtcttattttcaagtgcctggcctgggaaagaaggggaagaaacaattgcattatatccaaagatacactataaaaatagagtttttaccaaaaaaagatgtttgttctcatctcagtaggcctcatttgggcaagtgacccacaggtcttttggcgagtttgctatttgcctgttgaaatacttgtttcaacttagagaacagttatgatgtgaccatagcatggcacaactaaaaatctaagcctgaaacctgaaaaaagagatatgacaagggaaattaatcaggctatacataagtattgtatttatttgaataaaaataaaaagagcaacccat

SEQ ID NO: 6367 - DNA, 8443 bp, Homo Sapiens
  NM_152424
atgggggagctacccaaagcctggggaaggggagtcagtgctggaggtgactggagccgcggcgacggcggcagcagctgcggtggcggcgctctcagccgtggcagccgaggctgcagcccggcccagggcggctcagcggacaataaccgggctaggaacctgaccgggctggaccccactgtgatgcttcctgactgataatgttataacagtgcctggaagcctgaggctgcatttccagctggacgtacctcagttgtccccatcatcatggagacccaaaaggatgaagctgctcaggccaagggagctgcagcctctgggagtacccgtgaacaaacagcagaaaaaggagccaagaacaaggcagctgaggcgacagaaggaccaacctcagagccatcctcatccggcccaggtaggctgaagaaaactgccatgaaactctttggtggcaagaagggtatctgtactctgcctagtttctttggagggggacggagcaaaggttctgggaaaggcagctccaagaaaggtctcagcaagagcaagacccacgatggcctgagtgaagcagcccatggccctgaagatgttgtcagtgaaggaactggcttctccctgcctttgcctgagttaccctgccaatttcccagctctcagagtgcccatggggctttggagacaggctccagatgtaagacatctgtggctggagccacagagaaagctgtggctgagaagtttccctctatgcccaagccaaagaaaggcctaaaaggcttttttagcagtatccgccgtcaccggaagagcaaggtcactggggctgagcaaagtgagccaggggccaaggggcctgagagggtcagagccaggcctcatgagcacgtgagctcagcccctcaggtgccctgctttgaggagaccttccaagcccctagaaaggaaaatgctaacccccaagatgcccctgggccaaaagtttctccaacaccagaaccttctccaccagctactgagaaaatggcctgtaaagatccagaaaaacccatggaggcctgtgcctcagcacatgtgcaacccaagcctgcccctgaagccagtagcctagaggagccccatagcccagaaacaggggagaaggtagtagcaggagaggtaaacccacccaatggccctgtgggggacccactgagcctcttgtttggggatgtgacatccctgaaaagctttgattcattgacaggttgtggtgacataatagcagaacaggacatggacagtatgacagacagcatggcctctgggggccagagagcaaaccgagatgggaccaagcgaagttcctgcctggtgacctaccaaggaggtggggaggagatggccttgccagatgatgatgacgaggaggaagaagaggaagaagaggtggaattagaggaggaagaagaggaggttaaggaggaggaagaagatgatgacttagaatatctgtgggaaactgcccaaatgtatccacggcccaatatgaacctgggctaccatcccaccacatccccaggccaccacggctacatgctccttgacccagttaggtcttatcctggcctagcccctggggaacttttgactcctcagagtgaccagcaagaatccgcccccaatagtgatgaaggttattatgactccaccacacctggatttgaggatgattcaggtgaggccctggggcttgtccgcagggattgtctaccccgagacagctacagtggagatgccctatatgagttctatgagccagatgacagccttgagaactctccacctggagatgactgcctttatgacctccatggtcgaagctctgagatgtttgaccccttcttaaactttgagccctttttgtcctcccggccacctggggcaatggagacagaggaagaacggctagtgaccatccagaaacagttgttgtattgggagcttcggcgggagcagcttgaggcccaggaggcacgtgcccgagaagctcatgccagggaggcccacgccagggaggcctatactcgagaggcttatggcagggaagcctatgccagggaggcccacacttgggaagctcatggcagggaggccagaacccgagaagcccaggcccgagaggttcgttgtagagagactcaagtccgagagacccaggcccggcaggagaagcccgtcttagagtatcagatgaggcccttaggcccatcagtgatgggcctggcagcaggggtatcagggacctctcagatttcccaccggggaattacctcagctttccccaccactgcaagcagcgagccagactggagggacttccgtcctctggagaagcgttatgaaggaacctgctccaagaaagatcaaagtacctgcctgatgcagctcttccagagtgatgccatgtttgagccagacatgcaagaagcaaattttggaggatctcccaggagggcctaccctacttattcaccccctgaagatccagaggaagaggaggttgagaaggaagggaatgccactgtgagtttctcacaggccctggtagagttcaccagcaatgggaacctcttttccagcatgtcctgcagctctgactctgactcatctttcactcaaaacctccctgagctgcctcccatggtgacctttgacatcgctgatgtggaacgggatggggaaggcaagtgtgaagagaatcctgagttccacaatgatgaagatcttgcagcctccttggaagcctttgagctgggctactatcacaaacatgccttcaacaactaccatagtcgattctaccaaggcctgccctggggtgtgagcagcctccctcgatacttgggactgcctggcctgcaccctcgacctccacctgctgctatggccctcaacaggagaagccgctctctcgacactgcagagaccctggagatggagctctccaattcccacttggtccagggctacctcgagtctgatgagctgcaggcccagcaggaagattcagatgaggaggacgaagaggaggaagaaggagaatggagccgagacagtcccctttccctctatactgaacccccaggggcctatgattggcctgcttgggctccctgtcctcttccagtggggccaggtcctgcctggataagccccaaccagttggacaggccttccagccagtctccatataggcaggcaacctgttgcatacctcctatgaccatgtcaatatcactatcagtgccagagtcaagggcacctggggaatctgggcctcaactagctcgtccctcacacctacacctgcccatgggcccttgctataacctccagccacaggcctcccagagcatgagggccaggcctcgagatgtgctgctgcctgttgatgagcccagttgctcttccagttctggaggcttcagccccagccctctaccacaggccaagcctgtgggcatcacccatggcattcctcagctgcccagggtccggcctgagcacccccagcctcagcccactcactatgggccttccagccttgacctgtcaaaggagagggctgagcaaggtgcctctcttgccaccagctactcctccactgccatgaatggaaacctagccaagtagttattatcaattctggagtagggacacggggcctgagcatgtgaatggggatcaggggttgggcagaagggtgggggggtgggggttgttgtttaacttgaaaaccctttgggccaaggaaaactcctgtgagttttcaccttggttttcccacttgcctcttctgccatctatggccacgttcaactcaagtgcatctgcccagggaggctgctgctgctactgcactccagtttttgctttcgaggtttcttcttgtgacccacgctgggtttgggatgctgtaattttgtgcctattccagttgccaagttagtgattatatatatatatatatatatatatatatatatatatatatatacacacacacacacacacacacacacacacatacatacacacacacacacaaacacacatgcacacacatatatagcatgcatccttgacacaggctaaacctttagtgccccctgcccctttcccccaatgaatgatgaaccactgattagcagccaagtctgcattgcctcccgcttggggaagtggggcttatttgctattagcaatgtgaaattatggtacagatcctccccacccctattccttttggcctggcatagctgccatcattatatcagatgactataagctattcatcccagctagctgtccttagagaggatcaagtagcgtgtgtctcacagcctatcgctgtggactttggcatcatgaccagatgggggccttttaactgtcctgccatagcttgggttaaagacaaaaatgctaatccccttgatggagtgataaaattcatccatttgcaaacagaagacaaaacaaggttctgttgtggacactgccatagagtgttgagctccggaatgataggattttttttccttcttttaagcttgtgactacctgagttgcagatgcttttgaatttttgttcttttttcctctaaaggaaattttcataatctcatcacaaggaacacggtcttttaattgagataagggaagagaagcaacctaaattaggcttgactataggggctggggtttttgtggagtgtaggggaaagatagaaaatgagggtccatttatcacagccagcaagaaaggggatttcagaccatgcagagcttaaggtatctcagtttcttaaaagggaaaactcccttctcaagcctcccaacacaaaatgttccttaagccttgcccatcccatcatttggactctgtaataaggccccaggtttgcactcccaagacaggataccaaaggcatctcagctgctgttctgggccctttaaagagcttttatcttccaattagccgagtccttagcatcatcaaatgacagggcttcttggcagttgcagccctttatggaatgaatggcaccctcccttctcctgcatccatgcagttttcatgttaaactaggttggaaatactggtggggaagagcttgctgtcaggaagacattggaacaggctaatcttgccaagctcaacctctcattaatcacctgtaggagagggttccttttacatgtctttattggaaatggcatatggaacattttttgcttggctgtgttcactcaaattatgattattgcaccctcgccctcacatcccaccatctccatgcctgttgagagaagaagtcaacagggttcttgccattcctgagatatggcaatttagcttgggaacagatgctgtttgccccctaagtcaaggtgactttgtgggcaaactgtttcttggccaggggatgtgtccatgctggtctttgtcaccatttctcagattggggttggcccagtgcccttactcacaaatagcagacctggctggtagaagctgcacccctggaagcaccacatgaatttgcatggcactaacaccaccactcaagggacccagaccagctcttcaggctgactttggctacagatacattgtgaagaaatgtatctgttgtggagctggagaatgaaagagggtgaggaaggccctccttaccccaagcacagcattccaagagagaagtgcccaaattccaactttctggcctcttaccaaagctgctctgggatggtggggctgaaattggcctggctatttggcaggaagtaaacactcaccaaatgcctttacaacagggaagaacccacctcttgcctcttctttcagggcagcttgagctcctgtctacatgtggactgtgccagccacagcaggcggtagagccatcaccagcctccagaccctgctggagaagggccaccagcctatctgggaagagaaaaaggaggtggccaacctttggctaagggctgagagctgccctcaggatcaggaaggcagcatgaggcattgtctctgaggggcactggcatagccctgacacactttgttgggctttggaaggtcacacaccacagagtagggcctggggctgagtgagagttcatggtttggacagccttgctgcctgcaagtcccttcactgccctagccagcccaggaataggatccttaccacctgaagtggggcagccaggatatgtggctgcagaagcaggttcctttgaatttctagagctaagcagtttgtggctgaaacccaatggcagcctaggggaggaaggaagacctgtctggggacccatggtgttgacagcacagggtgacattgggagagccagccaagcttcaggcctgtttccaaacacagactagtgctggcttgggtggcagcaaatacaccccagaccactaaaactgttgatatcatgtccacacctccaagagtactactagatgaacaacatgtctccattgcaaggtcctggaataatgcttttggatgtgattttaagggaaaatgggacttagtggaagtagctgccttcatcttattacccaataggcctagtgccagacagctgtgatcctgagaattcccagatgagactggtccttggaggaccagtgaatgtggatagagaaggccacctagtaggcctctcccagggccaggatgccagtttcttggtgctttagagtctccaaggaagcactgccttggggcccagttcaagccagccctacctatctggcctcagcttgggtaccaggccacaagactgcccggataatgggttcagtaaacaccagtctctctccctccttagtcctatgccaagaagggaagtagcttcacacactcaggaggctgggtgtgtacccttcatcctgctgccagcagctttccttacctgtgccagtgccaccaccccacctgccctcagcccccaggcccagttgctagagggaggcatggggtttagcagggagacttcaagtttacccatgtgtatgttgcattcaagttgtttttaatatatatatatatatatatcaaaagtcaattatctatttttatattgtttgcattttatattcatggaaaacaatgtttatcaattgttcttttctgatttatttttaagcggtgctgtttacagttttaaacaaaacaaagatgacacaaaaattgctgctgcttgtgcagagggctggcatctcaactgcctagggccctccctctttcccctctccctaccttagctgtaccacactgtccgttccctccccccatgatagggacagcagaagatgcccaggtactgaagacaaacgccaagtgactcaggcgtgtgggacctggtagacagcttgtcattttctggctttattttatgtttttctttcttttgaacccttcttccccatgtctagaccctctgagagtactcatgtgtcttattttttttcctcgttatgttttgtgctttagttttgaaatcagagtgcccatgttgtgctatttgtcttgttgagtttctccaaaggagcattttgggaacattctccacccaatggggaaggaagggggtttcaaccatgtcccctttccccaagaagctgtgggagacagatgacaatgatgcttgcactatcaggaatttaccatctcgttgaggaaacccttgcataggacttcctaggagctcagttgattgtgacattttcccagaagagaggctttggggaactccttcacccctcttgctgctttgggggaatctcctcccctaccaccattccccctcccctgccctgctccagctcacacgtggatggtactttggggaacagtgactttcagggtgatggcttgctggcctgatccctgactttccaatcctatagtcactccaaagaagaaaatccacatggtatgtatatgtgtgagggttgggtctattgagaggtgggactttaattattgttattattattggtgcttatttttcctgctgtatatgggggtgggggtgggggggaataaaacaggaatgtatatttaggtcatgttaaataaaatggctggaggaaggagggaagaaattaggaactgcagtacatcatcaccccaggtgtaagagttatttctctcccagtgcagaaaggggagtgtggcccctggctgtacctgagcttcctcttctccatccctgagacatcacagaatcacccgggttctgacctctccacttctagctctcactgacatctggatatcttgatgcactgcctgtttgtaacaacatatacttctttgctgaatgctaataaacttctgggttcaagagggaacccctcagtca

SEQ ID NO: 6368 - DNA, 3214 bp, Homo Sapiens
  NM_152431
gtgctcgcgccaacccctacgccccagcgcgccttctccacccacgcacgggcctcggacgcatttccagccccggcgttggttgtggatgctggacatccaccgcctccaggcagtttcgccgtcacaccgtcgccatctgtagccaaagcaaaacatatcctaactgagactttgcagctcttgtggccactctgggctcaccgggaacatgagtggaagagcccgagtgaaggccagaggcatcgcccgcagccccagtgccacagaagtggggcgcatccaagcctcgccattgcctagatctgttgatcttagtaacaatgaagcatcctctagcaatggcttcttgggaacaagcaggatctcaaccaacgataaatatgggatatcttctggtgatgctggaagtaccttcatggaaagaggtgtgaaaaacaaacaggactttatggatttgagtatctgtaccagagaaaaattggcacatgtgagaaattgtaaaacaggttccagtggaatacctgtgaaactggttacaaacctctttaacttagattttccccaagactggcagctataccagtaccatgtgacatatattccagatttagcatctagaaggctgagaattgctttactttatagtcatagtgaactttccaacaaagcaaaagcattcgacggtgccatcctttttctgtcacaaaagctagaagaaaaggtcacagagttgtcaagtgaaactcaaagaggtgagactataaagatgactatcaccctgaagagggagctgccatcaagttctcccgtgtgcatccaggtcttcaatatcatcttcagaaagatcctcaaaaagttgtccatgtaccaaattggacggaacttctataatccttcagagccaatggaaattccccagcacaaattatccctttggcctgggtttgccatttctgtgtcatattttgaaaggaagctcctgtttagtgctgatgtgagttacaaagtcctccggaatgagacggttctggaattcatgactgctctctgtcaaagaactggcttgtcctgtttcacccagacgtgtgagaagcagctaatagggctcattgtccttacaagatacaataacagaacctactccattgatgacattgactggtcagtgaagcccacacacacctttcagaagcgggatggcaccgagatcacctatgtggattactacaagcagcagtatgatattactgtatcggacctgaatcagcccatgcttgttagtctgttaaagaagaagagaaatgacaacagtgaggctcagctcgcccacctgatacctgagctctgctttctaacagggctgactgaccaggcaacatctgatttccagctgatgaaggctgtggctgaaaagacacgtctcagtccttcaggccggcagcagcgcctggccaggcttgtggacaacatccagaggaataccaatgctcgctttgaactagagacctggggactgcattttggaagccagatatctctgactggccggattgtgccttcagaaaaaatattaatgcaagaccacatatgtcaacctgtgtctgctgctgactggtccaaggatattcgaacttgcaagattttaaatgcacagtctttgaatacctggttgattttatgtagcgacagaactgaatatgttgccgagagctttctgaactgcttgagaagagttgcaggttccatgggatttaatgtggactaccccaaaatcataaaagtacaagaaaatccagctgcatttgttagagctatacagcaatatgttgatcctgatgttcagctggtaatgtgcattctgccttctaatcagaagacctattatgattccattaaaaaatatttgagctcagactgcccagtcccaagccaatgtgtgcttgctcggaccttgaataaacagggcatgatgatgagtatcgccaccaagatcgctatgcagatgacttgcaagctcggaggcgagctgtgggctgtggaaatacctttaaagtccctgatggtggtcggtattgatgtctgtaaagatgcactcagcaaggacgtgatggttgttggatgcgtggccagtgttaaccccagaatcaccaggtggttttcccgctgtatccttcagagaacaatgactgatgttgcagattgcttgaaagttttcatgactggagcactcaacaaatggtacaagtacaatcatgatttgccagcacggataattgtgtaccgtgctggtgtaggggatggtcagctgaaaacacttattgaatatgaagtcccacagctgctgagcagtgtggcagaatccagctcaaataccagctcaagactgtcggtgattgtggtcaggaagaagtgcatgccacgattctttaccgaaatgaaccgcactgtacagaaccccccacttggcactgttgtggattcagaagcaacacgtaacgaatggtatgacttttatctgatcagccaggtggcctgccggggaactgttagtcctacctactataatgtcatctatgatgacaacggcttgaagcccgaccatatgcagagacttacattcaaattgtgccacctgtactacaactggccgggcatagtcagtgtcccagcaccatgtcagtatgctcacaagctgacctttctggtggcacaaagcattcataaagaacccagtctggaattagccaaccatctcttctacctgtgatggcatgaactactggcatcactagatggacaatccaagaagaaattggtatactttgtgcaaatctgccataagctcaaggctgtgactggggaaaaagattgagcttagttttcatgtctaggaaaaaaagcaaaacaacttaatctgaaacagttttaaaaaatgtgtgttattttgttttaaagagttgtatgcttggggtaaattttcattgtcatatgtggaatttaaatataccatcatctacaaagaattccacagagttaaatatcttaagttaaacacttaaaataagtgtttgcgtgatattttgatgacagataaacagagtctaattcccaccccaaattttgctgaggttttcttaatgttgtagagcattttgtagagtggtttaaatagttgaaaataaagttcagaacatcaaaaaaaaaaaaaaaa

SEQ ID NO: 6369 - DNA, 3285 bp, Homo Sapiens
  NM_152434
agaattttcttgcggcttcttagctttacgatggcaacaagtatggcggctgctagtggtagatttgaaagtgcgaagagtatcgaagagcggaaagaacagacccggaatgccagggccgaggtgttgcgccaggctaaagccaattttgaaaaagaagaaaggcgtaaagaacttaagcgacttcggggtgaggatacatggatgctacctgatgtgaatgagagaattgaacagttctcacaggaacactctgtgaagaaaaagaagaaaaaagacaagcattcaaaaaaagcaaagaaagaaaagaaaaaaaagagcaagaaacagaaatatgaaaaaaacaatgagtcatctgatagctcatcaagctctgaagatgagtgggttgaggctgttccatcccagactcctgacaaggaaaaagcctggaaagtgaaagatgaaaagtcaggaaaagatgacacccaaattatcaagagggatgagtggatgactgttgattttatgtctgttaaaactgtgtcatcatcatcactcaaagctgaaaaggaaactatgaggaaaatagagcaagagaaaaaccaagcgcttgaacagtccaaactgatggaaagagaattgaatccgtactggaaggatggtgggacaggtcttccacctgaagactgtagtgtgtcatcgattactaaagtttcagtggtagaagatggtggattaagctggctaaggaaatcttatctaagaatgaaggaacaagctgagaaacaaagtagaaactttgaggacattgtagccgaaagatatgggtcaatggaaatatttcagtcaaaattagaagatgctgaaaaagctgcatccacgaaagaagattatagacgggaacggtggaggaaacccacatattcagataaagcacaaaattgtcaagaaagtagagaatcagacttagtaaaatatggtaacagttcaagggatagatatgctacaacagatactgcaaaaaatagcaataatgaaaaatttattggtgatgaaaaagataagagacctgggtctttagaaacgtgtagaagagaatctaacccaaggcaaaatcaagagttttcttttggcaatttgagagctaaattcttgagaccctctgatgatgaagaactgtcatttcacagcaagggcagaaaatttgaaccacttagttcatcttcagcattggtagctcagggctctttgtgtagtggttttagaaaacccaccaagaacagtgaagaaagattaacatcatggagtcgctctgatgggagaggagacaagaaacattcaaatcaaaagccatcggaaaccagtactgatgaacaccaacatgttccagaagacccaagagaaaaatcacaagatgaagtcttgagagatgaccctccaaaaaaagaacatctacgggatacaaagtctacatttgctggcagtccagagcgtgagtccattcacatcctgagtgttgatgagaagaacaagttgggagccaagattatcaaagcagagatgatggggaatatggaattagctgaacaacttaaagttcaacttgaaaaggcaaataaattcaaagaaactataacacagataccaaaaaaatctggggtagagaatgaagaccagcaagaagtaatccttgtcagaacagatcagtctggaagagtatggcctgtgaacacacccggaaaatctctggaatcacaaggaggaagaagaaagagacagatggtttcaacccatgaggaaagagaaagggtcagatactttcatgatgatgataatctaagcctaaatgatttagtcaaaaatgaaaagatgggaacagcagaaaatcaaaacaagctctttatgagaatggcatctaagtttatgggaaaaacagatggagactattacaccctggatgacatgtttgtctccaaagcagctgagagagaacgtcttggtgaagaggaagagaaccaaaggaaaaaagctattgctgagcatcggagtcttgctgcacaaatggaaaaatgtctgtattgttttgacagctctcaatttcccaagcatcttattgttgcaataggtgttaaggtttatttatgtttacccaacgtacggtctcttactgaggggcactgcctgatagtccctttgcagcaccatagagcagctactttgttggatgaagacatctgggaggagatccagatgttcagaaaatcattggtaaagatgtttgaagataaaggattagactgcatttttttggaaactaatatgagcatgaagaaacagtatcacatggtttatgaatgtattcctcttcccaaggaagtgggtgacatggctcccatctattttaagaaagccataatggaatctgatgaagagtggtccatgaacaagaagttgatagatctctcttcaaaagatatcagaaagtctgtacccagagggttaccttacttctctgtggattttggccttcacggagggtttgcccatgtcattgaagatcagcacaaattccctcattactttggaaaggaaatcataggtgggatgctggatatagaaccaagactttggaggaaaggcatccgagaaagctttgaggatcagaggaaaaaagcactgcagtttgctcagtggtggaaaccatatgacttcaccaaaagtaaaaactattgaggtgtaccttccattttaaaatttttcttcagatcccgttcagttttatttccattgcatctaatgaagcaactgaccctcaggtcacaggcagagagagtcacagcagcagactgctctgggtcagtgacaactgtacatcaggagattgtgttgttttcttcttcacctgctcctatctatggacttcattttagtcaccatggagtaaaaacatatattcgatgatctgctcacattcctgctctctacctacttcttggtattccgaattgttcagttaatttagagaaggccttttctgaagggatatctaaaaagcataggaaatccttggttcagagggaagtgggtctgcttcatggttgttaagtctactgtctggcttcttttgcatttttaaaaataagacgatttaattttaatttcataggattttatagaaaagctcttaattttctactagcagtatatagtatcacttctattctttttgttaaaggaaaaggaaatgtccccaaagtattaaagaattaaatgatactgaaaatttgtatgattcaaaaaaaa

SEQ ID NO: 6370 - DNA, 5125 bp, Homo Sapiens
  NM_152437
ggaggcgggcggtgggggcgcgggccgggtggccgcgcatgcgtgcggcccccgctcccccggggcttccccggcctcgtgcgtgcgcacgcgcgctgtcccccggaggcgtctgggtgtgcggagcgcgcgcgcgcgcggctcggaggcgcacctgtgaggtgtccctgaggagagggaggtgggtgcgcggcgcccgcggcctggggcgctgactcccctcacttggagtgagttctcggcggccgggctgcagtctttctttctttcccggagggaggcgggggccgggggccagggagcgggctgggggtgggaaggaggtggagtggcttaaagaaaagaaaaacaacccatcccggaggatgggcctcgggatggcggggaaggtcagagcggctccgcgcagcctggcgggtcccgggctgagaagccgcccctcgggcctcgggcggtcggccgcgggcccgcagtgcgggggagcggggccggggggcgcagatggcggccggtgcgagcgagggctgggcagcgggcagggcgaggccgggcgaggcccctcgggagccggactcccgagccaggctccattgttgttggagccgagggaagggggagcgctgccgccctcgtcgcccgtggagccgcgtcttggagcccttccaggcgggtcccgggagaggcggtcatggccgcgccaggggaccggggagccgggcggctgcggaggagccggctgcatggggtgctgtgtgtttttcagggcgccctgcgtccggcagaggaggcgagcatcccgctcaggtgatgaggaacccctcgcgcacccagcgcagaaggctgctgccgccggacgcctccattgtttgaccacaacaagggccggattctcacccagcaggatcctaaggcctttgtagtccttcagccactgtgggccctgcctctgcctgttcttctggaatgtcttgggggttttgatcctgtcactgtgagtcttgctctgtcgcccaggctggagtgcagtggcacgatctcagctcattgcaacctctgtctcccaggttcaagcgattctcctgcctcagcctctggagtagctgggattacagatgggaccacctagttgcaggaaaacaagctcagggctcccactgattctacattatgacctgcaaatccaagagacacatctttggaagataagagagcttcttcaagaccaaaaaaggagacggcatgatacccatgtagggaattccccaaagcagggcttgccatacctggaccccgaggagcctgcttgctggaaaggctttcctgtctgatgtgcaggaggcagaatgccaaactgactcttcaaggggcaactgcaggggctcgagaccagccagcagtatctcatccttcgatacaggggatatactgtacagtcctttttctagaagtgagacatacaagattactctacaagaggaagattccaggggctcaaaaacgcaaaggtttgcactttgagagccccttggaatgttgacaactcaggatctaaaacaaagttctgtgttaatgagttacagaattcacgtggaagtcaatgtcactttataatcgataataatactgagtgaggaacactatgcaggaagaaaccttccgtagaaagacaggcagggaaaagcttaggctgaccttaaacttacctaatagagcaagcctgagatagactgccaaaatggccaaataagagactctatgaaataacagtcttgtaactgtagtaatcataaggaaattttctccttgaaatcacgataccaaataggaaaaatgatctacaagtgccccatgtgtagggaatttttctctgagagagcagatctttttatgcatcagaaaattcacacagctgagaagccccataaatgtgacaagtgtgataagggtttctttcatatatcagaacttcatattcattggagagaccatacaggagagaaggtctataaatgtgatgattgtggtaaggattttagcactacaacaaaacttaatagacataagaaaatccacacagtggagaagccctataaatgttacgagtgtggcaaagccttcaattggagctcccatcttcaaattcatatgagagttcatacaggtgagaaaccgtatgtctgtagtgagtgtggaaggggctttagtaatagttcaaacctttgcatgcatcagagagtccacaccggagagaagccctttaaatgtgaagagtgtgggaaggccttcaggcacacctccagcctctgcatgcatcaaagagtccacacaggagagaaaccctataaatgttatgagtgtgggaaggcgttcagtcagagttcgagcctctgcatccaccagagagtccacactggagagaaaccctatagatgttgtggatgtgggaaggccttcagtcagagttcgagcctgtgcatccaccagagagtccacacaggagagaaacctttcaaatgtgatgagtgcggaaaggccttcagtcagagtacgagcctctgcatccaccagagagtccacacaaaggagagaaaccatctcaaaatatcagttatataaaacgttttgctaagagtttaaaatcttaaaacccataagtgccactaggaaggaaaccctgtatatacctacattgactcaagaaatatttacgcaatccctagcagaacattgtttctgaggaggcatatgtgagattgatttgttggttcatgccaagtgtgttccacaggttgactttgaatgtggacctctgagcatccacgcaggatggctctcaggtcccagtcacagacgtcgcttcctgggattccagcacgatgcctccatagttgaaagactacacaaaaagccacaatcattgcccggcctcctgagtcaccttctatctatactttgcttaaaagctatcccagatactcccccttgaggagctcatgcccttccttcctctttattcgagcatactggcaatgcattggaaaacagacagctcccactaagatcacgttctggtatttctgaggttaacacttgatttagcccctacatatctttccatatatcctattatttctgaatatatgtcctcaaaatccccataaatatccatcccttcctagatggcattaactttcattttagattttaggtgactcataattcccattcacttagcctatcagaaaagtcattggcagacatatatgtccttgaaccttttttatttgtgtggattctgctcatcactgtctctgttagacttattttgtagtggctgcatcacatatttttcacttgaatttttttggaaatagctgaatgtaaatagcagggaggaagaagcaagcaaagtgagagcttttcttcatccagaattgccctctgggctcctttggtaacagatggagctccttcctagctagggagaccttatgagaagtggatggtaggaggagtcactaatgtttcaatctctatttctgtaatcttgggcaataatgcataggagttcttgataccccttcattgattactgtgtatcagttctttgttaggcatgaacgtctttattaatccatcattcttttcttcattcaacaaatatgtattgaacacctcctatatgccaggcactgtgctaggtgctgggaataccactgatgagacagacaaggtccctactcttgtggagtttacttctggtggaggagacagatgataagtaaacaaataaataatgtagtttgagatagtgattaagtgctatgaagaaaataaactagggtgatgattttagtggtggggtggggtgggggtggggtgacattagctagtggtcagggaggcctttccgcggtgggatgttgagctgaggccggaggagaagtagcagtcgctggcagagcacacaggctgctctgggggatgagctggtgcgtttaaggaacaggccagcactggcattcgcaagcagtggggaaggggagagatgccgaggtggtcagtatcctgactttcagaggcctttttttgtttgttttaatttttgctagattgatattaaaaactcatgtggaggaactcaaggaatgtttagaagaccaaaagtccccaatgacaggaacaaaagcaaccaatttttaactttctcttctcattcctgttttcattgatttcccacatgtagtccttttgctcaggaagtctttggggaaattaaggatctttgaagctctgaaataggtgatcaggttagtggtgtctgtcagctgtctaagaggttggaaaatgaactactcaagatagtcacgaaaatactgaaagtttgatttttctttccatatttgaattaattttttctgtttgactggaaggggtttttgtataactaaaacctcagcgcataaaggagatttaaaaggagcacatgatttagtgggtgggccatgaaactagagatgggatttgggggtgaatttgtcaatatctggattttaatccagacatctctgctaacaagcctttggtaagtcacttcagatacttttcctcctttttacaaagagagggctggcttagttatttgccaaagccccttccaggcctgaattccacaagtacgatttactgtagtgtcttatcactctttcatgtcacaatagcgtggagcattagagaaaagcctagacttttagttgatagccagttgaaatatcattgatagaattttagttttaggaaaaattggtttgatttctagctttattactattaggtatgtgagcttgggcaaatcgcttaatctttgagtctagttttctctcaaaatgagaacattaggctaaatgatttccgagtttccagctagtcctagagttctatatttctacatagttgaattattttatcatgctgttgctggggaatatgactaacccttttgaagctactaattttatgtcgagctttaaagtccataattgttatcttcagaaaatattatttgacctacagtatgtccaaatcaatttaataaaatcgctttataaaaaaaaaaaaaaaaaaa

SEQ ID NO: 6371 - DNA, 2620 bp, Homo Sapiens
  NM_152440
agaacccggaagtgcgaggccgaggagagccacgtgggtcgagctggggcgcagctcgcatgggggagtctatcccgctggccgccccggtcccggtggaacaggcggtgctggagacgttcttctctcacctgggtatcttctcttacgacaaggctaaggacaatgtggagaaggaacgagaggccaacaagagcgcggggggcagctggctgtcgctgctggcggccttggcgcacctggccgcggccgagaaggtctatcacagcctcacctacctggggcagaaactagggggccagtctttcttcagcaggaaggattccatccgcaccatctatacttcattgcataatgagctgaagaaggtggtgactggccgtggtgccctgggtgggactgctcctcacgtggaagaactcctttcccacctgtcagagcagctctgcttctttgttcaggctcggatggagatagcagacttctatgagaagatgtacaccctcagcacacagaagttcatcaatgctgaagagctcgttggccttttggatgccatcatgaaaaaatacagctccagatttcaccacccaatcctcagtcctttggaaagcagtttccagctggaagttgacgtcctgtgtcatctcctgaaagcccaggcccaggtctcagagtggaagttcctcccatctctggttaatttacacagtgcgcacaccaaactgcagacgtggggccagatctttgagaaacagcgggagaccaagaaacatctgtttggagggcagtctcagaaggccgtgcagcctccacaccttttcctttggctgatgaaactcaaaaacatgcttcttgccaagtttagcttttactttcatgaggctctgagccgacaaacgactgcttcagaaatgaaaacgttgacagcaaaagctaacccagacttttttggaaagatttccagcttcatcagaaaatatgatgctgccaatgtgtccttaatttttgacaacagaggttctgagagttttcagggtcatggttatcaccacccccattcctacagagaggcccccaagggtgtggaccagtatccagctgtagtgtctctgcccagcgacaggccagtcatgcactggcccaatgtcatcatgatcatgacggaccgcacatctgatctgaacagcttggagaaagtggtccacttctatgatgacaaagttcagagtacctacttcctaacccgcccggaacctcactttaccattgtcatcatttttgagtcaaagaaatctgagagagactcccactttatttccttcctcaatgaggtctcacttgcccttaagaaccccaaagtgtttgcaagtctgaaacctggatccaaaggttagcaggtgatttgcgtggaggggtttcaagactagaaactgttcttaattgccctaatgatctacggtggtctgtgaatagagtttacatccattcatgcctctttcagaactaaattaaagacaaatcctccctgtgttgcacactttataagcaattaaggccaattgaattaagtttccaaagagtaatctaggaagtggtcatgggctaccatgtgtctccatggtacagcaaagtagtttcagtattttcccctattttgctatatttcttgtagattgaatatttattgggcttttttttttcccatatgtttttctgttgttctaaacattgtgttctactgcaattccaaacagcctctctgtttccctccttcttggaagagtaatagggatgagatattaaatggcctttttagaattaagaactatatgttttctgtctcataaattagcaaatgaatatggagttagtagatttatgattctgatctacaaattaacatttttgatgccaaaattagggtcttggtaagaaatttctatcagttattgaaactgaaagtgagtcagattggtagcatgacgtaaggttttaacagttcagaagatcctcatggcagctttaatagccatgggttcttttggggtaatgtacacacctaactgcatttgttttgacttctttaatgtttgaatgtttcactctgttgtaaagtcagcataagccatcatgtgggctttcttcattcttcagcatattatccgcttcgctttctgtttatcacttttctgctgaaatgtacatgtttggctctactccttggttatttttaggcttaaaagcatgcagtcggtttttcagccacttttagatactcatgcaacatagcctacttttataaaatcaaaatgaaggtcttcatacgctgtacttgctaaaaatcaactgtgcgcttgaaagacctcttcatagttgagtaatcacctcagtacttaagcacttctgaacttgggtttcatgcctgccccccacaaattatgtttagaagcagcactgcatcttagcacatgctgccttatttctttccttcggcaggtgttcatgggaagtaggtggatcagtgaaggcataatgggctgtggagaccttcacttctagattattgattcaaaataaaaagaagccacaaagagtaaaaaaaaaaaaaaaaaaaaaa

SEQ ID NO: 6372 - DNA, 2929 bp, Homo Sapiens
  NM_152449
cgcggtggcagctgcgggtcgcgggtcgcgggtcgcgagtcgccggtcgccggtcgcggcggagcctgggcgctgagaagggacttggagggaagcgggcctggagctgctgccgccgcccctgagctcggacgcgaaggctggccccgtccccgggctgccgccgtggtcctgcagtgaagaaaatgaggcacgaggaattgttaaccaagaccttccaaggcccagctgttgtgtgtgggactccgaccagccacgtatacatgtttaagaatggcagtggggactcgggggactcttctgaagaagagtctcaccgtgtggttttgcggccccggggcaaggagcgccacaagagcggtgtccaccagcctccccaggcgggagcaggtgacgtggtgctgctgcagcgggagctggcccaggaggacagcctcaacaagctggcgctgcagtatggctgcaaacacattttattttagacctaatggggctggagataccaggcagaatttaattccggatttctatgcattcagagtgattaacaatggcaaagttgcagatatcaagaaagtcaacaacttcatcagagaacaagacttatatgctttgaaatctgttaagattccagtgagaaaccatgggatcctgatggagacccacaaagaactgaaaccccttctgagcccgtcttccgagaccacagtgaccgtggaactgccagaggcagacagagcaggcgcgggcaccggtgcccaggccggccaactgatgggcttctttaaggggattgaccaggatattgagcgtgcagtgcagtcagaaatctttctacatgaaagttactgcatggacacctcccatcagccactgctcccggcacctccgaagacgcctatggatggtgcagattgtggcattcagtggtggaatgctgttttcatcatgctgctgattggtattgtcttgcctgtcttttatttggtctactttaaaatacaagctagtggtgagacccctaatagcttgaacacaactgtcatccccaatggctcgatggcaatgggtacagttccagggcaagcccccagactagcagttgcagtgccagccgtcacttctgcagacagccagttcagtcagaccacccaagcggggagctaagctttgtttttaaagactcggcccagctttagcaattggctgttgatgtgcctcagctgtcactggcgatgtcctaggggtgctgcattttgcttccggggaaggatggacacttttcagaagtcactgcagtattcccaattgcactggccctgggcatggccttacccagtctaagctggcaggatctaaaacagcagcgacctcggcccctatccagagaggtgcagcaagagagccatttccctgtgacatttagtggactggccagttcatagcagcactgtgaggacccccaagttggacgtgctcggagggaaagatttatggcctctgtcgagggacctgcagcgtgagagccagtggcatctgcgcggcttgcctggctcttgctgtatcctcacttcctgtggagcggggattggctctgagaaggagtgttctctgtctgcctggcaaaggtgctgtggaataggcttggcatgccaccctgttttagagagtgacagttacagttgtaacaagcctacttcatattggccccctcagttagcctttttgaggcaatgccatttctagagttgaaaaagccctggacccaaactgcggcactgttgaataaagggcagtcctactcctgtccttttagagtggcttagtgtgacacacaggcatctcccaggccaagcacacacaggctgcgcccagttccgcaggagccgtcccacagcgtggctctctggattctcccacttgtcctccttggaaggagctcttgctggccagtgtttggaggggaggatgagtgcctgtcactgaggcctcactatggttggcgtctgaagctgggcggtcgtcaggcctgtgctgagagccgcagcccctgtgcacacctaacacagggcgctccccctgctgcttccctggctcagttcttcggagctccagagtgagaaggccgcttcgtcctttttctctgggtgatgcccttagaataacactatatgcaatgtaactcacaatgttccaggaccaaagacttgatggaggggctagaggcgacccttgttgtaaaaggcgatcagaacacctgagggaggaaggggcttgcagttttcccagcccttctcgctgccaaggcagcagtggtgctgtggatgggctggggactgcgggacagagcctgctactacttgggagttggtgctgccctgtggcatggaggggtgggaggggctgagatggctgctggcccggcctccaagagttctggacaggaggcagacactgcccagatgctcggtggagggacagtgatggcctttgactcatgaggcctggagaaaagtatcaaaggtctcaccatgtaagagtgatttccgatttctctcctttcagttgtgtgaaaaaacagctggcctgggttccattagcaaattaaatcatcttcaatcttaaattagagaccagaatgatcttcaggataaaaagaacttctgaatctctgcaataggaaatgtttcgatcatgcaagtgctttcccagccaaatgtctgtgctctctgtgtcactgagggccacaggttcctctaacatctgtcactgtcacttcaccaggcaggccttggagttccatgacaaaatcacttttgtcagacaaagaatgtatcctttacttttctcaaatggaataaaattatttcttctgtggaggaaaaaaaaaaaaaaaaaaaaaaaaaaaaaaaaaaaaaaaaaaaaaaaa

SEQ ID NO: 6373 - DNA, 1219 bp, Homo Sapiens
  NM_152466
gatgctttttaaacttttttttactaccctgtggtccctgaggagcattacactgagaagttttctcctattttgtctttcattctccacatcctcttttgttctagtgcatggcatgggaagccctctctaggaggatgctgtggccacacaagtgctggacgaaccgctggagtaggtgacttccaaggtgtcctgatgtagtagctattagacaagctcctgcatttggccagtaattagcatgctgctgcacattgccactaggtggtgctgctgctccattcccaagtaacccacatgcatccctggctggggtcagccttggggtttcccaagtgtagaggaatccatctctgtgcctgtggtaatggctggacaccaggagagaccctgtctcaaaacaaaacagaaataacaaaaaataaggtgacttgctggaggccacatggctgtgagccaaatacaggtctgggttatcagggctcacatacttctaagtacaccctactgccttggaatctgctgaagaccaagcccctgcccccaagccatggcaaagaaggagggaaggaagcaaaggtgcccagcggggacaactcggggaggggcgaggtgcccagggcccaggaaggccaagcagcatgtggcagggcagcatcaggtgactcccaagaaggaatgaggagaggatatgaggaaagagccacagcacagaggcctgctgttaggtcagcggagaccacggcccatgggacctggatctacccttgatgctaacaatgttctttggggaaaaaatctataatcacaaagtttctgcaactggactgtagtcatggttgcagaactgtatagatttactaggaaccatcaaattgttcacttacaatgggtaaattgtacagtacataggttatccctcagtaaagctgtatgaaatttatagtcatgaaactaatagtgacaaacgagctgggtaagtaggtctcagctgttctgtaggcactttgagaagaggaagagtagcatctcggttttaataaaagaaagcctggcccatggcgtccagcttctgcttgaatactttcagtgcccgggagctcagtatctcaaagcagcccactcctgtttaagagaactctaaaccttagaatgttgaaatacatcattattattctagtactgctgtgaaaaataaatgtctttgttttgccac

SEQ ID NO: 6374 - DNA, 5276 bp, Homo Sapiens
  NM_152470
acaaagggcccgcgcgcagccgccgccgccgccgccgcgcgaggagccaggatggtcctggtccacgtcggctatctcgtgcttccagtgtttggctctgtgcgaaacagaggtgccccctttcaaaggtctcagcatcctcacgctacctcctgccgccacttccacctgggccccccgcagccgcagcagctcgctcccgacttcccgctggcccaccccgtgcagtcgcagccaggcctcagcgcccacatggccccggcccaccagcacagcggcgccctgcaccagtcgctgaccccgctgcccaccctgcagttccaggacgtcacaggtccctccttcctacctcaggccctgcaccagcaatacctcctgcagcagcagctcctggaagcccagcaccgcaggctggtctcgcaccccaggcggagtcaggagcgtgtatctgtccacccccaccgcctccatcccagcttcgacttcggccaactgcagacacctcagcccaggtatttggctgagggcactgactgggatctcagtgtggatgctggcttgagtcctgctcagttccaggtgcggcccatccctcagcactatcagcattacctagccactcctcgaatgcaccactttcccagaaactcctcctccacacagatggtcgtccatgaaatccgaaactacccttaccctcagcttcacttccttgctctccagggactaaatcccagcagacacacctccgccgtacgggagagctatgaggagctgctgcagctcgaggacaggttgggtaatgtgactcggggagctgtacagaacaccattgagaggttcaccttcccccacaagtataagaagcgaagaccccaggatggcaagggcaagaaggatgagggggaggagtcagacacagatgagaaatgcacaatttgtctgtctatgctggaagatggagaagatgtgagacgcctaccctgtatgcatctctttcaccaactgtgcgtggaccagtggctcgccatgagcaagaaatgccccatctgccgagtggacattgagacacaactgggagccgacagctgagggaggaattagccagtggacaccccatttccttcaccaggtccccccacggccatagcccttgcagccaaactttgccttctgagccatttgacgtagaggaaaagcctgcaagcacattttgtggaaagaggagttggtggtatcggtgtcgagggagaggagggggttggggaggacccacctctccagaatggcgactgtccccatccgcctggctgagcaggagagagggagctggcggtgcccagcgcaagggcgggaaggaggggcccaggctgcggagaacccaggtgggatcctgaaggcactagctgacagacgggcccctcaatcctgtcctctgaaggattgtatatatacctctcgaccacgtaggaaccatgtaggggtctctagctatttctgtggatggcagccggagcatgttagcttaagaaaaatgttgtgtgtggtgctctagtcatcttgtggtggacatgtcgctattaccgaattcgcaccaaatatttctcattgagtttcttgttttggtgcctgaccgaaccaacgacagccccaatcttcccgtctttatgagagaaaaggaaaaaggaatcaaaggtggaagaaaaaaaaagccaaattctgtttacggtgaaaaaggattttgtttttcacccaatttgggaggcgggaggggggggttctcgttttatttttgtttttgtttttaccttggcttttgtttttctcatgtttacagtgcacggagtgtggaagggggtctaggagagggagagctggaaaaggagctgatggggtcttatcctggcctctgagggttcagcggaggtgaggaaggcagcagagctccagcaggtgaagggagagttcatctaggcggggctccccaggcccagggctcaacttcatggccccagctatatccccccagttccacactaaaccagggagggctcggccctcagctactggtacccaatgtgttcctgggagccgagagacccatggtcactccaactccttcctttaggctgtgctcttgcctgtcacaaagaggcaacgtagccactgcctccctatgcaaaaaattaaccagatgatgcagataagacagcataggtgatggctgcttggtcttggccacagtgctctcagccagcactaagggctgaggtcaataccgcagaccttggggaggaagctgagcatcccccgggatgtctccagtcctgacacagtccctcagagatggccctggctctgaggtcacatcagctaggtttgggaggcccctcagcttggtttgggagtgcccgtgttcctggtctctggctgcttctctgactctttgataaccttgggcaagtccctttctttctctgtgcctcagtttccttctcctttgaggggggagagagaacagtgcagccccatttccggtcctgctacctcacctagatgttgtgaggattcatattctctgtccagcgtgttctatgctctcttctgagaaccttgtggggtgtcgggatgggggtgctgggagacacagacctgatacagtatgtctttctgcaccacctcacaattttcctgaaccccaaagggagcagagagataagaggacagaagaatggagatgggaaaatccaccaaattccaacccaaacccaactttctttctccctatgtggaagacaccagattagctggaattctgccaccttcctttgtgccccaccccccactgttccctcatttgcactgctctgtaagcctccccctcacctccattcataacccagtctcaatgccctcgtatcaataagaccggggtaagggggacaggatacttgtcacatatttgaagaaattccatacagtgaaggaaatttgagtctgtattgctgctacaagggtaaaaccaggaccaatgggtaaaagtaacaggcgggcagattttggcttgaggaagagcttctagcacgactggttcatgcgggaatagctgctctggccacctgcaggcagaaagtgggggaagtggctcctggcaggagatttctcccagcactaatatcctggtgttctataaaatctttattgagtgcctaccggtgcaggcgctgggagagacaatagctttgaggagctcacaatctagctgaggagacaagacacatccaatgctgcaaaaatggtgaataacctgattcagggttagcagcaatgagtatcacagcgtccaactcagtagctccagtgtatgaaaatgtctccagggctaaaggctggagatctcaccagtggggaaagtacatctgagtcaggattttgggggaaagctagttactgatagccacaggaagttgagacttctgccccattctctccaatggctgggtgaaaaccaagaattcatcggaagatggctttggcctggaggtagctagggtggtctaggaagctcactcctctcttagtctcagtctttcattctttctgctgagactggcctgaaaggctggcaagtgggagggagtcagtggggaggccaggatagaactagagctggtgtcccaggttccagtctgggctcttcactgacaaagtgggcaacactagaaacttccctttgtctctctgggccttagtttcctcagttacaacctaaggaggttggattggatgcttgctaatttccttctgacactcacactccctaacatcaacacatcttcaaggcggcagagctgtgcgcccacccagctattgaaaaggactttctgtgggcacacactctgtttcagactgggctgggggcacacgtgctgggtgagacagtgggccctcgtcccctcccccctcccaattctctgccccaggctaatattagggactggggaggggaccaccagaggggagagggaagctgcttactttgggggtagaccctgaagcccctcctccttcccccacagatggggacaggaggtgatggggtgctcagaaccctgcagctcccacttctttagccgggcagctgtttgggggacaagagagggccagggtctgtgcttctgctcccggcactggtcagggagtctgggaagagtggagaagaggcagggtcaggcctcagcatctcacatccaccacctccaggaggggagaccactggtaagtcctcctcctgctcaactcaagggactcagaccctttcttgactgagacgcatgagtgccttctggggtgagagcagccccagggtttaagttgggcgtcctagcagctgcagcagctgtgccgccgcgggtccaccgaggacgccaatcaatcaacccaacaccacaagcttggttgggtgcaagcagagggtgagcaggggctgcccctccacctggccaggacccccttcggcacccagttgcccttggccaccacctgtggcaggactcaagctcctcttctgcaaatgttcccagcctccgtgcaagtattcttaactctttacgcctaatgaacaagcacagtttttcaatggtgaagaaaaaagcaccagactttttttctttttttcctaaagaaatcccctaagccccccgcctgtaggcgggacaaacactccctgcgtggggctgtagcaacgtctgtcaggcccccttgtgtttcatctcctgcgcgcgtagagcaaatgctagagcgatttcagctgatagaaaaacaaaaatgaaaaaaaaaacacaaaaaacaaaaaacatggcacgttgctagtttacagggttttgtgagtttaaatgccttatatttaacaatcataatttatgactaacttgtagatatcgtgggttcttatttaattatttttatagttgttttgcatttttaattataatttatttatttagaaaggatactaattttttttattactcctattacctcattttggcgttgtttctgggagtggaatgctttgcatgcattggtacgatgacaaacaactacgaatacaaaaaaaaaatttaaataaaattctgcaaactttatttcgtccgaactatcagggtgtgtgattgcaagctgtcctaccgtggtgctggcctctttggatacattccatacgaaatgcaaacctttgattctgtatgctgtgatctagtgaaaaactccaatat

SEQ ID NO: 6375 - DNA, 1796 bp, Homo Sapiens
  NM_152477
gttagctccgcaaggacccggacgcgaccaggggaggcagaaggactctgcacttgtccaagagaagaatccagagaaatcagagcaggtcaaatagttctaaaagccatggcccagggactggtgacattcagggacgtggccatagagttctctctggaagaatggaagtgcctggaacctgctcagagggacttgtacagggaggtgactctggagaactttggtcacttggcctcactaggactctccatttctaagcctgatgtcgtctccttattggagcaagggaaagagccctggatgattgcaaatgatgtgacaggaccatggtgcccagacttggagtccaggtgtgagaaatttctacaaaaagacatttttgaaatcggggcattcaactgggagataatggaaagccttaaatgcagtgacctggagggctccgattttagagctgactgggaatgcgaaggccagtttgagagacaagtcaatgaagagtgctattttaagcaagtgaacgtcacctatggacatatgcccgtgttccagcatcacacgtctcacactgtacgtcagagcagggagactggtgagaaactgatggaatgtcatgaatgtgggaaagcatttagccgtggctcacaccttattcaacatcagaaaattcacactggtgaaaaaccctttggatgtaaggaatgtgggaaggccttcagccgtgcctcacaccttgttcagcatcagagaattcacacgggtgagaaaccttatgactgtaaggactgtgggaaggcctttggtcgtacatcagaacttattctacatcagagacttcatactggtgtcaaaccttatgaatgtaaagaatgtgggaagacctttaggcagcattcacagctgattctgcatcaaagaactcacacaggcgagaaaccctacgtatgtaaagactgtggcaaggctttcattcgtggctcccaactcactgtgcatcggagaatccacacaggggccagaccctatgagtgtaaagaatgcgggaaagcctttagacagcactcacagctgactgtacaccagcgaatccacactggtgagaaaccctacgagtgtaaggaatgcggaaagggctttattcacagctcagaagttactcgacatcaaagaattcattctggggagaaaccctatgagtgtaaggaatgtgggaaggccttcagacagcacgcacagctcacacgacatcagagagtccatactggcgacagaccctatgaatgtaaggactgcgggaaggcatttagtcgtagctcatacctcattcaacatcaaagaattcatacaggtgacaaaccctacgaatgtaaggaatgtgggaaggcctttattcgtgtttcacaactgactcatcatcagcgaattcacacttgtgagaaaccctatgaatgcagggagtgtggaatggcctttattcgtagttcacaacttaccgaacatcagagaattcatcctggtatcaaaccttacgaatgtagagagtgtgggcaggcatttattcttggctcacaactcattgaacactacagaattcatactggttagaaagccttgagtgtaagggataaagataagcctttatgtggagttcacatctggctcagtactaggtaatttttaatgtagtgtaattaatgtcagaaaacacctgtcacttccatcatagaacatcagaaaactcacacccaaagaaaattaaataaatgtgggaattctttttgcctcaaaaaaaa

SEQ ID NO: 6376 - DNA, 2276 bp, Homo Sapiens
  NM_152482
gcggtgctccgaccggaatcggaagtggctgcgtcgtcgacgctgggctttcgggtcccgcgcccagagatgggctccaaggcaaagaagcgcgtgctgctgcccacccgcccagcgccccccacggtggagcagatcctggaggatgtgcggggtgcgccggcagaggatccagtgttcaccatcctggccccggaagaccccccagttcccttcaggatgatggaggatgcggaggccccgggagagcagctctaccagcaaagccgggcctacgtggctgccaaccagcggctgcagcaggcgggcaacgtgctgaggcagaggtgtgagctcctgcagcgagccggcgaggacctggagcgggaggtggcccagatgaagcaggcagcattaccggcagccgaggctgcctcctcaggctgacctctcggggcctgcaggcttgggcagcgcacaaggtggcctgcacccaggctttccctgggggtccgtcggccccagactggcattcacggggtcccagcccacgtgggtgttgacacaggcgcccctcctgatgctggggctgcggttcatccgtcgtctcattcatgccgagttggtgggacccacccagctggctccgtcctgcgtgacctgagggccccactggggttctggaagaggatagggacattattgctgtactgtgattctgtcgtcagctcacagtggccgtgctctgcagtggggcccctgggagcaggtgccacctccttcctctcccggggcaggcactcgcctgtccacttctgagtccaggtgttgggatcgaggtgttaactgtgattccatccagcgagtgcccacccaatgtcagagcagcccgagggccagcctgagcccctgaccccacttccttctgggccccgggctcctcccacaagccacgttgatcttcacaacgaccctgggccgctggggtcacccaagagaagcagccctgagacccagccaggctgggcctagctccacggcacgggtgtctcccagccactgcccttgctggaggaccgctgtgagtcactggccaggagcccagggtgtcctgagtctcatagccaccctgccagctgcagcaggtcctgggcctgcttccctgcgggttctggccctgggggagggggcgttagtgcggcggagggtcttgccaaaggcttttcatcctaaatagcaacttgagtggaaacctgggcaaggcggcccagaggctgggccctgcacataaagctttcgtgtgtgtctggccgtctgaatggtgcctctgtgagcggctccgtcccggggccccggaagctggggagggatgggtaccggcgaccccgggaaccctgctcagtcctgccgggcactgcatgcagggaccgtccgcctgacccagagacctggggctgcctcaccctctctccagacccacagccagctttgtttcttgaatgtggaagatgtttcttattccctgaagaaagggggcctgccacacacagcctgggaggcgcctcatccagaaactgggacttggctagcccggcctgggccctagggacttctcactggtcatgcttctgaagctgctcacctggccgagggaggtcccggcagtgtcccagggtggaaggtggggagggggccggctcctgccatcccttcccaccctgcacttctgtgctgcttgcagtcatagctttccttgtccccccagctgggccagggctgtgctccctgaagtggctttgacgtggggccgtcccagctcccgcagcccctgtccaccattgactctccccggtagtggctgctgtggctgccccatcccagctgttgcaccagccacagctcctagtggctcatgggtgcctcctgccccacactggggcctgccataataactggcccaggtaccaatgcccaggttggaccccctgtctggggtgctgtgcaccccctggagcctgccctcccttgggaccagggggagactcctggcctcagccagtgcctccccggcccatctgggtggggtgcccacaaaccctgtgcccccagtttctgctttctggctctgcttccagggatctaacctggggggtctcagcaattctgtggcagcacatagacagcgatgaacctacccgcccacagcccattttgaggaagaggtgatggcggcaggcaatgcaagagctcagtttattaaatgtgtgcgagtcggacaaaaaaaaaaaaaaaaaaaa

SEQ ID NO: 6377 - DNA, 6836 bp, Homo Sapiens
  NM_152487
gcggccgcggcccctttaaggagcagctctgcggtaacccgagcccgcagtccgggcgggcgcgacggccgccgcggtagctggagcctccgcgactgcacctccaagcggcccggaacccgcggcttccctggctcccgtgagcatctcaccgggcggcactggccagcgccagccctcgggccggcccggatgaccagactcctgtagacacccgccgccctctcccggctcggcgcagccgccgcccgcgcgcgactcgccccgggacccggcacaggttgaagaaatatggagatcaacacaaaactgctcatcagtgttacctgtatcagctttttcacctttcagcttcttttctactttgtaagttactggttttcagcaaaagtttctccaggtttcaatagtctcagcttcaaaaagaagattgaatggaactcaagggtagtatccacatgccattctttggtggttggtatttttggcctgtacattttcttattcgatgaggctactaaagctgatccactttggggtggtccatcacttgcaaacgtgaatattgctattgcctcaggctacctcatttctgatttgtccattataattttgtattggaaagtgattggtgacaaattttttataatgcatcattgtgcgtccctgtatgcatactaccttgtactgaaaaatggagtgctggcatacattgggaattttcgcctgcttgcagagctttccagcccgtttgtgaatcagcggtggttctttgaagctctgaagtatcccaagttttctaaagctatcgttatcaatggaatactcatgacagtagtattcttcatcgtgcggattgcctcaatgcttcctcattatggcttcatgtattccgtgtatggaacagaaccctacataaggcttggagttttaatccagttatcctgggtcattagttgtgttgttttggatgtgatgaatgtcatgtggatgatcaaaatttcaaaaggttgcatcaaagtcatctctcacatcagacaagagaaagccaaaaatagtcttcagaatggaaaacttgattaaaagagtgctaccgataagcaaacttcattactacccagcatatctgctgataggatgaattcttggcatgttcttgtgtacctttcttaattataattgttattcaggatttcagtgtcattttttttaaaccttagaaaagagaaggccgggcacggtggctcatgcctgtaatcccagcactttgggaggccaaggtgggtcgatcactgaggtcaggagttcgagactagcttggccaacatggtgaaacctcatctctactaaaaatacaaaaaaaagtagctgggcgtggtggttggcgcctgtaatcccagctactcgggaggctgaggcaggagaatcgcttgaacccgagagacggaggttgcagtgagctgatattgtgccactgcactccagcctgggcgacagagcaagactctgtctcaaaaaaaaaaaaaagagagaaactaaaattaaaatttagttttcatcccaagatgtcttttctgcctttcttttgccttatttacaagcatggataaaaatcttaaaggtttaaataaaaatgatcaatataatggtgaatcttttgagaaatctcttaactgcattggtattttttctctgtgaaagatgactatgataatctggtacaaatggttttatgtcaccaattttgctgcaagaatgggaactgcttttaaatctgtaaatagctcttaacatttgttgtatgcactcttttcttactatggctgtcaacacttgtgtagggtttaatttctaaattgttggcatgttctttttctcaggctattcagaagtaacaacatttttcatttcagacatgcaatcacctattaatgatgaaatattttaccactttgggaatatttaattagtttagtcatggagaatacttcccacattttaagattttttcaaatatcactgtcatttctattttagcattttatcaaattattgcttttttattttataataaggcttaagacagattatagacctccttaagagatgagtttcttcttctaaaaatgcatgttgatagaggactatttaggctaatcggaggaatcattaagaaagaaagttttaacactgtttatccctatctgctttccttgcactttttctgtgaaaaatattttctgtttgcaaaatcttccctgagttctgaacccagcaccatcagtaccaaagtcttatgcaatatgtatttattatgctcctgaaataggcctcttcttgatgagacccaaactattacaaaaatatcagtattcatattttactcacaattcatacccgtgcttacttagttggcattttagtgctttgaatttctatcttaaagcacagaaaaaaaaaggtaatttaatccaagtattctatcatcaaaattattgtctgattatatgaagataaatgactggcgactctggttgtgtgtgtatgtgttttgcttttactttaattcttgcaatccaaatatagaattatatatttatctattattgcctttattctttaagcacttgagtttaatgattattcttacctgagaaaggaagaaatttaattctaccagtgatgaatacttgaaattaattgaactcataccaaaagatgtaatccagtttctcagtttgaaggagaacgtttgactcactttcattgttcatgctagctgaatataatcaagacttttgatttgatttgcttttattattcaatgcagatagagcctgataagttttagaacatttaaagaagattgaaatctcagtcagtaactaaatgataaaatgagattgattggcttatactaggtacatttatttttgaaagaattaatgtaaaataatagttatttttaaagcagctaatattacactgataatttgttgctaaatttagtgctgtccacatcataggtgcttaaatatgtactggttaactagaggggggtaggaaagcaagcggttttatcttgttcttacctttttgcaggaaaagtggctttaaaaaaatttatataataaaactattttggaaattcattcttttagaaagagaccttgagataaatattttttgactctggatatttctatagttctgaacacagattttaaacccactatcaaaatgaaaacaatataaagctatattagtgagtctccatgtagcagtttgtttttatagttactgtttcatgcttaaaacttcattcttactttcattaatgttacccttcactggtatagccactcactaaataagtatatttaaaacatcaaaattttgaactaaagtttgtgattctcttattcagcaatccttatcttatgctggctgcatgagttaattcaacatccagattaaatatcctgaagtaggttctatatatttcctcatacaacagacatggaatggaaatgccactagaaactgccctgctacttttaagtctgacctttgcaggaggtacactttgctgttctatgattgtattcacctacctaaaatacaaatgaagacagaacatatcatttactgcacgatgaatttttcatttattaaatgaaaaacgtttgctagacattttaaatattaagtattttgactacacggattaatttaaatgattctatcaggcattctgatatttaacaactctattaaaatatttatagaaaaataaaagcaaattgatataaatttttgagcaattctatttttgtagaaaaaagataacctgtaattataaagatgttttttgaatgtgtagtatcctagaaaataaaagttcttgtgaaacttaaaaaatgaatgaaaaccaactaatagcatgcaagatcatagatcctgcattaaatttttatttgtgaaaatttgaaaattatgagctataacttataaagtttgccttcttatgtctaaaatcttttaaaggattatttgcatttatgtaaaactggaaatgaagttatatatgagtgcaaagaaattgacttctgctcaaatatgtgttgataccctacagtaaattgaattaaatttttatcccaactgtttgattttattatttcatggactagccttacgttaagtgaaatactatttatgttgttaccacccctaagagtgactctgatatattatggatgacccaggacggtcttaaaggtctagttttaaaaactgcctagtttgtaagtatttgaatccagttcttttctaaattttaataatttgactcaaaatttttgctacagggtcaacttttaaattgtatatttcctctgaggcacactgggcatttggagaatggttcttcactggtgtagagagccaggtttactgttggttgcaccatctgttatcaggcatgcagaaacatttttcttctggagaaacagaggggaaggtgttgttacagtgtacatgtttcctctgtgtcgtttttaagggaaataaacatgttccaaaagatgctgttaaaataaatatttgaacacgttttctgtttctaggttgctcttaattccaaacatttaaataaatgtgcatttgaatagctttaggtggtttagtctattagctgaaatggaaaagttcatgtattgacatcatcaataatacttcataaaggtttatgtatttttatgtgtttggattccataagaagttgaacttagataattttatcaagagtagcacagtgtttctcaggtgcgagccagcatacagcgagacccttcatgtgtctctggatgcacatatatcttcccaaccttaaacacagctcattgaaatacattaaagctactgaaagtgagttctgatgcaaaacacatgtgaggtgtgtaggaacaatgaaaagctagaggatctggagttagaggaggcattgagagtgcttttcccttaaacgccgtgatagtcctcccttgatctagaagtattctctttgaatccttccatctcttcctcctggtacaccagatgacttcatcagcatctccctcttttatgctaacacctttcgctgtcaacttttgagacctccccatgtatctataagcttcccagtctcttatggcaaatttaaaagtttacaaataggttctctcattgaaaaaaagcattgtagtaaagtttaaagtggagctcagacaaatcatgacttattaagagactacaggaagccattcagcatttaataataactgtttacaacatgaggcaaagctaataatgttatggttttattaagagatctgtcatctctgtttttcttaaactggtttaacagtcagagctttgtaatgtgtttcagctgaagatttattataggcttgtaaattatctaaatgttctttttagaccccatgacaggagcacagaggaactgagataactctgtgttatgagagggtggatgctggcttgtgccaaaattattttagagtcctgctctttagggaaaactttgctatggtaatgtttctttgaaaacaaatttaccagcaactgcgttacttggtgttttccaaagtacaacatccaaggcttgaaccttacccgtttctaggccagactaggccagcctctagttttgataataattcatacctttattggaatatattttggatagcagtgaagaattgaaagcagctcctaaagattggtttgtttgctttgaaaatgtttacacttattcactctaagcagtggaccattttgatatcaggccctatacataagaccaaaaccagaaatatttctaaatctcaaagatttataagtacagtacctctggctgaaaactcgttaaacatctttggatattttttctttatatctttatgtaattatttctgtaattaagtgtacattagggttatttgctacttaacaagcctaaaggtatagctgtatatagaatgtgctctgtgtttttctgtttcctgcttggtttgtttctggtatgactatgtctactttttatttaaggaattttgtgtagataatactctcactaacttgtaaataggataagttatgagattttttggtattagaatttgtaataataatgacttttagattttatttgaaaaagctacttggaaagcagtaaatagaactatagtgatatatatagatacatagatatatacttttttctgagaatgtataatatataattgtcaaagatttttggaagtctttcaaaatatacttaataccattttgagaacataccttctaatttatttccataaggctgaagaacttttatttacaaaatgtaagactagataatgtatgaatcagtgttactaggacttatcagtacttaaaatagcaacttggcattctttattttgtttcctggttgttttatttggagggataataaatgtctaagttatttccattaaaattttgaaatgtttgtatactttatgtgtgccattttaaagtatatgcaagttctaagcaataatctgcatgttatacaaggttgacatattttgtcctgaaatttttagttaacatttcaagaatgataaaatgaacaccctgtaaattacccttctccccctcccctccatgaaaaccttgggattttcttgtgctagaacactaccacaatgtggtgcaaagctttgtattttgtggaaaaaaacaataaaatcacaattatttagtgcaaaaaaaaaaaaaaaaaa

SEQ ID NO: 6378 - DNA, 3158 bp, Homo Sapiens
  NM_152493
gccggagccccagcccggccctgctcgggccgccgggcgcggggctgcggccgcgtcccggaggcgccgccagcacagccaggtgctgttgggaacacagaggaagtgactggctgggggttcagggaaagctccgtagaagagggaacacttgagctgggtcttgaaggatgagtagaagttcaccaagtgggaaaggacactctaggatggccgagcctcgatttaacaacccctacttctggccccctcctcccaccatgcccagccagctggacaacctggttctgattaacaagatcaaggagcagctgatggccgagaagatcaggccgcctcacctgccgcccacgtcggcctcgtcgcagcagccgttgctagtgccgccggcacccgccgagagcagccaggccgtcatgtcgctgcccaagctgcagcaggtgccggggctgcatccacaggcggtgccgcagcccgacgtggcgctgcacgcacggccggccaccagcaccgtcacaggtctggggctgtccacccggaccccgtctgtgagcacttctgagtcaagcgcgggcgcgggcacgggcacgggtaccagcaccccgtccacacccaccaccaccagccagagccgcctcatcgcctcgtcccccaccctcatctcagggatcaccagcccccctctcctggactccatcaagacaatccagggccacggcctgcttggcccccccaagtccgaacgcggccgcaaaaagatcaaggcggagaacccggggggtccgcctgtccttgtagtcccctatcccatcctggcctcgggcgagactgccaaggagggcaagacgtacaggtgtaaggtatgcccactgacctttttcaccaagtcagagatgcagatccactccaagtcgcacacagaggccaagccccacaagtgcccgcactgctccaagtcctttgccaacgcctcctacctggcccagcacctgcgcatccacctgggcgtcaagccctaccactgctcctactgtgataagtccttccggcagctctcccacctccagcagcacaccagaatccacacaggcgacagaccctacaagtgcccacatcctggctgcgagaaggctttcactcagctctccaacctccagtctcaccagcgccagcacaacaaggacaagccctacaagtgtcccaactgctaccgggcctattcggactccgcttctttgcagatccacctctcggcccacgccatcaagcacgccaaggcctactgctgcagcatgtgtgggcgggcctacacctcggagacctacctgatgaagcacatgtccaaacacacggtggtggagcacctggtgagccatcactcgccccagaggacggagtcccccggcatcccggtgcgaatctctctcatctgagcccactggaggcgccgccccacccggcccactggcagacacagacccaggcagcaccaggccccagctccctccgggggccctccaggaaccaccaagctctctcacgaccttcccaatcttccagaaagcttggtccgcagaagccctgcctggtccagtccgggggcggccaggccaactgcaagattctggactgttttggtggcatccaaagacgatctcagagcactttgaacctctctgttgagttttctttttgttccccacccttcacttgcttcactgtttttttttttttcgttttttttttttaagtttgttttggaaataacagaaaagatatttattggccaggaagttggtgctgctaagaccgagaaatttaaagaatcggacagatggacgcagagaaccagagggcaatgtgggaccttctcttgccatggcctcaggtcttgagggaaggctcgggcctaggtttctggactgcaaaggggacccccaggtgggaggggcaggaagcagccggagtgagcccttcgcccctgagtgcctggctcgcacctctcgagctgtgccctgggcatcactgagcagaggggtgcggcagcttcaggaggcagaaacgagaggggtgggagatccacaggaccaaagggtgcagtgatgggctgggtggcgggcccagggaaatggggtggggatgggctgggtaagacctggccctcccctgctgccctgaagaccaccccagtctacctcggtgctggccaggaaacctttcggctacctctcccaccatcccagactgtgggcagggggatggggagggagtgggcctggatctgggacctccctccagaatttcctccagatgggggcagtgcccagggaggggttatttgtcttccctgccatggagtgggaatccccagccgaggccctaggcccctcagcagggaagggatccccggggaggcaggtcccaggagcagaccctgcccccagcccccacagacacaccccaatctgaaagccatgcgtgtcggtgtatataggaaccatgtacagagcccagagaagccccctacatccccccgggaaaaaaaagaaaactagacagaaactcatctatatattctgtatctggagttccgttttgaatattaactgtgttatttttatacactttttaagccttaactcgccattgatttaccagtttaacgtttcctggggtttctttgcccatggggttctctgcccccacccccggccctttgtttgacttgcgtcgtctgatactcagtattgtagctttttgtccgcatgttactccctgtaaatacgctgttatacatactgttaacacccctttgctttttctatgggacctccaggccaccatatttagaactagttaccttattaaaaaagaaaaaacagtctgttggcttctcagtctgcatcttggaggcagggaggtgagggcaggtgcccctcagacacttcaggaaggtagtttgcattctatttaaaaaagggagtggggagcaaatgaaaatcaaatgtggggggaaaacactaaagggggcaagaaacaaaggaattacaaaccctctgctctttgtatttctctgttgtgaagaataaactgtacctgcacccggaaaaaaaaaaaaaaaaaaaaaaaaaaaaaaaaaaaaaaaaaaaaaaaaaaaa

SEQ ID NO: 6379 - DNA, 1505 bp, Homo Sapiens
  NM_152499
gctagggccctggttcccactgcctagtttctgggcccccggcatccgagtcggccaaaagccgggcagaagagagcgccaaggactggcagttccggaacgggcaatcccagccgaggggaccagcggcagagcacgggtccgagccggggacggcggcgtcggtgggtcatgctccggcactccccctcgctgtgggagctggtggaggagcacgttccgctccgggagcgacgcgaagtgaagaggattctgggggaggcggcggtggacctgagcctggagctgcgggcggaggtggcgatgttacgggcactgctccaagaggctcgatcctctcaagcccccagctcccgccccatctctgacccctcttctcttctggcaccaccgcctctcctaaaggacctcttgcgccaggagctccggcagttgctccagggtctccgccacaaagccatctgtgagggcagggaccaggcccaagcttgggtccagtatagccccagggtcctgcactttgccttggaggagcccaggtgtgatttgccagaacaggagatattccagatgagaggtggtgggcccagcagcggtcacagagatctcagcatcatcaaggaccaactgaacgtgtccaacattgaccaggtggccagacacctgaggggccttctggaggaggagtgtcacaccttggagagggagatcctcatcctgcagcgctgcctggaagaggagtatttgaggccttgccacccctctgaggcagccctggagcccaccctggcagagctaaaggaacagaagaaggccatggagcaggagctgcaggcatctgtggggccttcttgtgtctctcccaaccacaggcagcggcccttggggtcctccacacagggcctcagacccccgcttcccctctgcggggttgcacctctccagtgctgcctgcctgcacctcctctggagccctaccttcgacctcgaggccagtcggctacccaccgctggggacggcagcttcagtgcagccccagggaagggccagcttccacacccatgtccagtgcagcaccccaagccccagcctgaagggctggtcaccgagtaggctctggcttctgccacagcgcacctgtctgccgctgccgcctcagctgctttggcccagccagcttcagatctggtcttggcgagctctcgccaggaccccaaggctgttggtctgtctggcccttgccccacccccttgccagatccctggtgtctggagctgagtggccgggcatcggtcccaagcatcaaagcctttggcctttctcctcccaggcctccacaaaggcctggcagacagaggtctcattccagcctgactcttgtcccctgggggacccagacaaagcacagcagccgctcagagacaggaatagaaatttcattaaaatctatggactttaaaaaaaaaaaaaaaaaaaaaaaaaaaaaaaaaaaaaaaaaaaaaa

SEQ ID NO: 6380 - DNA, 1914 bp, Homo Sapiens
  NM_152500
ggctttatgtctctttcatcctcctctgcctttcccctgcccttgatcccttctgcaggtcttggctggtttcaggaaacgggtcccatcccatggactcccactctggggagcctgcgctcctgccctgtgggacctgtgacatggttttccgctcctcagctctgttagccacccatactcagcgcttctgcattggccacccgacccaagagatgacatttggagcacaggcatcagttgccactgaaccccagcgggccgcgaactgagccgacgcctccaagttgtggcctgtacgcggggcgggatgtcccgcctcttcggcctggagcaggagattcgagaactacaagctgaggccgggaggacgcggggagctctagaggtgttgggggcccgcattcaggagctgcaggcggagccagggaacccgctgagctcccggcgagaggcagaactttattctccagtgcaaaaggccaacccgggaactctggctgccgaaatccgggcgctgcgggaggcctacattcgagacgggggccgggaccccggcgtgctgggccagatatggcagttgcaggtggaggcgtctgcactggagctgcagcggtcgcagacccgcagaggaagggcaggtgccacctcaggggagcttccagtagtggaggctgaaaaccggcgcttggaggcagaaatcttggccttgcaaatgcagaggggtcgggcacccttggggccccaggatctgcgactcctgggggatgccagcctacaaccgaaggggaggagagatcccccactcctcccgccaccggtggcaccaccgctgccaccacttccaggcttctcggagccacagcttcctggaacaatgaccagaaacctgggcctggactcacacttcctcctgcccacatcggacatgctgggccctgcaccctatgatcctggggctggcctggtcattttctatgatttcctgcggggccttgaggcttcctggatttgggtgcaactaaggactggcttggcacgcgatggacgggatacaggaaggaccacagcgttgcccccagccctttgcctgcccccacctcctgctcccgggcccatgggcaactgtgccatccttgccagcaggcagcctgtgcccagactaccaccctcatcatcagtatctttggtctgtgagctgcaggtctggcaggggctagcatgggctagggcaccacagccaaaggcttgggtctcacttggactatttgaccaagatcagcgggtgctaagtggccgctggcgcctcccacttcgggcccttcctctggaccccagccttagccttgggcagctgaatgggattcctcaggcaggtcaggctgagctctttctgcggctggtgaatgcaagagatgcagctgtacagacactggcagagatcaatccagcaagtgtccatgagtaccagtacccacctccggtgtccagcacatcttcactggaagccagcttcctcacccccgcagttggctttgctgatcccccacctcgtacagaagagcccctcagtggagtcaaggatagagatgagggtttgggccctcaccacagttctgacttgcccccagtgagtttctgaacccaagtgaatgtggagatgagcatctgaacatgcacaggactggggcctatttccagacctacaggtttactactccatgttctgacattgggtctagaagcatctagcagttgagtacagaaaaccagttccaaccacagctttaccacctcccgttaagtccttaacttttctgtacctcttctgtttttgtaaaacagattaaggattaaatgagtttgtcaggtaaaaaaaaaaaaaaaaaaaaaaaaaaaaaaaaaaaaaaaaaa

SEQ ID NO: 6381 - DNA, 2083 bp, Homo Sapiens
  NM_152501
agagtatgaggaagccagcactagtcaagtgactctaagaagggccattttcccttgttgtctttgaaaatacttcattttcttagcatttcaggagattataacatcctgtatttcagtttctgagagctttactgactgatttccctattcaaaacaatcctcatttcctacatttctgaagatctcaagatctggactactgttgaagaaattcccagtaaggctcacttatatctttagagatggcaaataactacaagaaaattgttctactgaaaggattagaggtcatcaatgattatcattttagaattgttaagtccttactgagtaacgatttaaaacttaatccaaaaatgaaagaagagtatgacaaaattcagattgctgacttgatggaggaaaagttcccaggtgatgccggtttgggcaaactaatagaattcttcaaagaaataccaacactgggagaccttgctgaaactcttaaaagagaaaagttaaaagttgcaaataaaattgaatccattccagtcaaaggaataatcccatctaaaaagacgaaacagaaagaagtgtatcctgctacacctgcatgcaccccaagcaaccgtctcacagctaaaggagcagaggagactcttggacctcagaaaagaaaaaaaccatctgaagaagagactggaaccaaaaggagtaagatgtccaaagagcagactcggccttcctgctctgcaggagccagcacgtccacagccatgggccgttccccacctccccagacctcatcatcagctccacccaacacttcctcaactgagagcctaaaaccattggccaaccgtcacgcaactgccagtaaaaatattttccgagaagacccaataatcgcgatggtactaaatgcaacaaaagtatttaaatatgaatcctcagaaaatgagcaaagaagaatgtttcatgctacagtggctacgcagacacagttctttcatgtgaaggttttaaacatcaacttgaagaggaaattcattaaaaagagaatcatcattatatcaaattattccaaacgtaatagtctcctagaggtgaatgaagcctcttctgtatctgaagctggtcctgaccaaacgtttgaggttccaaaggacatcatcagaagagcaaagaaaattccgaagatcaatattcttcacaaacaaacttcaggatatattgtatatggattatttatgctacatacgaaaattgtaaataggaagacgacaatctatgaaattcaggataaaacaggaagtatggctgtagtaggaaaaggagaatgccacaatatcccctgtgaaaaaggagataagcttcgactcttctgctttcgactgagaaagagggaaaatatgtcaaaactgatgtcagaaatgcatagtttcatccagatacagaaaaatacaaaccagagaagccatgactccaggagcatggcactaccccaggaacagagtcagcatccaaaaccttcagaggccagcacaaccctacctgaaagccatctcaagactcctcagatgccaccaacaaccccatccagcagttccttcaccaagaaggatgaaacccacccaggagcacagtcatcgcctgcaaactttagaatcacctcaccaactgtggcccctcctctttcttctgacacttccaccaaccgccatccagcagttccttaaataaggtcaccaaggacaaggatatcaaataactactgttcaatctttactcaagtgtggaaattttgcctgaagtcctccacctaaaaacctgatgccattggtaatgatgtttatgaagataagatcaaagcacagaaaataatatatgtatatatatctggttgaaatactatatatatatatatatatatatatatatatatatatatatatatataccagctattaattctaggaaatggagtattaagggtgcattttatttcattagttttacttttatgcattttcttcatatcatattttgcattcagaattttcataatttgaaaaaaaataaacttttttttcttaaa

SEQ ID NO: 6382 - DNA, 4006 bp, Homo Sapiens
  NM_152513
gcctcagctgagggcaagcgaggagatggctgtgaggcaggcggcgacggcgggcactcccgggcccaggagagaggaagaggcggcgcttctattcgagagggcccattaccggcacgacccgcgctggctgctgcccgtgaccccccgcctgtgcctggcctgcgcgctggagctgctgccggaccccggcgtgtcgttagtgcgcaagaagcacatgttgtcctgcttccaagatgcccttgtgaggcatacctccctggtcacgcaactggtgtctcaggatcagagagtctgcatccacttcataagtgtgctttttggactattatgcagcatggaagatgggagtgtgacagacctctgtattgaagtccttattcagatcacaacgcagctgaagctggagcagactatccgttgcctgctggatgagtgccacaaagagctgtgtaacatgccctccatgcgaggcagcctggccaccctgacccttcttggcaagttggtggatgccatccctgctctggcagacgagcttgtaatggagcatggcaacctgatggagcatctgttgagaggcttagtataccccagtgagggcatacaagcttctgtctgttacctttatgggaagctatactcctcaccagtggcagctgagatgctttcaggacacttccgtgagaagctttttcccctcttcctttccatcctggatggtgcccagacaaaggagctgcagattaactgcttgggtttgctgaggcagctgttgaagtatgatctctttgtgtccatgatcatgaaccaggatggactgggagaaagtgctaagaatatcgaagggtcatcaggaaatacctcactgcctttggtgctcaaaaagcttctcctctctagagatgaaaccctgcaggtggccagtgctcactgtataactgcggtgcttgtccactccccagcaaagcatgcgtcagccttcatccacgctgacatcccagagttcctctttgagcatctttcttcttccagtgaagtgctcgtctggtccagctgtaactgcttgacactcctggtagaagagccactctttttttccaagtgccacacggtgtatgggatcgaggcagtggtgaggagcctgcagggaagcctgaagatgaacaacatagagctgcacaagcagggcctgctgcttttcgctgaaatcctgacccggcagccagaggagatcaagctgttcacaagctcagccatgtgcagagatgctggccgtgccctccaagaagcagttagcagccctgtgctggaggtggctgctgaggccttgaaggccacttctgcttttctgaggaaggaccatcagagcactccacctgtgcagtatggggaactgcaggctttgctagaagccatgctaaaccgatgtgcggagttttcccagaccttgctgagcaggaggcccctgggccatgcctccagtagagattcagagaaggccattcttcaaaggggaaagttcctcctcagcactctggagggatttagaagtgcctgcaggttggctatagaattccagagtgagccttcagcccaggagaatccattcacagctcccagcgccaagaaggaagacaccttggaggccttctcagaatttcttctcagtgcctgtgactcgctgtgtatccccatggtgatgagacacttggagcagaccacccacccagctttgatggaagttttcctctcaattctacataacctctttgtcatcgttccccacatgaaggagaagttttccaagaagcttgcttcctcatccttcatacgactgaccctggagctgaaggccaggttttgcagtggtctgagtcactcagccctaaaccaggtgtgttccaatttcctctactatatgtgcctcaaccttctctcagctccagagaagacaggaccaccttccaaagaagaactctctgcagtgtctgagctcctgcagcatgggctgccccagataagcagcaggagccctgaaagccttgccttcctgtctgatcgccagtacatggagggagctgctcgccagagacagtactgcatcctgctcctcttctacttggcctacatccatgaagacaggtttgtctcagaggcagagttatttgaggctgtgcaaagcttcctcctgtcgctgcaggaccagggcgagcgccccccactggtggtcttcaaagcctccatctatctgcttgcaatctgccaggacaaagacaatacactacgtgagactatggtcagtgcaatcagaaaattcctagaaggcatcccagacctgcagctagtctatactcaccatccgctcctgctcaggttctttctgttgtatccagagctcatgagtaggtatgggcaccgtgtcctggaactttggttcttctgggaagagagcagctatgaggaactggatgatgtcacctctgctgggcagcccgcccttcctgccagcttagtagtcctgttccagttgctcagaagcatccccagcatcctgctcatcttgctggacctcatctattccagcccagtggacacagctcacaaggtactgattagcctgaggaccttcctgaggaggaatgaggatatccaagtgggcggtcttatccgaggccacttcctgctgatcctgcagcgtctgctagtggagcatggggcatccccatcaggagcctcggggaacctaccattgctgctgagcctcctctccctgatgcagctcaggaatgtgtcagagcaagaactggacagcgtggccatgaagctccttcaccaagtaagcaagctgtgtgggaagtgcagccccactgacgtggacatcctgcagccctccttcaacttcctgtattggagccttcatcagaccacacccagcagtcagaaaagagctgctgcagtgctcctgagcagcacaggcctgatggagcttctggagaagatgctggccctcaccttggcaaaggcagattctcccaggactgcactcctctgctctgcctggctgctcactgcctccttctctgcccagcagcacaagggcagtttgcaggttcaccagacactctctgtggaaatggaccaagtattgaaggctctcagctttccaaagaaaaaggctgcactactctcagctgccatcttatgcttcctgcggacagccctgcgacaaagcttttcctctgccctggtagccctggtgccctcaggggcccagccactgccagccaccaaggacactgtcctagctccactgcgaatgtcgcaagtccggtccctggtcattgggctgcagaacctcctggtgcagaaggaccctctattgtcccaggcctgtgttggctgcctggaggccttgcttgactacctggatgcccggagcccagacattgctctccacgtggcctcccagccttggaatcggtttttgctgtttaccctcttggatgctggagagaattccttcctcagacctgagattttgaggctcatgaccctgtttatgcggtaccggagtagcagtgtcctctctcatgaagaggtgggtgatgttctgcaaggtgtggctttggctgacctgtctaccctctcgaacaccacactccaggccctgcatggcttcttccagcagctccagagcatgggacacctggctgaccacagcatggcccagaccctgcaggcctccttggagggccttccccctagcacctcctcaggccagccacccctgcaggacatgctctgcctgggaggggtggctgtatccctgtcccacatcagaaactgatcctcaggacttgaaggcccagaagtggagagagaatgagacctggagacaaagggcataattgttggggaaatggatgacagctgaagctattcatatggagccatatactctattgttgaaatagaataaggaaataaaatgatacactcacat

SEQ ID NO: 6383 - DNA, 4542 bp, Homo Sapiens
  NM_152524
attggctgatggggcaaccgccaacggctgtggcgtttaaacccaagccgcagccgctgctgctcgccgagctcccggagctgggtgggggtgccccacgctgaaagagagtgatggagtgcccagtgatggaaactggctcactttttacctcaggaattaagagacatttgaaagacaaaagaatttcaaagactactaagttgaatgtttctcttgcttcaaaaataaaaacaaaaatactaaataattcttctattttcaaaatatctttaaagcacaacaacagggcattagctcaggctcttagtagagaaaaagagaattctcgaagaattacaactgaaaagatgctattgcaaaaagaagtagagaaactgaattttgagaacacatttcttcgcctaaagctaaataacttgaataagaagcttatagacatagaagctctcatgaacaataacttgataactgcaattgaaatgagcagtctttctgagttccatcagagttcctttctactgtcagctagcaagaagaaacgaattagtaaacagtgcaagttgatgcgtcttccatttgcaagggttccattaacttcaaatgatgatgaagatgaagataaagagaaaatgcagtgtgacaacaatattaaatcaaagacattacctgatattccctcttcaggatcaacaacacaacctttatcaactcaggataattcggaagtgttatttcttaaagaaaataatcaaaatgtatatggtttagatgattcagaacatatttcttctatagttgatgtacctcccagagaaagccattcccactcagaccaaagttctaagacttctctaatgagtgagatgagaaacgcccagtctattggccgcagatgggagaaaccatctcctagtaatgtgactgaaaggaagaagcgtgggtcatcttgggaatcaaataatctttctgcagacactccctgtgcaacagttttagataaacaacacatttcaagtccagaattaaattgcaataatgagataaatggtcatactaatgaaacaaatactgaaatgcaaagaaataaacaggatcttcctggcttatcttctgagtctgccagagaacctaatgcagagtgcatgaatcaaattgaggataatgatgactttcaattgcagaaaactgtgtatgatgctgacatggatttaactgctagtgaagtcagcaaaattgtcacagtctcaacaggcattaaaaagaaaagtaataaaaaaacaaatgaacatggaatgaaaactttcagaaaagtgaaagattccagctctgaaaaaaagagagaaagatcaaagagacagtttaaaaatagttcagatgtcgatattggggaaaagattgaaaacaggacagaaagatctgatgtcctggatggcaaaaggggtgcagaagatcccggttttattttcaataatgaacagctggctcagatgaatgaacagctggctcaggtgaatgaactaaagaaaatgacccttcaaactggctttgaacaaggtgacagagaaaatgtactgtgtaataaaaaggagaaaagaataacaaatgagcaagaggaaacatactctttatcccaaagttcaggtaaatttcaccaggagagtaaatttgataagggtcagaattccctaacttgtaataaaagtaaagcttctagacagacatttgtgattcacaaattagaaaaagataacttactcccaaaccaaaaggataaagtaaccatttatgaaaacctagacgtcacaaatgaatttcacacagccaatctttccaccaaagataatggaaatttatgtgattatgggacccacaatatattggatttgaaaaagtatgtcactgatattcaaccctcagagcaaaatgaatcaaacattaataagcttagaaagaaagtaaaccggaagacagaaataatttctggaatgaaccacatgtatgaggataatgataaagatgtggtgcatggcctaaaaaaaggtaatttttttttcaaaacccaagaggataaagaacctatctctgaaaacatagaagtttccaaagagcttcaaatcccagctctttctactagagataatgaaaatcaatgtgactataggacccagaatgtgttgggtttgcaaaagcagatcaccaatatgtaccccgttcagcaaaatgaatcaaaagttaataagaagcttaggcagaaagtaaatcggaagacagaaataatttctgaagtgaatcatttagataatgacaaaagtatagaatacacagttaaaagtcactcactctttttaacgcaaaaagataaggaaatcatccctggaaacctagaagacccaagtgagtttgaaacacctgctctttctaccaaagatagtggaaacctgtatgattctgagattcaaaatgttttgggggtgaaacatggccatgatatgcaacctgcttgtcaaaatgattcaaaaataggtaagaagcctagactaaatgtatgtcaaaagtcagaaataattcctgaaaccaaccaaatatatgagaatgataacaaaggtgtacatgacctagaaaaagataacttcttctctctaaccccaaaggataaagaaacaatttctgaaaatctacaagtcacaaatgaatttcaaacagttgatcttctcatcaaagataatggaaatttatgtgattatgacacccagaatatattggagttgaaaaagtatgttactgataggaaatctgctgagcaaaatgaatcaaaaataaataagctcaggaataaagtgaattggaagacagaaataatttctgaaatgaaccagatatatgaggataatgataaagatgcacatgtccaagaaagctatacaaaagatcttgattttaaagtaaataaatctaaacaaaaacttgaatgccaagacattatcaataaacactatatggaagtcaacagtaatgaaaaggaaagttgtgatcaaattttagattcctacaaagtagttaaaaaacgtaagaaagaatcatcatgcaaggcaaagaacattttgacaaaagctaagaacaaacttgcttcacagttaacagaatcttcacagacatctatctccttagaatctgatttaaaacatattactagtgaagcagattctgatccaggaaacccagttgaactatgtaagactcagaagcaaagcactaccactttgaataaaaaagatctcccttttgtggaagaaataaaagaaggagagtgtcaggttaaaaaggtaaataaaatgacatctaagtcaaagaaaaggaagacctccatagatccttctccagagagccatgaagtaatggaaagaatacttgacagcgttcagggaaagtctactgtatctgaacaagctgataaggaaaacaatttggagaatgagaaaatggtcaaaaataagccagacttttacacaaaggcatttagatctttgtctgagatacattcacctaacatacaagattcttcctttgacagtgttcgtgaaggtttagtacctttgagcgtttcttctggtaaaaatgtgataataaaagaaaattttgccttggagtgctccccagcctttcaagtaagtgatgatgagcatgagaagatgaacaagatgaaatttaaagtcaaccggagaacccaaaaatcaggaataggtgatagaccattacaggacttgtcaaataccagttttgtttcaaataacactgctgaatctgaaaataagtcagaagatctatcttcagaacggacaagcagaagaagaaggtgtactcctttctattttaaagagccaagcctcagagacaagatgagaagatgaagtgaatttatggattctggtttttctgaattttcaaagcataaggaatcaaaacagaaatatagtatcaagaagatgaaatgcttaatgaaaaggttttttttttgtttctttggcctttcatggagtgttgatttgtccattcttaatgtttattaataggtatatgtgcataaaatagctattttgtaacattaaactttttgagtcattttggtcatcatataacttaccttcctgtttatttaagcttctttttacctagtagcctttaaccaaacaataaccttttaaccaaataaaatgtgttaataaatacctttgcattggttatcttgtatactaggctgtcttgttttgctgtctgtttttaacccattcaatatatgtggacatccaaaagggtttaaaagccacctcctgccctggcccgttttctctcccttcattcttctgttttcagaaatacatgttgaatgtcagcttctgtattatttctattatatgtaatctgatgacttagaggaggagattaacctttcaggctcttttgaatttggtttttataatttggttttaaagatcacttactcttccagtaataagtagtaataaatcctgttcatatctg

SEQ ID NO: 6384 - DNA, 2830 bp, Homo Sapiens
  NM_152531
ccctttcatggccgccgcctggcgccggggctaagtggccgccggcgtccgggtacccgagggctctcccgcgttgctggcaccgctggcgccgcggtctcgtagcgcatgggcctcctccgaggcgggctcccatgcgctcgggccatggcgcgcctgggcgctgtgcgctcccactactgcgccctgctgctggccgcggcgctggccgtctgcgccttctactacctcggctcaggccgggagaccttctccagcgccaccaagaggctgaaggaggcccgcgccggggctcccgccgcgccctcgccgcccgcgctggagctagcgcggggctccgtggcgccagcccccggcgcgaaggccaagagcttggagggcggcggtgccgggccggtggactaccacctgctgatgatgttcaccaaggcggagcacaatgccgcgctgcaggccaaggcccgcgtcgcgctgcgctcactgctgcgcctcgccaagttcgaggcgcacgaggtgcttaaccttcacttcgtgagcgaggaggccagccgcgaggtggccaagggcctgctgcgggagctcctgccgcccgccgctggcttcaagtgcaaggtcatcttccacgatgttgctgtgctgacggataagctcttccccatcgtggaggccatgcagaagcacttcagtgctggcttgggaacctactacagtgactccatcttcttcctctcggtcgccatgcatcagatcatgcccaaagagatcctgcagatcattcagctggacctagacctgaagtttaagaccaacatccgggagttgtttgaggaatttgacagtttcctgccaggcgccatcatcggcatagcccgggagatgcagccagtttacaggcacacattctggcagttccgccatgagaacccccagacccgggttgggggcccgccccccgaggggctgccgggcttcaacagcggggtgatgttgctgaacctggaggccatgcgccagtccccgctctacagccgcctgctggagccggcgcaggtgcagcagctggccgacaagtaccacttccgcggccacctcggggaccaggacttcttcaccatgatcggcatggagcaccccaagctcttccatgtgctggactgtacctggaaccggcagctgtgcacctggtggagggaccatggctacagtgacgtcttcgaggcctatttcaggtgtgagggccacgtcaagatctaccacgggaactgcaacactcccatcccggaggactaggcgctccccgtgccttgcccccggggcctccagatctgggggaaggacagggttccttgggacagacccaagggcagtgtctgacccgctagagagacaccgcagggaagtcctgtgattaaggtgctgagacctcctgccgggcaggtcactgtgctgaggccacccgccaaggactggcctgtgcactgctggtgcttgggaccttattcctccagggagcaggcgacacaaaggacacgcatgtccagtgggctgggaagcaagcacttgaagagaaggaaggggagaaagggtcccccttgctgtctgcctctgaggaatggaaatcctttagacccggccttttttggaccaatataaatttaatttaaattgacagccttccatttttcgagaaagtacaaacagaactgctttagcacccatcgagccccaaacgggtaaggtaagccaaggttttaatgaccagcccagtatctaagcttccaaacgaatgccagcccatcacatactcaccctgggaggctgctgcacgcgcattctcctgatgctcacgtcacttggtgtaggtttcaggatcgcctctttgaggaaggacttcaggaccaactggggcctgcataagaaaacttatctcattattagagtactcacagcttgtatctcccagctacatcctagaaccccattgtcctttattccaccaaaccagctccaggtgaccagactctactcagaaagcaaattcgtcatcaaagaacagagactggccaccacaaggacatgcaggagaactgtcgggaccaggaagactcattccaaaaagcccaggccgggcacagtcgtcaagcctgtaatcccaacactttgggagaccgaggtgggggtatcgattgagcctcggaggtcgagatcagcctgggaaacacagggaggcccccatcgctacaaaatattttaaaaattagccaggtgtggtggcttgtgcttgttgtcccggctacttgggaggctgaagtgggagggtggcttgagtccaggagttcactgcactgagctgtgatcacaccactgcactccagcctggacgacagagtgagacgtccatctcaaaaaaaaaaaaaaaaccaaaaaggaacccagcaattcccaagtgtgaccatgtgggcttggaagacatgtcactcatgggctagtaagcattctagtttctttgtttaaaaaatccccttatcataccacgttagaccgtagaccttagcagaaattaaagcgtcatttcttttgatggggcctcctgtacgtaggctgcagacgtgaaagccccaggggtccatttgtatcaattttcatcttgttttgttttgatttcatttacgtttttctttttcccatgagtgaggatagccaataaatcatctttgagaaaaaaaaaaaaaaaaaaaaaaaaaaaaaaaaaaaaaaaaaaaaaaaaaaaaaaaaaaaaaaaaaaaaaaaaaaaaaaaaaaaaaaaaaaaaaaaaaaaaaaaaaaaaaaa

SEQ ID NO: 6385 - DNA, 3725 bp, Homo Sapiens
  NM_152542
gtcaaatagcagccgcggggaggctcgttcccatcggcatctgtgactggctgcgatcgagggcccgggcggccggccagccgtctcgccgagtgcggactggccggatctgctgtcagtcagcgggaacagacttctccctctccatctggtcaactgcgggagaaaaattttcgagaatttccagcaggcaaggcagtggccgctttgactgcttgcttcggagatccgagacgacggagaaggcactcttatttaccgaccaagaaagctcctcccccgtcctccgttagctaattaaaacatttttcagggacgtagccatccagagacattccattattgttccattgacctttccctcatcactgagtcctttggagctgagttatgtcaacagctgccttaattactttggtcagaagtggtgggaaccaggtgagaaggagagtgctgctaagctcccgcctgctgcaggacgacaggcgggtgacacccacgtgccacagctccacttcagagcctaggtgttctcggtttgacccagatggtagtgggagtccagctacctgggacaattttgggatctgggataaccgcattgatgagccaattctgctgccacccagcattaagtatggcaagccaattcccaaaatcagcttggaaaatgtggggtgcgcctcacagattggcaaacggaaagagaatgaagatcggtttgacttcgctcagctgacagatgaggtcctgtactttgcagtgtatgatggacacggtggacctgcagcagctgatttctgtcatacccacatggagaaatgtattatggatttgcttcctaaggagaagaacttggaaactctgttgaccttggcttttctagaaatagataaagccttttcgagtcatgcccgcctgtctgctgatgcaactcttctgacctctgggactactgcaacagtagccctattgcgagatggtattgaactggttgtagccagtgttggggacagccgggctattttgtgtagaaaaggaaaacccatgaagctgaccattgaccatactccagaaagaaaagatgaaaaagaaaggatcaagaaatgtggtggttttgtagcttggaatagtttggggcagcctcacgtaaatggcaggcttgcaatgacaagaagtattggagatttggaccttaagaccagtggtgtcatagcagaacctgaaactaagaggattaagttacatcatgctgatgacagcttcctggtcctcaccacagatggaattaacttcatggtgaatagtcaagagatttgtgactttgtcaatcagtgccatgatcccaacgaagcagcccatgcggtgactgaacaggcaatacagtacggtactgaggataacagtactgcagtagtagtgccttttggtgcctggggaaaatataagaactctgaaatcaacttctcattcagcagaagctttgcctccagtggacgatgggcctgattaccagctgggacttagagtttctgtgcaacagtttttcactgagcatgtcaagaaactgataagatcaaaaaggtctcctaactcactagatcagcgcacaagtcagtgtaaaccacttagatagtagttttttcataaatgctcatcatatttatgttccgctgtacatgttcagtataaatatatgtgtagtgaagctactgtgagtctttaaatggaaagagcaaatgagaagtggtttggatacacttgatgagagatgagagtgtcacattaataatttttaagactcttaggcagctatgggtttcttttgatcatttttgttctttattcatttgaacacgtttttgaagttcttcaaaactagtcagtttgaattttgacagctattcaatatgtgatctccaagtttaaaaaaatttttttccagacttccctaatcctaaaatgcgagtttttatttttaataactgtaccaaggaataagtatgaaaacagttctctgttaccatattttgtattctggaccacttactggtgaaagcaaccatgcaaaagaaattaatttggccaggcacagtggctcatgcctgtaatcccagcactttgagaggccaaggtgggtagatcatctgaggtcaggaattcaagaccagcctggccaacatggtgaaaccctgtctctagtaaaaatccaaaaaaaaaaaaaaaaaaaaaaaaaaaattggctgggcgtggtggcagacacctgtaatcccagctactcgggaggctgaggaaagaggaatcacttgaacccaggagatgggggttgcagtgagctgagatcatgccattgcactccagcctgggcagcaagagcgaaaaactccatctcaaaaaaaaaaaaaaaaagaaagaaaagaaattaattcagatgatgtgacattactaaattgtatacatatttataaatgtgtatttcagctgtctcatcagccctcccctccatttattcctatttttctgtagttaagaatactgtaaaaatgtgactattccttaatatcagaaaagaatgcacaggctgagtcttccggtcaaaagttaaatactgatggaatcaagtattttgtatgaagttctcatttgttatctctaacgctattttgtgttttgcatatagtattatagtatgtgtatatcactttttgtatagagtaagcaattgaataatttgttaataaaaataataccacattgactgatactgctatagacatagcttgagttttatgtctcctttttgctcattttctaagacttaggagaaagaataaatctaaaatgaccattaaaacattctccatttcagcttgctgtgtaacttaggaagtataaaactatacttctctttatctgcatgtaagtttgctgttaaaatgtgaatttctaaatgtgtatttggaattatttccgtagtttatttctgcaaactatgtaaatttgttatatgtgtgagtatgtgtacatatgtatattttagagtaatataaaattaaagggaacaatcttgcatagctctttcaccagttttaaattattgatacgttatttttaaggactcttgacaaactaggggcaattttcttatagtggagacccagtgattatcagcagatgaggaaataggttaaaaattgctatatggcaatttgtatataaagtaataggatgtgagaaaaatactgaatcttaagaatgacatggaattctgtggcagaaacaaaagaaaaagttgatgtagtatataccttcaactgtgttttgagttgacttttttttttttctttaagctttgggtaaaaatgtatgaggagggagagggcccaatataaatatttacatcttcttacctttttggaaatggaagaagataaatcttgagtttttctgcctatattaatcaggaattgccctttgaaaaaagtgctaaataaatattttgattttttttttcaagggaagttaggtgaaagaaggaaaaacatcacaggaaagactgttaacattctgtttgttgtctgagaggtgaggaaccaaagggaggcaactaaagcgggaaaccatcttgctttttctaatcagttcttggaacagaaatgtggaagctacctttaggaacatggagaatttccaaaccaacaggcaaaggaaaactaacgcacaaa

SEQ ID NO: 6386 - DNA, 2836 bp, Homo Sapiens
  NM_152546
gtggcgacgcagccgcggtctgagagaccggttcacgtgcaggcagcggcggatcatattccttcatctaccatggctcagccgggaactctgaacctcaataacgaggttgtgaagatgagaaaagaagtgaagagaattcgagttttagttatccgaaaacttgtcaggagtgttggccgactgaagtcaaaaaagggtactgaagatgcactgttaaaaaaccaaagacgggcgcaaagattgcttgaagaaatccatgccatgaaggaattgaaacctgacatagtaactaaatctgctcttggtgatgatatcaactttgaaaaaatcttcaaaaagccagattctactgcaactgaaagagcaattgccagactagcagtacatcctcttctgaagaaaaagatagatgtgctaaaagctgctgtacaagcctttaaagaagcaagacaaaatgttgctgaagttgagtcatcaaagaatgcttcagaggacaatcattctgagaatactttgtattcaaatgataatggaagtaatttacagcgtgaagcaactgtcatcagtgagcaaaaagtcaaagaaaccaaaatattggcgaagaaaccaatacataattcaaaggaaaaaatagcaaagatggaacatggacctaaagcagtgactattgcaaattctccatcaaagccttcagaaaaggattctgtagtttcccttgagtcccagaagacacctgctgacccaaaactgaaaactctaagtcaaaccaaaaaaaacaaaggatctgatagctcactctctggtaacagtgatggcggagaagaattttgtgaagaggagaaggaatattttgatgatagcacagaagaaaggttttacaagcagtcttccatgtctgaagatagtgatagcggtgacgacttcttcattgggaaagtcagacggacacgaaagaaggaaagtagttgtcattcttcagttaaggaacaaaaaccactagaaaaagtgtttcttaaagaagatacaggtgaaactcatggggatacaagaaatgacaaaatcaagccaagtacagaaaccagaaagttagaatcagtgtttttccactctttatctggatctaaaagctctagaagaaatttcaaagaacaggctccaaaaacaagatccctagattttccacagaatgagcctcagatcaagaatcagtttaataagaagctatcaggaagacttgaaaatacaaaacagcaattgcagctgcctcttcatccttcatgggaagcaagcagaaggcgaaaagaacagcaatctaatattgctgtgtttcaggggaaaaaaattacgtttgatgattgattagtgcctctttctgcaaacttttccatctaaaaaaaaaaatgttttttttaagacaggatctcattctgttgcccagactagagtacaatattgcaatcacagctcactgcagcctcaaactcctgggctcaagtgatcctcccacctctgcctcccaaagggctgggactgcaggtgcatgcactaccatgcccagctttctcaccccaggctctgcagctattacttaaactcgtatttgaataagtctcttggggagaattatagaatgtttgtttttgtatttttttttaaagtaaattcaacttacgcttatataagcctttcacaaatccaatatgtacttaaattgatttttaataatatccctcagactgtttcccttatgaagtaatttggggattttagtgatctcatattttctctttagtgcttatcatgaaatgtgcttcactggttcagctctgttgtttccttaaacataaatgtcaatatatatttaaaataataatggaaacataggaaatcagctatttaaaccagatcacccttgttaaaaatcattcttgttagcaaactaaaatagtaacttttattatggatgtacagataaatattaattttattatagttttaagtacttgtgatcatgtactttttgattctaaaatagttgtctaggacaattttgggattcttaattatattttagttaagaaaattgtttaaatatagcaatacaaccaataatttgttttatgtttcactgcatataaatatttccattaaatcaagaatgtatattatctagtttttactatacttattttaaaatttttgaggaatcatagattctaatttttaagaacaaattctgaaggtggtaggattaaaagaatatttccactgatggctaagcaaagaagttgtaagatgactcactgaggaagggactgctttatacatcacagtactgctatttaaaaggaaaacagaaatttttaaatcccttcaaatgtttcacttttgctatgctgggaaaaattttgaagttcttggtaaactgaataatgctaatccatgtttcctgcacattagttcctttaatggcagggaaggccatctggttaacctgtattcacaaactctcaagagtttctacttatttcaggagcttaagaatttagataactcagccgggcgtggtgactcatgcctataatcccagcactttgggaggctgaggcgggtagatcgctagaggcaaggagttcaaaaccagcctgggcaacatggtgaaaccctgtctctactaaaaatacagaaaattatccaggcgtggtggccggcatctgtaattccagctactcagaaggctgaggcataagaattgcttgaacctgggaggtggaggttgcagtgagccaagattgcaccactgcactccagcctgggtgacagagtatgactg

SEQ ID NO: 6387 - DNA, 3520 bp, Homo Sapiens
  NM_152547
agagcaaacggcatatatcttagggtggaagatggataaataattctgtcacacgtgccctggcctctggagctcagctgccagtccacgtctagggaatcttagcatctgggaccaagacactttacagcaatcatcaccctttgcagaggaggtgagctcaccaggactcatctgccatttcagaccttttgctgctacctgccaggtggcccccactgctgacgagagatggtggacctctcagtctccccagactccttgaagccagtatcgctgaccagcagtcttgtcttcctcatgcacctcctcctccttcagcctggggagccgagctcagaggtcaaggtgctaggccctgagtatcccatcctggccctcgtcggggaggaggtggagttcccgtgccacctatggccacagctggatgcccagcaaatggagatccgctggttccggagtcagaccttcaatgtggtacacctgtaccaggagcagcaggagctccctggcaggcagatgccggcgttccggaacaggaccaagttggtcaaggacgacatcgcctatggcagcgtggtcctgcagcttcacagcatcatcccctctgacaagggcacatatggctgccgcttccactccgacaacttctctggcgaagctctctgggaactggaggtagcagggctgggctcagaccctcacctctcccttgagggcttcaaggaaggaggcattcagctgaggctcagatccagtggctggtaccccaagcctaaggttcagtggagagaccaccagggacagtgcctgcctccagagtttgaagccatcgtctgggatgcccaggacctgttcagtctggaaacatctgtggttgtccgagcgggagccctcagcaatgtgtccgtctccatccagaatctcctcttgagccagaagaaagagttggtggtccagatagcagacgtgttcgtacccggagcctctgcgtggaagagcgcgttcgtcgcgaccctgccgctgctgttggtcctcgcggcgctggcgctgggcgtcctccggaagcagcggagaagccgagaaaagctgaggaagcaggcggagaagagacaagagaaactcactgcagagctggaaaagcttcagacagagcttgactggagacgggctgaaggccaggctgagtggagagcagcccaaaaatatgcagtggatgtgacgctggacccggcctcggcgcaccccagcctggaggtgtcggaggatggcaagagcgtgtcttcccgcggggcgccgccaggcccggcgcctggccacccgcagcggttctcggagcagacgtgcgcgctgagcctggagcggttctccgccggccgccactactgggaggtgcacgtgggccgccgcagccgctggttcctgggcgcctgcctggccgcggtgccgcgcgcggggcctgcgcgcctgagccctgcggccggctactgggtgctggggctgtggaacggctgcgagtacttcgtcctggccccgcaccgcgtcgcgctcaccctgcgcgtgcccccgcggcgcctgggcgtcttcctggactacgaggccggagagctgtccttcttcaacgtgtccgacggctcccacatcttcaccttccacgacaccttctcgggcgcgctctgtgcgtacttcaggcccagggcccacgacggcggcgaacatccggatcccctgaccatctgcccgctgccggttagagggacgggcgtccccgaagagaacgacagtgacacctggctacagccctatgagcccgcggaccccgccctggactggtggtgaggcgccctcgtggccgcgggactggccccggggggccccctggatcccaggccagcgctttgctctcctgctccgtctgaagggagcaggtgcaccagccaaaatgtcagcgagggggacaaagagagggacctttgcctacgtagatgtgtatgtgtagtgcgattttcttcaaggaaaggagacaagtccaaagctcgtttgtggattgtgggactgagcgaaggagtacaaatatatccacgtcgctcagagctggggtgctcacggtgggcggtgggcaagaagccagcatggaagaaagaagggagaaaactttggtgactgccttagagggatcagttaatttgtatagttttatattttttgtatatgtttgctagctctaaaaaggtcgagatgcaataacacttcgtaagcaacgagttcacctaagtaaggctcagatcctagttttaaaaaccatttcccattaaaatgaagttggaggaacagctgcttctggagccggggcaaaaatttcaaggtgagcctggagcattgtgtgtggtgaagtaaaataaaggctcaaaacgtgacggcaacccggcaaaagggtagggagccaggccgaaggggcctcactgaccaattgtgggacaatttgaacatcaggatgaataatgacaggagagattataacacactgaataaaaacataatccatgagttcatgctgatactcaaatttctttttaaaaaggagaaacaggaaggtttcttttggaggtgaaatctaattattggtgagagtcttggagaacaggctgtttccagtctcaaagcagtaaccttatacactacttataagtttgaaaggggaaaggttacctttacaatggagacatctaccagatcatccaagtgattaaatttaacatcatcaatgatgggaccaaggacattattagtttgacaactggggaaagaagtgttcttcaccccctacccccaagacattgtctctgtcggccaggctggagtgcagcctcaacctcctgggtccaagtgatcctcccacctcagcacacaacaccatgcccaattttaagtgcgttatagagacgggggtctcactttgttacccaggctggtctcaaactcctgcgctcaagcaatcctcccacctgggcctcccaaaatgctgggtgtacaggcatgagccgctgtgcctggcttcattttcagagtgagacatttgtactgtggctatgtaggagaacattcttgttcttagcaaacatactgaagtttttagatattaattaccacagtgtctgccactgaatttccagtgactaagtggaaaaatataaaacatatgaatataaagaaagaaagagacaagtcaaatgtagtaaaatgacaacacttggtgactctaggtgactggtcgacagatgttcattgtactatcaatgtggctttgctgtgggtttgaaattttgcaaactaagagttgggtggcggggagaaggatacaccaaaaaactaagtgattatctttggatgggaaaatgtttggtaattgcattcttaaaatgtcttctttgtattttttaatgttcaataatgtatatgtatcagttctgtaataaaggggaaaacactttttttaaataaaaaaaaaaaaaaaaaaaaa

SEQ ID NO: 6388 - DNA, 4173 bp, Homo Sapiens
  NM_152551
gaggcctgcgcgtgcggtctgcagttcggccgcttcctcttggcgggtgggctgcagctatggagggcgagcctccacctgtggaggagcggcggcggctgcaggaggagctgaacgagttcgtggagagcggctgccggacgttggaggaggtgaccgcgtccctgggctgggacctagatagtctggatcccggggaagaggaggcggcggaggatgaagttgtgatatgtccatacgattccaatcatcacatgcctaaatcatctttggcaaagcacatggcatcttgtagattgaggaaaatgggctataccaaagaagaagaggatgaaatgtataatcctgagtttttctatgaaaatgtgaagataccttcgattactttgaataaggactcacaattccagataattaaacaagctagaactgcagttgggaaagacagtgattgttataatcaaagaatttattcttcattgcctgttgaagttcctttgaatcacaaacggtttgtttgtgatctaactcaagctgatcgtcttgccctctatgatttcgtagttgaggagacaaagaaaaagcgctctgattctcaaattattgaaaatgacagcgatctctttgtagacttggctgccaaaatcaatcaagacaatagtcgaaaaagtccaaaatcctaccttgaaatcctggcagaagtacgagattataaaagaagacgccagtcctatagagccaagaatgttcacataaccaagaaatcatatactgaggtgattcgagatgtgataaatgtgcacatggaagaactcagcaatcattggcaagaagagcaagagaaggcagaggatgatgccgaaaagaatgaagaaaggcgatcagcttcagtagattcacggcagtctggtggaagctatttggatgctgagtgttcacgacatagaagggataggagtagaagcccacataaaagaaaaagaaacaaagataaggataaaaactgtgagtcgagaagaaggaaagagagggatggggaaagacaccatagtcataaaagaagaaagcaaaaaatataaatgaagtacttgtacctatattaattatgcttacgccatgataaccaatatacagatatattaattggaattcctttgcataggagaatgtttttatgatctgtttagtgcttattattttttttatgatctgtttagtgcttattattttccagtaaatatgcttcaaaccatgagtacactattaggccctacaactttgttttccttatattttattagatgatttgcttcctataactgatgttgttttgttcgttttgctaatatatgtatctcaaaattctttaagtcaatatttatcatatgtaaattaaacatgaatacattctcatcttataactacatcttataaataaggctaataacccttagaacaccacctgcggttctgtcctcaccccagtggtgactactgtttaccactacactggtgaattgtagtagggaaaaacaatctaaatattgaagaggaatggcctaattaaaatatgatgtagtcataggatagattattgtattggagttaaaagaaataatctagatccatattaacctggattggtctcaaaaacataatgctcagtgaaaatagcaagttgtagaaagttatatacaaattatatatatgtacaaaacaatactatgcattctctatggctatataatgtacgtaaatctatttttaaaggttcagaggaatccataccaaagttctaacagcgagtaggaggtatagatgagagattaggggtgcaaatcaggattgggagggtggtcagagggaactttagctttatccataacattaatttttttaaaaaataaggtcttaatgtttcatttaatttaaaatatactgtcatgttgtgttttgtaaatcaactgaattgaggtactatttacttagatttattgcaccctttttacgtgtgtattttattgggttttgacagattcatacctctgtgcagccactatcacgatcaagatacaaatattttcattgcccccaaaattctcataccccctttcccaatcaattcctctacccctagccctaggcagccacagatttgcttttggttaccgattagatctatccattgtagaattcatgtaaatagaatactgtagtatgtactttgccttcttcctctctgcagatttttgagattgatccctgtgtgtcagttgtgcattttttttgttgctgagtagtatgttctatcttatgtcagatcattcacgtgagactttggcatgaaatgttaagcatccgacatctaaatagcaatattttgaatactggaaactcaggttaaagattttgtttccaagtagaaatgaaatcttattattttaataagtagctgacagtgacagaaagattggatttggatcagattggctgttaggcttcaggtatgggaaacagctctcagatttataaattggaaatcaccaggttacttgccaatatatagtcatattgctgccattgtacttaatttctaaatatataaaatccacatttaaaaattataaaagcaaggacttgggagtgactgatgaatcatgaaattgctgcttttatagatcaaaactacttgaatcatcaggaatttcatatttttcatattgtgtgacaacttataattttgtttcaaattgtgatttcattgattttactaactggaaggaagaagagtaaaattggcatatttaggttttttgtagaagaaagatacaagtgaaaattaggagtggattggagaaattggggggaaatagaagagtacggagaaaggaagagattgaaaatgttaccagagttctttaaagctcacattttatagtatcactgctacaaactatttaatgaaatgtggcatcgggtgaaaagaggcatttgtttgatccttgaacgaattaatctcacgtacttccctgtttgtggtttgagcctttcactggatgtgagctacttgagagcagggtttatgccttcatcagcgtgacccctgtgcctgcagcctcataggtgttaatctgtaattttaaattttgacaaaagcattttcacagccctgccacataagatctagtttttatttctagagtgctgctatgaataattactatagctgctgtccatcttgcccatccattaaggtaccttctcacaaacatttctaatctactggctggagtgcagtggtgcagtctgtagctcactgcagcctcaaactcctaggctcaggcgatcctcttgccctggcctcccatgtagctgcaactataggtgtgtgccactacacctggctaatgtttttagttttttagagatggagtcttgctctgttgcctaggctggtcttgaactcctgggctcagatgatcctcctgtcctcagcctcccaaaatgctgggagccaccaggcaccaggtgtgatctaccacacctgtctaaaaagtatgtatttttaaatttttttgtagagacaggatctcactatgttctccagctggtctcaagctcctggcctcggcctcctaaagtgctgggattacaagtgtgagccactgtgcctagtcactttaattgagatattggcaagtcaactgccatgcagagcccagggcactggttatattcagtaggaaactgaactcagcactcagaattttaaattaaatcaatgatcttcaagtatttgccactttcgagtacagctaattggataatctcaaaccctttagtgaaaatatcttaaatgcattgagaatattttctaattacctgtgtatgctacagtacagacattaattctataaacatgttcataggtcttccccctcgccccgcccgtcttctaagggcattttctgtttctttttagtgagttcatgaatgtttaacggttctggcgcaaagctttcttgcattctgagcataaaaataataaaacccacttatatttgcttgagtgtgtttacaagtcaatttccttttatgtagcttgctttttcatttgctataattgatcctgcaggtgtgtgaattattaaactaacgctcttttaaaccaca

SEQ ID NO: 6389 - DNA, 1052 bp, Homo Sapiens
  NM_152552
ttaaggcacaatcagaaagaaaagctggagaattctctgaccttttgctctacaggtgtatttacaggagacagcaatggaaacctggtcagttgagcaggtctgcagttggttggtggagaaaaatttaggagagctagttcatagatttcaagaggaagaagtaagtggggccgctcttcttgcacttaatgatcggatggttcagcaactggtaaagaaaattgggcaccaggctgttctgatggatttaattaaaaaatacaagcagaacactcaaggactgaagtccccagaaaaccccaaaaaggcagccctggtcatgcaaacagaagcagctcgagattacagggatgaagagtcctccagtccagccaggcatggggagcagatgccatctttctatccagctgaaaaccttgataatggactaattgaccaaagagtattgaaacagagaagaaatgtgaaacaaattctagcaagaagcaaagcattacagtggacgaagtcctatgttttaccagagtttccctatgatgtcaaatgcatgttagcagagcagaagtgcccggatcacagcatgaggataaggatcattgagtttctccaggccgacatgactaagtatctggaaggctcactgtaccccagcacccagcagtacaatgacgtggttaatgccctgctgcaggcccaccctttcctggatgaggatggctgtggcttcgctggagtatagtggcgcgatctcagctcactgcaacctccgcctcctgggttcaagcaattctctggggcagcagttctaagctctggttgcacattaggattcctagagattcagattgaattaatttgaggatgggattattctaatgtacaaccacggctgagaaccactgccgctgacgtttcaacacaaagtttgctgtttgaacctgcctgtctcctggatttcaaagaccactgtcttcattgcacaacaatgtgaatataatcaacactattgaactgtacctaagaatagttaataaaaaactgagtgttta

SEQ ID NO: 6390 - DNA, 2792 bp, Homo Sapiens
  NM_152570
aatttagagaagatgtagggagtgttcaacatgttcgttgtggaagagaaagagctaagagagaggagcttaaagacacaaacgggtagaatcaaggagtgtgctctcaaatgagaggaacaggagtgacattaaccttgaaatgctcggagactctactccttcatgacagtaggaggataattaacaatagatacaaatgcaggaattgatgagtgccatcagaaagctgtatcatgagctgcctgcacttctaaagtgtccagtggatttttaatcacatgagcctggaaatagggttatgaaaagaagctcagagcagagcaccgaaagtggccactaccagcatgaagagcccaacaattcaaactggtgaagtgagaaaaacagaatgcagctttcaaggttcgtttcaagcagttggcttgtgggactctgagagatgctgctgcccatgacatgcgggaattatcatgatcaactacccagcttggatttcatccagtggccaagagctttgtgtgggagacggcaagggttggatttttcaaaagagtaaaccaggataaatcatgaggaacctataacccttttggccacatgcaaaaaagcaagacccgtgaccaaggtgtagactaagaagtggagtcatgcttcacacggccatatcatgctggcagccattcctgggtctggctgtggtgttaatcttcatgggatccaccattggctgccccgctcgctgtgagtgctctgcccagaacaaatctgttagctgtcacagaaggcgattgatcgccatcccagagggcattcccatcgaaaccaaaatcttggacctcagtaaaaacaggctaaaaagcgtcaaccctgaagaattcatatcatatcctctgctggaagagatagacttgagtgacaacatcattgccaatgtggaaccaggagcattcaacaatctctttaacctgcgttccctccgcctaaaaggcaatcgtctaaagctggtccctttgggagtattcacggggctgtccaatctcactaagcttgacattagtgagaataagattgtcattttactagactacatgttccaagatctacataacctgaagtctctagaagtgggggacaatgatttggtttatatatcacacagggcattcagtgggcttcttagcttggagcagctcaccctggagaaatgcaacttaacagcagtaccaacagaagccctctcccacctccgcagcctcatcagcctgcatctgaagcatctcaatatcaacaatatgcctgtgtatgcctttaaaagattgttccacctgaaacacctagagattgactattggcctttactggatatgatgcctgccaatagcctctacggtctcaacctcacatccctttcagtcaccaacaccaatctgtctactgtacccttccttgcctttaaacacctggtatacctgactcaccttaacctctcctacaatcccatcagcactattgaagcaggcatgttctctgacctgatccgccttcaggagcttcatatagtgggggcccagcttcgcaccattgagcctcactccttccaagggctccgcttcctacgcgtgctcaatgtgtctcagaacctgctggaaactttggaagagaatgtcttctcctcccctagggctctggaggtcttgagcattaacaacaaccctctggcctgtgactgccgccttctctggatcttgcagcgacagcccaccctgcagtttggtggccagcaacctatgtgtgctggcccagacaccatccgtgagaggtctttcaaggatttccatagcactgccctttctttttactttacctgcaaaaaacccaaaatccgtgaaaagaagttgcagcatctgctagtagatgaagggcagacagtccagctagaatgcagtgcagatggagacccgcagcctgtgatttcctgggtgacaccccgaaggcgtttcatcaccaccaagtccaatggaagagccaccgtgttgggtgatggcaccttggaaatccgctttgcccaggatcaagacagcgggatgtatgtttgcatcgctagcaatgctgctgggaatgataccttcacagcctccttaactgtgaaaggattcgcttcagatcgttttctttatgcgaacaggacccctatgtacatgaccgactccaatgacaccatttccaatggcaccaatgccaatactttttccctggaccttaaaacaatactggtgtctacagctatgggctgcttcacattcctgggagtggttttattttgttttcttctcctttttgtgtggagccgagggaaaggcaagcacaaaaacagcattgaccttgagtatgtgcccagaaaaaacaatggtgctgttgtggaaggagaggtagctggacccaggaggttcaacatgaaaatgatttgaaggcccacccctcacattactgtctctttgtcaatgtgggtaatcagtaagacagtatggcacagtaaattactagattaagaggcagccatgtgcagctgcccctgtatcaaaagcagggtctatggaagcaggaggacttccaatggagactctccatcgaaaggcaggcaggcaggcatgtgtcagagcccttcacacagtgggatactaagtgtttgcgttgcaaatattggcgttctggggatctcagtaatgaacctgaatatttggctcacactcacggacaattattcagcattttctaccactgcaaaaaac

SEQ ID NO: 6391 - DNA, 3276 bp, Homo Sapiens
  NM_152574
aagtggcccggccagcggcgcggcgtccggggaggaaatggatgctgtgctggcctgccggctccgggggcggggaaatcgagtagctgcactcaggccccgcccgagacccggagggagcgccgggccgtccccttttgccctcctttgcgctgggctgagcccagagccgagagcaggagtcggctctgagttccctgcttggtttttgggtggcagcagccagaggaggaatatggcgctcttaggcagccgagcggagctggaagcggacgaggacgttttcgaagatgccttggaaaccatctcaatatcttctcactcagatatggcaacaagcagccttcactttgcatcatgtgatacacaacaggcgcccagacagcgcggagcgtctactgtcagcagttcatcatcaaccaaggtggatctcaagagtggcctcgaagaatgtgctgtggcattgaacttatttctaagcaacaaatttacagacgccttagaattgcttcgcccctgggctaaggagagtatgtaccatgccttgggctacagtaccattgtggtgttgcaggctgtcctgaccttcgagcaacaggacatccagaacggcatttctgccatgaaggacgctttacaaacctgccaaaaatacaggaaaaaatacacagttgtagaatctttctcaagtcttctttctagaggatccctggagcaactgagtgaagaggaaatgcatgctgaaatctgttatgccgagtgtctcctacagaaagctgcactcacgtttgtgcaggatgaaaatatgatcaacttcatcaaaggtggactcaaaattagaacaagttaccaaatatataaagaatgtctttctatcctgcatgaaattcagaagaacaaacttcagcaggaattcttctatgagtttgaagggggtgtcaagcttggcagtggggcctttaatttgatgctgtcccttttaccagcaaggattatcagactactagaatttattggattttctgggaatagggagttgggcctcctgcagttacgtgaaggtgcttcaggaaggagcatgaggtctgcactgtgctgcttaaccatcttagcttttcatacttacatctccctaatacttggtacaggagaagtgaatgttgcggaagcagagcgtctcctggcacccttcctccagcagtttccaaatggctcactcgtgttgttttatcatgcccgaatagagttgctgaaagggaatcttgaagaggcacaagaagtatttcaaaaatgcatttcagttcaagaagaatggaaacagtttcaccatctctgctactgggagctaatgtggattaatgttttccaacaaaactggatgcaggcatattactattcagatctgctttgcaaagagagtaaatggtccaaggcaacttatgtgttcttgaaagcagcaattttgagtatgcttccagaggaggatgtagtagcaacgaatgagaatgtggtaactttattcagacaggtggacagcttgaagcagagaattgccgggaaatctatccctactgagaagtttgctgtgaggaaggctcggcgttactccgcctccttacctgcacctgtgaagctcatcttacctgccctggaaatgatgtatgtctggaatggtttttcaatagtgagcaaaagaaaagacctttctgaaaatctgttagtaactgttgaaaaagctgaggcagctttacaaagtcaaaattttaacagcttctctgtggatgatgagtgcttagtgaagttacttaaaggatgttgcctcaagaacttacagcggcccttgcaagctgaactatgttacaatcatgttgtggaaagtgaaaagctactgaagtatgaccactacctagtgccgttcactctatttgaattggcatctttgtataaaagccagggggaaattgacaaggccataaagttcctagaaactgcaaggaacaactacaaagattactccctggagtccagactacacttcagaattcaggcagctcttcacctctggagaaaaccttcctcagattgatcagaacttgaaggatggaatttttcctcaattagcatcggcatctgctatagattcaaccttatattaaagtggaaaaatgatcttgtgaataagagacaaaaaaacagtttttttggtcaatattttctatcatctgagagatttactgttggtctacataattttttttcctatggaatggcattctatattatctagaaaattcttatattttgcctcccccaaaagaatttcatattatttgaattagggggcgaagaagtcttttgaaagacttgcagatgcaatagtctaattagattatttatttttttaatgtgaaaattaatattgtttagcaaatagcttacaagttgagccaattttggatttgttgggtagttaaacttcagagatattttgttgcctgtatttaaatttcagaagataaataaatatcattgcatttaaaatagcttaacagtgaccttcagaagacttctgaaaaagacagtctgagaacatgaacacggatcgatataatgtacttcatgggttgaagagacctttctctataaaggatgatgcagtattcagttagtggttttttactcttcatttgattaaaggtggtgacgttttggagagactgattttgaatgtacttaagtctattataataacaaaattcaaaacccctgtgtatctaaagggaaggaagtgtcatattttaggaatttttcttaaccttagcaatgagagcctaaaatacatacatggattatttttcttctaggaagtaaatttcctgctgctttaaatgatatgtaaaatatcaataatttttacacttaagatgttggtaagacctagttttctaatctctctagcactgtgatgtctccttgtagataatctggaccttgcttagtcctttagttgggaaacagaatcagggcatagagcagaagagagcttgacactccatatggtcctggttctgctacccattagcgattagtgaggagacctttagggagtccactgtgccctgtgtgtcaccacattttcttctgtgaaatcaagattaaagaacagatgactttcaaggtctttttcagttttataactgtgagtctatgtattaggtatttattttcaacaaatgactttaaaatgtcgaatgcaaaccaaaaaaaaaaaaaaaa

SEQ ID NO: 6392 - DNA, 3219 bp, Homo Sapiens
  NM_152581
accgcctccccctcccacccttctctgtctacctctgggcgggactgccgggtgatgagatactcggtcggcgacggtagaacgggcgacggcgacaaccgcaatcacatccacgacggtgatcatggcagagaatcacgcccagaataaagccaagctcatctctgagacccggaggaggttcgaagctgagtatgtgacagataagtcagataaatatgatgcacgtgatgttgaaaggctacaacaagatgataactgggttgaaagttacttatcttggagacataatattgtagatgaaacactgaagatgctcgatgagagttttcagtggaggaaagaaatttctgtcaatgaccttaatgaatcctccattcccagatggttattggaaattggtgttatttatctccatggttatgacaaagaaggtaacaaattgttctggatcagggtgaagtatcatgtaaaagaccagaaaaccatattggacaaaaagaagctcatagcattctggttggaacgttatgctaagagggaaaatgggaaacctgtaacagtgatgtttgacctgtcagaaactggaataaatagcattgacatggactttgtacgctttatcatcaactgctttaaggtttattaccctaaatacctctcaaaaatagtgatctttgatatgccttggttaatgaatgctgctttcaaaattgtgaaaacctggcttggtccagaagcagtgagcttgttgaagtttacaagcaaaaatgaagtccaggactatgtcagtgtagaatacctgcctccccacatgggtggaactgatcctttcaagtatagctatccaccactagtagatgatgacttccagaccccactgtgtgagaatgggcctattaccagtgaggatgaaacttcaagtaaagaagacatagaaagtgatggcaaagaaacattggaaacaatttctaatgaagaacaaacacctcttcttaaaaagattaacccaaccgaatctacttccaaagcagaagaaaatgaaaaagttgattcaaaagtgaaagctttcaagaaaccattgagtgtatttaaaggccccttactacacatcagcccagcagaagaactgtactttggaagtacagaatccggagagaagaaaaccttaatagtgttgacaaatgtaactaaaaatatagtggcatttaaggtgagaacaacagctccagaaaaatacagagtcaagccaagcaatagcagctgtgacccgggtgcatcagtggatatagttgtgtctccccatgggggtttaacagtctctgcccaagaccgttttctgataatggctgcagaaatggaacagtcatctggcacaggcccagcagaattaactcagttttggaaagaagttcccagaaacaaagtgatggaacataggttaagatgccatactgttgaaagcagtaaaccaaacactcttacgttaaaagacaatgctttcaatatgtcagataaaaccagtgaagatatatgtctacaactcagtcgtttactagaaagcaataggaagcttgaagaccaagttcagcgttgtatctggttccagcagctgctgctttccttaacaatgctcttgcttgcttttgtcacctctttcttctatttattgtacagttaaagaagtggtgccgggtaggaaccacggttccttcgtccattagttggaaaaagtaacagacctaaaactctaccaagctactaaaaacattgcacatctgtgcttcctaaaaggaaatatgcagcacgtggaggggaacacatacatgtcttgaaaataaactgctagaataaagaaatgctggagaaattgattataagagactatagctatttagtaaagtaagtaaaggcatatccattgtgtaaattaatagtttaaatataatttattttttccttttgatctgaatacttttaaagcttaagttttatcgtgtaaatacattagctaaactgaaaagtataagtaacatgctttgttgcagccaaaaaatgtaatctgcttttttatgacagaattattatagctgagctgacttactagcttttctatactatgtatatagaagaacatgtatattgagaaagaaaacatacttatatagaggaatttatgtaaccatgactttgtaattttgagaattcctcccagtgatggtcagtattcttttggaatgtaaaccgatttaatgccaaaccaccttaacctttgtttctcagtgttccttaacagcctgccttttattaatctcaggcttttttatgaacactctcatttcagtagaatttggaaaactaagcgtggttggaatttctttgaattctgttagtaatgcccaaaagaaaagtctcaagcagtccccctatccagtcatttttatggagtttcatgttgtccactatagctggacactgaaccttttgcctaatttattataaaggcctgaccctctattgtcccatcttcacccccattccagagcagaggagtctctgtggaccatgaattgcactgtctccctcctcatttctaaatgaaaggtattagatataaatttttttgaaaggttagttgtttgagatgctaagcaggataataaatttagattttaaaatgttccctgtaaaagtcagcccatgacaaggaaatttacaaaatactagagtatctagaagggtgaaaacaaaaaaaaataaaaagaaacacagacgcccaggtgtcagctctccgtttaaagaatgaaaaatgtaactcatgatgatctgtgaaaccttcaaactaggaccaattgacttacttgatattctgcctttgatatggtagtacccacccggtattcctaaaatcctaaaaagatacaccttgcagtagcagaggcaatgacatgagtttgttttctcattaatatgaccagtttgggtctatgttggttcacatgtacatctactttatatgaaagaaaaaacagttgtctgcctgtaaaatgttgagtttcgattgagccatgtttggagattttattactattctgaagggtagtgttgttggttttcatcttcaagaagttgattccaaaactgagttatgaagaatgatataacagttccttcaaaattggcctaggaaataaaaccttaaaaggacaaaaaaaaaaa

SEQ ID NO: 6393 - DNA, 7255 bp, Homo Sapiens
  NM_152594
agtggctggaggagcagctctccagtcagcctttgcagcccctctctttttccctttccaccgggcctcctcggatcccttggctgggcactgaggcgggggaagaggctggggtcgccacggcggaggttgctgccgccacccccctgcgggggtggccggggttcccggctgggggggtaccgttctgggtgaggcatccaccatggtgaggcccctgtgccgctgcccccgcgcccccccggccgccgctgcctcctgcccctcggtgctgctgttgctcccccgcctgctgttgctcctccatctccagatcggatcacggtgagggaaagatgagcgaggagacggcgacttctgacaacgataatagttatgcacgagtgcgagctgtggtgatgacccgagatgactcaagtggtggatggttaccacttggagggagtggactaagcagcgtcactgtcttcaaagtccctcatcaggaagagaatggctgtgctgacttttttatccgtggagagcgactcagggacaaaatggtggttttggaatgtatgcttaaaaaagacctcatttataataaggtcactccaacatttcaccactggaagattgatgacaagaagtttggtcttacgtttcaaagtcctgctgatgctagggcttttgatagaggtatccgaagagctatagaggatatttctcaaggatgccccgaatcaaaaaatgaagctgaaggggcagatgacttacaagcaaatgaagaggattcttccagttctctagtgaaggatcacctttttcagcaagagacagttgttaccagtgagccttatagaagctcaaatataagaccttctccctttgaagatctgaatgccagaagagtctacatgcaaagccaagccaatcagataacatttggtcagccaggcttggacattcagagcagaagtatggaatacgtacagcggcaaatatccaaggaatgtggaagcctaaagtcccaaaatagggtccctttgaaatcaatcagacatgtcagctttcaagatgaggatgagattgtcagaataaaccctcgagatatcttaatacgtcgctatgcagactacagacatcctgacatgtggaaaaatgacttggaaagagatgatgctgattccagtattcagttttctaaaccagacagtaaaaaatcagactatctgtactcttgtggggatgagactaagttaagttcacccaaagactctgtggtatttaagacgcagccttcctcattaaaaattaagaagtcaaaacgaagaaaagaggatggtgaacgttctcgctgcgtatactgccaggaaaggtttaatcatgaagaaaatgttaggggaaaatgtcaggatgctccagaccctattaaaagatgcatatatcaagttagttgcatgctctgtgcagagagcatgttgtatcattgtatgtcagactcagagggagatttttctgatccctgttcgtgtgacactagcgacgacaagttctgcttgcgatggttagccctggtagctttgtctttcattgtaccatgtatgtgctgctacgtccctttgagaatgtgccatcgctgtggtgaggcatgtggttgctgtggtgggaaacataaagctgctggatgaaatggtccagtgccaaaatgagcttaaaatctttgtttccaggaattagctaacttggatttgtggaagcttttggcaagcaatatggaatcttgcctggtatcattgagcccacacatggaggaagcagaactcatcagttcttggcgtttcacgccatgcctaacttttcccttgagtgcatggcatgttttgttacaggttgtagagtatttgcagaaggaaaccatttctggttatttggctataaaaagtcagcataaaatatgatccaactaaaagggattaatttttggcatttttgtatatttatgcattaggtgatgggacttttaaaggtttgaatttattaggacacgaactaaaaataaaagtgcactaggggacagttgatttcaatctaagaaaagttaacacttgggaattacaagaagtaaaacaagtgcaactaaatcatttattagttgttttttgaaagcagttttatgtataaataacaaatgtttatatttaactaaatgtaaggtacgaattattacatattaaacttttcttccccttcctagttctgaagtagatatatatatatatatatctactgtcacattccatatattttgaatatttaactcatctagttaataatgtttttattccatgcgaatgatttgatattttcatccttatttctctttggctacaatttatattgagttatatctgtacattctggtaatctaaaatccttaaaaatactctaatagccttgagtgaccaactttttttttaaagcacagatgtaattgtctaatgttctgatgggaacgtaacacttatttttatataaaaagagactgagtaaacaaacattatagaaaaaaagtgaagttttttagttgttttttgtggtattcaaccagcaagttgttttctttcagagtttcctccttcaaaaagttatattgcatttacaaatgttttacaaggcagaaagtttgactggatagttagtgtaaaagcttcatgttgagatcttcacgtatcattctgctaaaccagaatatgttcagctgtgttactaatttttcagcttaatcctcagtgcttattatttacataacaataactttttatcagttacattttatttttatttaaactggccaaaagcaaaattattttatgttaaaatgtgtgctaaactatcccaggaaagtatttaatccaacattgtaaatgaagtatcttgtacatataaatttatttcttttgcagagcattatattactggatgtttaatttacaaaatagttgggtaaatgttccaacaaactttaaagtaccttgaagtcaaattgtctgtttttgttttgttgttgttgttgttgttttcttaagtgttacattaaaactctaaccaaggaaagggttctttaagaacattcccttagagggataaagttgagaagtgtgccttttttttaatggcttgaagtttcagaggtgataaaaattaaaatcacactactatttgaagctcattttctatgcaggtttttaaacgtcatttatgtatcattctttttatatatcacacttaagcttgtgttagcttttttcttttgccccagatcaaactgaacaatgtatataacactatctgtctgtaaaatactttttttaagaaagcatttatatttatatgacagcttgaactgacaacattgtgtatatagatcatcttgaagtattatttcacattgaaaagaagaaaatatattgataactatagatgttatgaagaagagggtatttctagttttgtactaaaaatcaattggatgaactaaatccaaaacatgacactgtaggcagcagttttaagtcttatttttactgtttatatatttgaatgctgctacaacagatgatcttcatccctgaagttttcagctaaacttggtttcctagaatagactgttaactttcaaaatttttattggtgaaatggaaatactgtttttccttgtgaatgaattttcatatttgtaagtgctaagtttataattcaggtttgatcaaggtgtgaataactgaagaaaataacttgctggctatataggaaaatgctgtggaaatgaactgtgtatatacttctgggaggaacaaatttaatcatttcttctgttaagcactaatcagtatagtgcaactcctggttctgtactgtattttatatgcaacatatatgctttaatattttaatgtttgtgcattaatattttcaatttgtttaaccactttgctgctaagattttgccgtcccattcccattttttcctttacaattttaaacaagtttcttcattaaaaactatggtgatgaaatggtttttattttaccttggatctttatagttaacatacccagtttcttaatcagtctacaagactaactgatgatataatgttctctgaatccctatatggaaattttcttttgagtaaatgagaattcctttgtgaaagcaaatgggtagtttaaatcactgattcttaaacatgtgtataggcaccttcaggaacattttctcattctctgtacagattcggcactgccaattggcttttcctctaaaacttttctttgtttttatctgatataagcagatggctcaagacaactgcttgagtaatagtattgaaaatggaatcatctagacggcatgacaagcaagactggtctgatgaacttgttcagaattgataattcttaaatatttctcttggcttcaaaagggacatcatttgatttctgaagaagtatgtcgtgtggagcttcagcaccacctactggatgatttccaggccagagacatgagatggcaatagggatctgacagggttcatcactactaccattaaagggctatttatgtggtgaccacctctaccagggaaaccaggaataagaactgtctcaaaggaattgtaaaatggttatttacctaatgtgtcttgttggcttgctgaaagattttaagcacttttttcttacatatcctgttttaaaatatttgttgatatttgggactggcaatcaaacttaatggatgtactgaggcatttatagaaccagttgctttaactctcaaaagccattaccaaaatggtatttttttcctccttccgccagtcagggagaatttttaaaaataataatcaaaacatgaaaaaacataatcacacctgtattttatcatgacagcttcagagagtgtgtgtgtacgtttttctctcttttatttgagacggagtttcactcttgttgcccaggctggagtgcaatggtgcgatctcagctcactgcaacctccgcctcctgggttcaagcgattctcctgcctcagcctcccaagtagctgggattacaggcacccaccaccatgcccagctaagttttggtattttagtagagatggggtttcaccatgttggccaggctggtcttgaactcctgaccttaggtgatccacccacctcggcctcccaaagtgctgggattacaggcatgagctactgcgcccagccgtgtgtatgtttctgaaatgatgatggggtggggttaaaatctaaagggaaaaacttgaaactacctattttcattggttattcagcagtgcctaaaatgagcttttgaagtaatgtaaatgcactttcaattcatgtgtatagtgccatctgatatcttgggtaagtcttgctttttcttttctttttcctctcccctgcccccttaattaaatggcacggaaatgtttcttaatatgcacgtgagtctccagagtacaggaaatgtgctttcctctaaatggtcaatgtaaagaatcttaaggatatttcttgtgttgaaatttacattcgattttgtgattacacttggaagtatgtgttaaattgggtttttaattgtagcccaaaggtgcattaagcaagtgtaacattttttccacataaaacttagaaaactttagttacctgaaaagcaaggattctttactaattattatgctcattcttgatttgacttccatgttcacacttcaaagtgtaagaggaagcactagaaactggcattattgttgcactaaaaaagtctataaatcataatagcaccatgaggtgttttgcaatgagacaaacatgaagaatgaatttctttaagagagaaacacaaccggaggtgatttatataaaccaaaagaaaaaaaaaggctttaaggtattaggtactgtttgcctagcagccaggtggttataaaagattcatatgctttggtacactgataaatgttagccattattcctgaaagcttcttaaattgcatcagttgttttgaaattttttcaagaataaactagttgaaaagtctttgtattaaaaatacacatagatttttgtgaacatttccagtgtgtagtgtcgtttgctttctatttctgacctcaaaagtgcctcacttgtatattatttccattaaaagcttgactgcattctttctaatgaacaatgaaaaactgtttaactcatgtcataatgtgtctcctcagatatagttaactagcttgatagttttgagtatataatgtaaataatacattataagtttgtaaccatttctgttacttcatacccgtgtaattggacatagcagatgattatcataagaatttgttttaatggtttttttccctcctggaattacctgattaaacctgtcatgaattataaaaggactttttcttattctcctagagcttatcaaattatcacataagagataattactggaggagaaagtaaaaatggaagcttttgataattagctctgttctttaaaagtatacttttaaactgaaagttcacatatagttcatcttaataacatatttattcatccttaattgtattcagatttttttttaagtctctaagctaataatgttatatttattggtttggtaacatgttgcagctaagctaatgaccttaagtggcaattgtttaacccaggactactgatttttttatattcaagtcagtttcatcgttttacttaactcgccatataaccaaaaataacgaataatctaaaggaaaggttattaggacagtaataaaaaattatagtgtatctcaacactagaataagttggattactatattatagtttatttgaaaaatcaaggagtaactgtatctttaccattaattatgaaatgtagtctcatgtgcttatttacaggtttttcagaatttgctttacattcttcacatcaagttaatacccacaagtaagtagaatagcttttataacaaggaaattgaaactagggttctagcttggctatcaatataagtgtcatgcacatagtgctccttaaagaaaaagacatcgacatcaatggtatgaaagctgtagtcactctttaaattgaactgctctaagatttgcagttttagtgagatctgaaatgatggttcaaaaaatacattcataataaaagtcttaacaaaatcaca

SEQ ID NO: 6394 - DNA, 2318 bp, Homo Sapiens
  NM_152595
tgtgtcaagtgcctatgaaggggactgcccatgaagtgaaagtcaagtgtgtgttgctgcggcagccacggaggccaaggacctcacgggagtaaaagatgacgagactggcttcgggagaaacaccatccagaagagacctttcaaaaaacttctagagactccccaagacgtatgagatgaaaggcttcttctgtctgtgtgcgtttaactcatttctccttagccccgagattacgcgctgctgtgcctgcgactgcagcgtttacgccgagataactcgtggattacagtgccaaccttactcccaaagtttgccacgaaatatctcgcttctgttattttcgcatggttctggtatattgacttttgaaacaaaagacatcattctgtttatagcattctgtttttagtagtgggatttccatctacaaaatatagtaattctcgatcgctgaaatgtcaaatcctagaaaacgtagcattcctatgcgtgatagtaataccggtctcgaacagttgttggctgaagattcatttgatgaatctgatttttcggaaatagatgattctgataatttttcggatagtgctttagaagccgataagatcaggcctctgtcccatttagaatctgatggaaagagctctacatcaagtgactcagggcgctccatgaaatggtcagctcgtgctatgattccacgtcaaaggtatgactttaccggcacacctggcagaaaagtcgatgtcagtgatatcactgacccattgcagtattttgaactgttctttactgaggaattagtttcaaaaattactagagaaacaaatgcccaagctgccttgttggcttcaaagccaccgggtccgaaaggattttcgcgaatggataaatggaaagacactgacaatgacgagctcaaagtcttttttgcagtaatgttactgcaaggtattgtgcagaaacctgagctggagatgttttggtcaacaaggcctcttttggatacaccttatctcaggcaaattatgactggtgaaagatttttacttttgtttcggtgcctgcattttgtcaacaattcttctatatctgctggtcaatcaaaggcccagatttcattgcagaagatcaaacctgtgttcgactttcttgtaaataaattttccactgtatatactccaaacagaaacattgcagttgatgaatcactgatgctgttcaaggggccattagctatgaagcagtacctcccgacaaaacgagtacgatttggtctgaagctatatgtactttgtgaaagtcagtctggttatgtgtggaatgcgcttgttcacacagggcctggcatgaatttgaaagattcagcggatggcctgaaatcatcacgcattgttcttaccttggtcaatgaccttcttggccaagggtattgtgtcttcctcgataactttaatatatctcccatgcttttcagagaattacatcaaaataggactgatgcagttgggacagctcgtttgaacagaaaacagattccaaatgatctgaaaaaaaggattgcaaaggggacgactgtagccagattctgtggtgaacttatggcactgaaatggtgtgacggcaaggaggtgacaatgttgtcaacattccacaatgatactgtgattgaagtaaacaatagaaatggaaagaaaactaaaaggccacgtgtcattgtggattataacgagaatatgggagcagtggactcggctgatcaaatgcttacttcttatccatctgagcgcaaaagacacaaggtttggtataagaaattctttcaccatcttctacacattacagtgctgaactcctacatcctgttcaagaaggataatcctgagcacacgatgagccatataaacttcagactggcattgattgaaagaatgctggaaaagcatcacaagccagggcagcaacatcttcgaggtcgtccttgctccgatgatgtcacacctcttcgtctgtctggaagacatttccccaagagcataccagcaacgtccgggaaacagaatccaactggtcgctgcaaaatttgctgctcccaatacgacaaggatggcaagaagatccggaaagaaacgcgctatttttgtgccgaatgtgatgttccgctttgtgttgttccgtgctttgaaatttaccacacgaaaaaaaattattaaataccgatcatcatacacatctgttccattaggattagagacaagttctgtttagaaataactccaagattgggaggccgacctgggtggatcacctgaga

SEQ ID NO: 6395 - DNA, 2173 bp, Homo Sapiens
  NM_152600
gtccgcgtttggccggccgtggggaaggaagaaaggagccaaggaggcgaggcatggatccgcagcctcctccacccgcccagggcagcccacctcaccgtggccgaggccggggccgtggccgaggccgtggtcggggccgtggccgtggcagggggggcgctggagcccctagggcgcccctgccctgccccacctgcggccgcctcttccgtttcccctactacctctcccggcaccggctgagccactcggggctccggccccacgcctgcccgctgtgccccaaggccttccgccggccggcccacctttcccgccacctgcgcggccacgggccccagcccccgctgcgctgcgccgcctgcccccgcaccttcccagaaccggcccagctcaggcgccacctggctcaggagcacgcgggcggcgaggtcgagctggccatcgagagggtggccaaggagacggccgaacccagctggggcccgcaggacgagggctcggagccgcccaccaccgctgcagcaggggccacggaggaggaggcggtcgcagcgtggcctgagacgtggcctgcgggggagccttccacgctggctgcgcccaccagcgccgcggagccccgggagtcggagtcggaggaggccgaggccggggcagcagagctgagggccgagctggcgctggcggccgggcggcaggaggagaaacaggtcctgctccaggcagactggacgctgctgtgtctgcgctgccgcgaagccttcgccaccaagggcgagctcaaggcgcacccgtgtctgcgccccgagggcgaacaggaaggggaaggggggcccccgccacgccccaagcgacaccagtgctccatctgcctcaaggccttcgccaggccctggtccctgtcgcgccaccggctggtccactccaccgaccgccctttcgtgtgcccagactgcggcctggccttccgcctcgcctcctacctccgccagcaccgccgcgtccacggccccctcagcctgctggccccgctgcccgcggcgggcaagaaggacgacaaggcctcgggtgcacggaactcagccaaggggccggaggggggcgagggggcggagtgcgggggtgcctcggaagggggagaagggcagaacggaggcgacgccgccccggctcggccccccgccggggagccccgcttctggtgcccagagtgcggcaaaggtttcaggcgccgggcgcacctgcggcagcacggggtgacccactcgggagcgcgccccttccagtgcgtgcgctgccagcgggagttcaagcgcctggccgacctggcgcgccacgcacaggtgcacgcggggggcccagccccgcacccgtgcccccgctgcccgcgccgcttctcgcgcgcctacagcctcctgcgccaccagcgctgccaccgcgcagagctggagagggccgccgcgctgcaggcactgcaggcccaggccccgacgtcgccgccaccgcccccgccgcccctgaaggccgagcaggaggaagaagggctcccgctgcccctcgcaaacattaaggaagagccgccctctccggggaccccaccccagtccccgccggctccccctgtcttcctcagcgcctcctgtttcgacagccaagaccactcagccttcgagatggaggaggaagaggtagacagcaaggctcacctgcgcgggctggggggcctggcctcctgaccttcgccgccctgccctccgccgctccgcctgagctccccggtttgcagaatggaggagggaagttgaaggagccacctcctctgtctacccacccgtccccttcacgcccttgacactaaggagtggggggccctggactgccccttcctcccccatcgcccgcccccagaacccctgatgctggttaggaaccgctcaccccaacatgtgtcttaaggcaggacgacttggaaaaaaaggcggcggacagttggccagagggatggagactggtggggacgcccccgcctccctgtcccccgtttcacacactggacaccatcacctctttggaactgccagaccctgggggtccccagtgagcaaaggtctgtccttgtccctttgtctgtctgtgaataaatgtgagttcgtgaaatccaaaaaaa

SEQ ID NO: 6396 - DNA, 2702 bp, Homo Sapiens
  NM_152603
gtctttagctctcatggattgggagctgggaaaggaatgagaagacagaagtcagagacaagaagaggctaacatgactgataccactataatttagtggatcagtgtctttcaatgatgtgactgtggacttcactcaggaggagtggcagcacctggatcatgctcagaagactctatatatggatgtgatgttggaaaactattgccacctcatctctgtggggtgtcacatgaccaaacctgatgtgatcctcaagttggaacgaggagaagagccatggacatcatttgcaggtcatacctgcttggaagaaaactggaaagctgaagactttttagtgaaattcaaggaacaccaagagaagtattctagatcagttgtaagcatcaaccacaaaaaactggtgaaggagaagagtaaaatatatgaaaagacatttactctaggcaaaaaccctgtgaattcaaaaaatctacctcctgaatatgatactcatggaaggattttgaaaaatgtttcagaattaatcatcagtaatctaaatcctgcaagaaagagacttagtgagtataatggatatgggaaatcactcctgagtactaaacaagagactactcatcctgaagtcaaatcccataatcaaagtgccagagctttcagtcataatgaagttcttatgcagtatcagaaaacggaaactccagcacagtcatttggatataatgactgtgagaaatcattccttcaaaggggaggcctgattacacatagtagaccttacaaaggagaaaacccatctgtatataataaaaaaagaagagcaaccaatattgaaaaaaaacatacatgcaatgaatgtgggaaatctttctgcaggaaatcagtattgattctgcatcagggaattcactcagaagaaaaaccctatcaatgtcatcaatgtggaaatgcatttagaaggaaatcatatctcattgatcatcagagaactcacacaggagagaaaccctttgtttgcaatgaatgtggtaagtccttccgcctcaagacagccctcactgatcatcagagaacacacacaggggagaaatcgtatgaatgtctgcaatgtaggaatgccttcagattgaagtcacacctcattcgtcatcagagaactcacacgggagagaaaccatatgagtgtaatgactgtgggaagtccttccgccagaagacaacactctctctacatcagagaatccatacaggtgagaaaccctatatttgtaaagaatgtgggaagtcctttcaccagaaggcaaatcttactgtacatcagagaactcatacaggggaaaagccctatatttgtaatgaatgtgggaaatccttctcccagaagacaacccttgctcttcatgagaaaactcataatgaggagaaaccctatatttgtagtgaatgtggaaagtccttccgccagaagacaacccttgtagcacatcagagaacacatacaggggagaaatcttatgaatgtcctcactgtgggaaggcctttagaatgaagtcatacctcattgatcatcaccgaactcacacaggagagaaaccatatgaatgtaatgaatgtggtaaatcattcagtcaaaagacaaatctcaatctacatcagagaattcatacaggggagaaaccctatgtttgtaatgaatgtgggaagtcctttcgccagaaagcaaccctcactgtacatcagaaaatacataccggccagaaatcctatgaatgtcctcagtgtgggaaagcctttagcaggaagtcatatctcattcatcatcaaagaactcatacgggagagaaaccatataaatgtagtgaatgtggaaagtgcttccgccagaagacaaatcttattgtacatcagagaactcacacaggtgagaaaccctatgtttgtaatgagtgtggtaagtctttcagttataagagaaacctcattgtccatcaaagaactcacaagggagaaaacattgaaatgcaataaatgatgtggtttcttatatgaattctttacaagctgttgtaaacatttagttttaaaaagaaaagcatgctgaaacatgttaatgtaattttaaatcacaagtctaataattattaaagtaccatacggaataactgtctactgtttactagcatataaaataagtatgatcattattattgaactctatcagctatgaagctaaattttaaagtcaactgctcttcctactgactcaaatagtttattttttaaaaatacttatataatacatgcagagacaagatacacaatgattataagtattaatctccataagagaaaatatttatgaactatatttctcattgcactctgtaataaaaagcagttagttgttacttacctaagagttaccacttccgtagcctataacatcaaaacgtagtttttgcatgttttcaattttataaatatatattttatcagacatcatgaattattttgtgtcttgcttatttcactcaattttttaagatctgtacattattgcatgtggcagtagtgtattttcattttgcatactattccattttaagaatatattgctgtttatcctattgatggatatttgtattttttatacttttgtgtaataataaaaatactgctgtaaaaaaaaaaaaaaaa

SEQ ID NO: 6397 - DNA, 3151 bp, Homo Sapiens
  NM_152606
ggccctagcggcttggcggagctggagccctccctggcagtgcgtcggcgctgggctatggccccctcctctccgggggatcgtcgccttggtcccccgaccctaggagtcgggcagggcagaaccaggctaaagaaacgtccagcgtagcttcaaggatgcaccgcgtgatccctatcggatctccccgacgcgtcaggcctgcctagacggtgctgggagcgcgtctccttgaacgttgtcccgcctgggattgcgaggcttctcagaactttgcttctccagcagaataatcctgcggaagactgagcagttcttgtgagtgtaaaaccatggcccatgcattggtgacgttcagggatgtggctatagacttctctcagaaggaatgggagtgcctggacactacccagaggaaattgtacagagatgtgatgttggagaattataataacttggtctcactgggatattctggctcaaagccagatgtgattaccttactggagcaagggaaagagccctgcgtggtggcgagggatgtgacaggaagacagtgccccggtttgttatccaggcataagaccaagaaattatcttcagaaaaggacattcatgaaatcagtttatccaaagagagtataatagaaaaaagtaaaactcttcgtctgaaaggatccatttttagaaatgagtggcagaacaaaagtgagtttgagggtcaacagggacttaaagaaagatctatcagtcaaaagaaaatcgtctctaaaaaaatgtcaactgatagaaaacgtccctcttttactctgaatcagagaattcacaatagtgagaaaagctgtgactcacacttggttcaacatgggaaaatagattctgatgtgaaacatgattgtaaagaatgtgggagtacttttaataatgtctatcagcttactctccatcagaaaattcatactggtgaaaaatcctgtaaatgtgagaaatgtgggaaagtttttagtcatagctatcaacttactctgcatcagagatttcatactggtgagaaaccctatgaatgtcaagaatgtgggaagacctttactctttacccacaacttaatcgacatcagaaaattcacactggtaaaaaaccctatatgtgtaagaaatgtgataagggtttttttagtagattagaacttactcaacataaaagaattcatactggtaagaaatcttatgaatgtaaagaatgtggaaaagtttttcaacttattttctactttaaagaacatgagagaattcatacaggtaagaaaccctatgaatgtaaggagtgtgggaaagcttttagtgtatgcggacaacttacccgtcatcagaaaattcatactggtgtaaaaccctacgaatgtaaggaatgtggaaagacctttagacttagtttttaccttactgaacacagaagaactcatgcaggtaagaaaccttatgaatgtaaggagtgtgggaaatcatttaatgtgcgtggacagcttaatcggcataaaacaatccatactggtataaaaccttttgcatgtaaggtgtgtgagaaggcttttagttatagtggtgacctcagagtacattctagaattcatactggagagaaaccatatgaatgtaaggaatgcgggaaagcctttatgcttcgttcagtccttactgaacatcagagacttcatactggtgtgaagccctacgaatgtaaggaatgtgggaagacctttcgagttcgttctcaaattagtctacataagaaaattcatactgatgtgaagccctacaaatgtgtacgatgtgggaagacctttagatttggtttctaccttactgaacaccagagaattcacactggtgaaaagccctataaatgtaaagaatgtggaaaggcctttattcgtagagggaatcttaaagaacatctgaaaattcattctggtttaaaaccctatgactgtaaagaatgtgggaagtcctttagtcggcgtgggcagttcactgaacatcagaaaattcatacgggtgtaaaaccatacaaatgtaaagaatgtgggaaggcctttagtcgtagtgtagaccttagaatacatcaaagaattcatactggtgagaaaccctatgagtgtaaacaatgtgggaaggcctttagacttaattcacaccttactgaacatcagagaattcacactggtgagaaaccctatgagtgtaaggtatgtagaaaggcctttagacaatattcacatctttatcaacatcagaaaactcataatgtaatttaatataagaaaaggtttccatgtcatgctctatttatagaatatcaaaatatttatggccagaagttctgtcaatgtgttgatgtttttttacacatattaacttaataaatgtatgagtcttaaatacctcttagttctcattaaatttaggaaaattcacactagaaaataaagctgttaatgtaacagttgtggaaaagtgttctagcaacagcatatacttatcatcattgcctttccactactctactatctgtgtgatattagacaaaatatttgcttcttggtacctcagctgtaaaatgaaacacacctaaaagtgtggttgtttccaacatgtataatacagcaacaactatctggcccaaactgctttggattaatattggatattactgtttttattatcatcaacattattattagtggatttcttaataggaagatgcaatggagatgacaaatttggaaaaaccactcatcacttacatttcatgaagtacttctttgataaaatctgttatgggctgaatgtttgtgttcccgtaacaattcctatgttgaaacacgaatcccaaggtgatggtatttgaaggtagggcctttaggaggaaattaggtcatgagggtggagccttcatgagtggaattactgcctttataagaagaagccaaagagccagctagctctttcaaccacatgaggttacagcaagaagtcagcagtctacagtgcaaaagagggccttcaccagaacccaagcatgctggcaccttgaccttggactttcagcctccaaaactgtgagaaataaacctcagttgtttataagcca

SEQ ID NO: 6398 - DNA, 4029 bp, Homo Sapiens
  NM_152608
gagttgcggcgcctggtgtctcagagaggcttgaggttcgggtagtcggtgacatggcggaggccgcggcgctggtgtggattcgcggccctggcttcgggtgcaaggcggtgcggtgtgcctcgggtcggtgcaccgtccgggattttatccaccggcactgccaagatcagaatgttccagtggaaaacttctttgtgaaatgcaatggagcactcattaacaccagtgacacagtgcagcatggagctgtttatagtttggaacccagactttgcggtggaaaaggaggttttggatctatgctccgagcacttggtgctcagattgagaagacaaccaatcgagaagcttgtcgggatctcagtggaaggagactacgcgatgtcaatcatgaaaaagcaatggctgaatgggtaaaacaacaagccgagcgagaggctgaaaaggagcagaagcggctggagcgactgcagcggaagcttgtagaacccaagcactgcttcaccagccccgactaccagcagcagtgccatgagatggctgagcgtctggaggattccgtcctcaaaggtatgcaggctgcctccagcaagatggtttcagcagaaatcagtgagaatcggaaacggcaatggcctactaaatctcaaacagacagaggagccagtgcgggaaagaggagatgcttctggttgggcatggagggactagagactgcagaagggtccaactctgagagttcagatgatgacagtgaagaagcaccaagcacttcaggaatgggtttccatgctccaaaaattggtagcaatggtgtcgagatggcagccaaatttcccagtggttctcagagggcgagagtagtgaatacagaccatggatcaccagaacaactgcagatcccggtgactgactctgggaggcatattttagaagactcatgtgctgagctgggggagtccaaagagcacatggaaagcaggatggttacagaaacagaagagacccaggagaagaaggcagagagtaaagaacccatagaagaggagcccactggggctggactgaataaggataaagagacagaagaaaggactgatggggaaagagttgctgaggtagcacctgaagaaagggaaaacgttgccgttgccaaactgcaggaaagccagccaggaaacgcagttattgataaggaaactatagatttattggcgttcacctctgttgcagaactggagttgctgggtttggagaagctcaaatgtgaactgatggcccttggactgaaatgtgggggcactctgcaggagcgggcagcaagactcttctctgtcagaggactggcaaaggagcaaattgacccggctttatttgccaagcctttgaaagggaagaaaaaatgagtatcatcagagctgattcctatttgtttatagtgtctaccatttacaacctgcataatgtggactcttgaccagtattcctgttgatattaaaagctaactttttagtaacccaattctaactatcccctttttccttgtcagggctgtagaattaatgtctgaaaccatctgggccttaaattttctttgtctggttttctatagtgtatttaataaatatagggctattcacattttttggtttgatcttggtgtcatttaggtaatgaatctatccaagaaatctatccttttgacccaggttatcaaatttgtagacataaggttatttataatggtcccttcttacccttttaatgtctttaggagctgtgttgataatttccttttcattatgatactggtaatttctgttctcactttcctaatcaggttgggtaggggtttatcagttttactgatctgactttttattttattttattttttttgagacagtcttacactgtctcccaggctggagtgcagtggcgcgatctcggcttactgcaagctctgccttccgggttcatgccattctcctgcctcagcctccccagtagctgggactacaggctcccaccaccacgcccggctaattttttatatttttagtggagactgggtttcactgtgttagccaggatggtctcgatctctttacctcgtggtccacccgcctcagcctcccagagtgctgggattacaggcgtgagccaccgtgcctggccgacgatataacttttaaagaaccaacctttggttttatttttctcaattgtttatataattaatttctgttattttctttcttctatttagcttgagtctcctttgatcttttttctttagttccttaagataagccttaggtcattgatcttagacgttatttaaaatacatatttaaagctatacattttcttttaagcattactttagttgcgactttacaattttattatgtcgtatttttattattcagttctaattttcttttttttttctttttgagatggaatttcgcttttgttgcccaggctagagtgcaatggtacgatctcagctcactgcaacctctgcctcctgggttcaagcgattctcctgcctcagcctcctcagtagctgggattacaggctccagccaccatacctggctgatttttgtatttttagtagagatggggtttcaccacattggccaggctggtctcgaactcctgacctcaggtgatccacccactttggcctcccaaagtgctgggattacaggtgtgagccaccatgcccagcctctgattattttctaatttcctccctcagttcttctttgacccatggattatcagaagtgggttgtctgatcagcaaacatttgttttttttcctcttaatatcttcttgttgctgatttctactttaattccattgaggtcagaaaatatcctctttatgatttcaatcctcttagttttattgagactcgttttatgacccaatatgttgtctgtcatggtgagtgtaccatacacagtttaaaagaatgcgtattttaggccaggtgtggtggctcatgcctgtaatccagcatgagattacatgctgagattacagctgtaatctgtaatttgagaggctgaggtgggaggatcatttcgagaccagcctgggcaatgtatagtgagaccatgtctctaagaaaaacaatatgtaatttgaattgttgggttaatatgttttgtaatatcgatgagattaagtggttgatagtattgttcagatcttctatgtctttactgatccttttgtttatttctatcaggtgctgagaaaggatgttaaaatcttcaattatgattgtggaattgtctatttcttaaattctaccagtttttgtatgaagctctaataacttatgtcttcctaatgtattgaccattttatcattatgaaatttccctctgtctctggtaatttgggtttgaaatctactttatcttatgtgaatatagccactgcagccttcttaagcttagtgtttgcacagtatacctctttctattaatttactttgtgcttctgtgcctatttaaagtagtttctttaaacaacatatacttgagacttgcatttttatctgttctctctgtatcttttaataagtttaacattaaatgtaattattaataggtttctaatttacatgtttcctgtttagataagattattttataattgtattttaatttattggctctttagctatactgttttaataatttttttaagttggatgttctagtgattacaatatacattcttaatttttcagtctacctagagttgatgtgccacttcacataaaatgtagaaatcttgtaagtatgtacatccatttatcatacctgtcttttatgctgtagttgtcatacatattaaatctacatatttaaatattgtaagtcctgtcataagttacaatttctgctttaaataatgatatgtattttaaagaaattaagaggaaaaaataaaatcttttgtatttattcacataaaaaaaaaaaaaaaaaaaaa

SEQ ID NO: 6399 - DNA, 5233 bp, Homo Sapiens
  NM_152609
cgaggattgtgagtggaccgttgaggagagcgaccgaccatccggctggtgtccggactcgtactctatggttgtccgcgctctgcgcttcctctctagccgccagtgctctatgctccgcggtcgcgggccgccagcctccagccggccagccgcgaggggtgcgcagagggaggcggggcggaaaggcgagaggtgtctcctccaccggagccaggggagacccgagcaagctccgtgacagcacgtcggccgccatgtcgccgagtggggctggaaacagacccggcgcccagcggtagccctccttgcgcctccgattcccagacatggaaggtctttaatgtaactttaaatggttcaccaaaggatgctctaatggatgacagcgatactcctacatattatctgcaaatagaaccacaagatggatgtcatcctggtgacagcgtggaaaggagtgtgacctgtctgccttctgcatcagatgaaaatgaaaatcagcttgacggggacgggcatgagcatctgaccagcagtgacagtgcgatgggaaagccccaagtgtctgagcaggacagtctcaataataatgaaagctgcacattgagctgcgaggtggctgcaggtgagaacttgcaaaacaccctttgtgaagcctccagagatgaacaggccttcttgggaaaggacaaaaaaattcctggaaaaagaagtccaagaagcaaaaaagggactgctaagaagataccaccaggacttttttcaggagatattgcacctttaatgcaagaaaaagtactaagcgcagtcacatatgctgttgatgatgaagaagctgctgaagtaaatgctaatgagcagccagaggcgccaaagcttgttctgcagtctctgttttcacttatacgaggtgaagttgagcagttggattcaagagcacttcccctttgccttcatcagatagcagaatcctatttccaggaggaggactatgagaaagcaatgaaattcattcagctagaacgattgtatcatgagcaattgctcgcaaatctttctgccattcaagaacagtgggaaacaaaatggaaaactgtgcaaccacatacagttacggctctaaggaattcagaaaagggatttaatggtgaagattttgaacggcttacgaaaatttgtgcaacacatcaagatcctcttttatccaaacataagatagcagctgtggagaagtcccaggaaaggaaatgctccacgcagttactagtgtctgaagatccaaaggaaggaggagctaccaccaaagagtcagagagtaaaacttgtctcggcacagagtcaagtaaagaaagccaacatacagtggagcccctggggagcagtccctgctgtcatcagatggacgtgcaaacagattccccaagcctttcggtaactgcaggaaaggaccacatggaggagctgctctgcagcgctgaagccacgttagcgctccacacccagtcctccgagacagcagggagcccgtctgggccagactcttctgaggatgcttgtgaggatgacagtcgcttgcagctggctcaaacagaggcctgccaggatgtggccagaatagagggcattgctgaagaccctaaggtgtttctttccagcaagtcaaagacagagccgttgatttcaccaggctgtgaccgtatacctcctgcattgatttctgagggtaaatattcacaggctcagaggaaagaactccgtttgccacttcgggatgcttctgaggcgttgcccacagaccaacttgagaacaatgaattaaatgagctgcagcagcctgatcttacagacagtgatggaaaatcaccacaggcgcaggctgactcagacggttctgagaatgtgctctgtggaaataatcaaatatctgacttaggcatactgcttccagaggtgtgtatggccccagaggaaaagggagataaagacgaccaactcaacaaagaaacagaagactatttgaacagccttttagaaggatgtttaaaagatactgaagattccctttcctatgaagataaccaagacgacgactccgatctccttcaagatctctctcctgaagaagcatcctatagtctccaggagaatctgccttctgatgagagctgtctttctcttgatgatcttgccaaaaggatagagattgcagaggttgttcctactgaaggattggtctccatattaaagaagaggaatgatactgtaggagatcatcctgcccaaatgcaacacaaaccatctaagcgaagagtgagattccaagaaatagacgatagcttggatcaagatgaagttggaggtggctcctgtattttgctggtcttgctgtgcatagcaacggttttcctcagtgttggaggaactgcattatactgcactttcggtgacatggagtcacctgtttgtactgactttgcagacaacatggacttctattacactaagttacttcagggagtggcagaactgaagcactggatctacctctcctagcagcattccagacacagacatgctggcagtgagagtgaaaggcgggagactttctaaacagtttttctttcaggaattctgtagcattcccccttccctctgttaggaaccaaggacatcagaaatagcaactttaagtggcaagccggaggaactctgttagaataatccacacagtgaggcaaatatcaatctaagcattgtggatggaaggaatggtctttggagagagcatatccatctcctcctcactgcctcctaatgtcatgaggtacactgagcagaattaaacagggtagtcttaaccacactatttttagctaccttgtcaagctaatggttaaagaacacttttggtttacacttgttgggtcatagaagttgctttccgccatcacgcaataagtttgtgtgtaatcagaaggagttaccttatggtttcagtgtcattctttagttaacttgggagctgtgtaatttaggctttgcgtattatttcacttctgttctccacttatgaagtgattgtgtgtttgcgtgtgtgtgcgtgcgcatgtgcttccggcagttaacataagcaaatacccaacatcacaaagatgatctttcttcttttaacttgatgatgatgtgcaggcacaaatctttggagaaggcttaactgtggaatagatgaattctagaactcttgaccctgcaatgagaaactgtgacagatctgtgtcaattaacttgattagccagaaattaatcacaggcctagagaccaaagaaaaagctcccctgagtctcaggcaacagttttgtcacggatgcaaagcttcctgaaatcatgaatgctggactcagtttggcaaacgcttacacctattatgttctgagattctgagaaccagaatgcaaacttaagtaagatacagttcccactgtaggtgttttaatcctggtcttatatagaataaaccagtactttgctgagtgaaatcaccatatagaattcagtattaacagatcatgcattcagatgcttgaatgtgcattcttgttgtgggcttgatttagatcctattgcggggtcattacgcaaaaattcaatcataccttccatagacaaatgtctgatttttgtttaaatctgtccgttaggtggcctttccttatctgaggtgtagtggtctaacatttaggaagccttgctttgactttatcgggcagcattaaaaaaaaaacaacaaagaaaaaccaaacatgaattatagtttttaacaagtgatctttatttcctgtcttctgttaggatcatttgaaagaaaaagggagaacttactttctagttgttactggctggcacagtacctccctttgtgtttctgcttatttatttagattatgtgaatcttaaagggctttttatatcagttgaaagtgtgttactgcgcatgcatttggtgattccagtgctagatatttaattactgtgtatttagtgttttgattttctataatttcagttccgcgtgtttttacacttgttcattttaaattgatgtttcattttcacttataatactgtttgacttgtctctatcatgtcaccataaactgtaatattttcaagggttatagatcaaagatatttatttagaaatgtacaagataatgaaatttagattccttatacttaaggctgattttattagaagattattttaatgttctattataaattttaagaatttgtattcaaattgtatgtaaaatatgtaaaatgttgacggtactatattaagtggttctataaaagctattcacaagttctactgtgatggacatcctcatcatagacaaacctcctctgttttatcctcaatttctagttacagaaatttggtgatgcttatttttgccaattttatgtcaaaataagttaaaacttccctcctgttcacctcttgggtctctatcctgtgtaacctctggtgtagtatttgcccataggcaaccagagccacttcctctgaacccaacatctcctggggaccttcgcagcaagaggaaagcactgagacaatagcttgctaagcaggggcccagtggtgtctcagagaaaccatgggtgtcctcgccacttcccagggagggtgaggtgagctcgggaacataacgatgttttgacttacaataggcatgaaatcgcaactagaaaaattagggcagtttttaaaaatgtcatagttatctattgcatgaactggagtaattccacctggtggtgaaaggattgttatttcacacatgaaaaattcatccagttttactaaaatgtaattttttctgtcatttgaaagtactgacaactatttgtaactaatcttccttaagaactgtatttgagggtatcaaatcaagcttgtaatttaaaatctgtaccaacaaagtgtctcagagagtttatttgaaccattgggtgctgagaaaaaactgctttaaagtgaaactttgatttcagaagttgatctggccctacaagtagacagtcatctactttgggaagactaataggtccttaggtaacggctcttctgctttaaaatacctcccccatctgctgacagtagctgaagattattctaaacattcattcttttagatttaaaaataaaaatcttctggagga

SEQ ID NO: 6400 - DNA, 1956 bp, Homo Sapiens
  NM_152615
attgttatcaactctttgatatctgatgatcaatgctccaaagaattggattaatatttttacacaatattgttgtagtcagtaactgtttctatttccaggcatttttagatgaattcactaactggtcaagaataaatcccaacaaggccaggattcccatggcaggagatacccaaggtgtggtcgggactgtctctaagccttgtttcacagcatatgaaatgaaaatcggtgcaattacttttcaggttgctactggagatatagccactgaacaggtagatgttattgtaaactcaacagcaaggacatttaatcggaaatcaggtgtgtcaagagctattttagaaggtgctggacaagctgtggaaagtgaatgtgctgtactagctgcacagcctcacagagattttataattacaccaggtggatgcttaaagtgcaaaataataattcatgttcctgggggaaaagatgtcaggaaaacggtcaccagtgttctagaagagtgtgaacagaggaagtacacatcggtttcccttccagccattggaacaggaaatgccggaaaaaaccctatcacagttgctgataacataatcgatgctattgtagacttctcatcacaacattccaccccatcattaaaaacagttaaagttgtcatttttcaacctgagctgctaaatatattctacgacagcatgaaaaaaagagacctctctgcatcactgaactttcagtccacattctccatgactacatgtaatcttcctgaacactggactgacatgaatcatcagctgttttgcatggtccagctagagccaggacaatcagaatataataccataaaggacaagttcacccgaacttgttcttcctacgcaatagagaagattgagaggatacagaatgcatttctctggcagagctaccaggtaaagaaaaggcaaatggatatcaagaatgaccataagaataatgagagactcctcttccatgggacagatgcagactcagtgccatatgtcaatcagcacggctttaatagaagttgtgctgggaaaaatgctgtatcctatggaaaaggaacctattttgctgtggatgccagttattctgccaaggacacctactccaagccagacagcaatgggagaaagcacatgtacgttgtgcgagtacttactggagtcttcacaaagggacgtgcaggattagtcacccctccacccaagaatcctcacaatcccacagatctctttgactcagtgacaaacaatacacgatctccaaagctatttgtggtattctttgataatcaggcttacccagaatatctcataactttcacggcttaaaaatatttttatcatcaaagagatgatttaagtcatctgtaagaacaacatgcaatctttgtctttgcttctggcctgtgtaagcagatgaaagtttcccttttaggtgccaaaatgctgaaaattacctttttaaagtgctctattgctgcgatttgtagcatacctttttttctcagcaaattgatgggtggaagctgagaaatgtatggtaaatgtcacagagctacaaccattcacagacaccaaatctctaggagaataaaaagcacattattctttttctatcagaaaaaaacaagatgcatcaccttaaaaccaagatgacattgttcttcttggaacatgttaagacatcgaatggtggcgggttaaactgtactgcttaagtggagcggctaccgttatgcatctatcacagttggggattttgccttattaaggaaaacttgtcaatagttcagctgaaatgactgaatcacagaatattaactctgttatggaacaaatcataacagattttacctgtttacatttcaggtaaaaatgtatcgcattgttatctaatattaaaaaattacccccaatt

SEQ ID NO: 6401 - DNA, 6246 bp, Homo Sapiens
  NM_152621
atccactgtgaaatggagtttcaaaatcacaagcttctttcccacatgaacataagactaggagcacatatggaagagtaaagttgaagggaatttggatgatgatttggcaagatgctgtaagtggattaggcaaggctgctaaagagagacaggaaatggctgtgttagtgcttcggacctccgttagaagtagcagttcatggtgttgaaggtttgttgttgaaaataccttcctgaggcacctcttcattgtgcttattcttcccacaacattgtgccaagacactgtcaagcctgggcctgtcaaagcctgggatgtcaaaggcctgggtctttctcatcctgctgtaatgtattgatagctgggggctctgcagaaggacaagggaaaggtgggatagtaacatctttttgagggaagaattggcttcctttcttgaaagtggtgaaggtacagcatatagctgcatggaagaaacagtaatcggatggctaccttctacattttgtattaggaaacaaagtccattgtaagagtccatgttgatcttggaaatagaaggattgaaaaaagctaaatttccacaaagaacaagaacttgaccatctcctttttgatctgaagactaggggacaatggatatcatagagacagcaaaacttgaagaacatttggaaaatcaacccagtgatcctacgaacacttatgcaagacccgctgaacctgttgaagaagaaaacaaaaatggcaatggtaaacccaagagcttatccagtgggctgcgaaaaggcaccaaaaagtacccggactatatccaaattgctatgcccactgaatcaaggaacaaatttccactagagtggtggaaaacgggcattgccttcatatatgcagttttcaacctcgtcttgacaaccgtcatgatcacagttgtacatgagagggtccctcccaaggagcttagccctccactcccagacaagttttttgattacattgatagggtgaaatgggcattttctgtatcagaaataaatgggattatattagttggattatggatcacccagtggctgtttctgagatacaagtcaatagtgggacgcagattctgttttattattggaactttatacctgtatcgctgcattacaatgtatgttactactctacctgtgcctggaatgcatttccagtgtgctccaaagctcaatggagactctcaggcaaaagttcaacggattctacgattgatttctggtggtggattgtccataactggatcacatatcttatgtggagacttcctcttcagcggtcacacggttacgctgacactgacttatttgttcatcaaagaatattcgcctcgtcacttctggtggtatcatttaatctgctggctgctgagtgctgccgggatcatctgcattcttgtagcacacgaacactacactatcgatgtgatcattgcttattatatcacaacacgactgttttggtggtaccattcaatggccaatgaaaagaacttgaaggtctcttcacagactaatttcttatctcgagcatggtggttccccatcttttatttttttgagaaaaatgtacaaggctcaattccttgctgcttctcctggccgctgtcttggcctcctggctgcttcaaatcatcatgcaaaaagtattcacgggttcagaagattggtgaagacaatgagaaatcgacctgaggagcaaaacaaaggcatcagctcttacaccaaaagagttaacgctgtaaccaaaggtatagttttgttttttattttaggagaactgactggtaaatgaagaaatggaccaaattttgtgtaaacgattagaaagatgaacaaagtattgccctttgactggttttcttcttcatcctgagaaagatacattctcttgcagctcttcattcattggtgacaagcccccaccccgggactttactaatgagcttgttaaagaggtgccaaagaacatattcctcctttctttattctttctccaccaaaaccctctacttcagaattttttcaggatatttttcagcccaaggtcagaagaatgtgttaatattttaaataaaatatctggacatctacagccactgtgtaaatagaactgcctaatgttgagagtggtttttagcattaggtttagcaagggggagatccgtgggttgtgcgtcagctttgggtgaattttgtttctaccctgtcacggggaaagttcgggttgagtccaggagtgcacactgctgctgccacccaatgcgctacatatcacttttttttgttttgttttgttttgtttttaaaagatcattttatcttaaaaaggaaagctgatccaagtaaacacgaaagtatttgacacaccccacagattttacatgtgtgtaaatgtttcactttaaaatctctatgacagatacacaggaaacatgagatggtttctgctaatgagtggcccttgagtacacacttagatgctgtctgccctgtaaatttggatctggtgccccagggcagtcaactcttctagcacaggctgaaaacacgtgtgtgtcaactgaggttcacaccacttggggaatgagcctgttttctttccaggtcaggccctggtgtgagatcaattttagggctcctaattggagcacagaaatgtatttggtcaaatttcattgaaggtgatttcttcctttttctgttgtactttatggaaaaaccaagatggaacctgaaagttaatgtatccttgcttttagcaagagactcagtttcttataactagtcctaaggacatatgccgcaattgagtaattttacttttaccctatgaaaataacatggtgctgcactataatatactctcggaatcagtgtgttagttacagctatacagtgaagggggataactgtttctaaatttctttaaggtgatgccaaaaaatggattaaaaaatctgatcagatttaatgttaccagatttagtgcattatttaatgctattggatcttttggataattcttggcttaatttcttagctacttgaaggttaatttgcaagacttttaaaaccttagaaaagttttaaggttgcaaagttatcaacactggggcagagggtggagaggccaatgcgggtagaaggaggcagttatgtttatattgaaggtgaaatttttctttcatttagaatggaaaacatccccaaatgtatcattataaactagtcagccttgactacacaaaattgacctttaagttgcttgagaaaaacacaatgcaaatcgttcagaagggtcaacatcctttggtgctaaaatcttgtgtatgttttcagaatggctttttctgtatgttatagaataatcactaaaggaaaggtagttgaatttaaagtcatgaagcaagactctttaattcagttattttaaacaagaattaaaaccccaaacatccttggcaggctttgaagcacacagaattttctagtatttcttattaaatacaccaataataaacatatacttagtttacctgatgagtttagacataattctatataatgttcgcttatattcatttattaactagcaacacttgtgcaagaacaaggtattctgcttgaaaacactgatttttaagttcctgttgcccgattgtaaagaaaatcatctgacacagaagcctggattttgctctcctaacactggtgttttccttgagcctctaattcaaataaaacaaactgatacaccttacagccttattcatctgtgtctggataactcacttttcatctattgaataagaaaaagtgtttaaacttaataaaataaaaaattgtgcaccaattactacagatccttgaaacagtaagccttggattttagtcaagtaatccagtttttttttaatttaaaaaaaaccatcaccttttaaagaactttaaaaacacctgtgatgccaatgtggacattgccgctgccatgtctttacacgcatgtgtcgtatagctctgtcatcgagttgaggaagtccatggtttgcaaataagggtgggggaatcaaaatttcaagatggaaaaataaaacaaatagtaaaacccatttacatgtaggaaagaaaagttgagcttcaacccaatgtgccactttgatataaaacaagtatgatatatatataaactgaagatataaaacaagtatgatcttgcctttgaaatcataaatgtttggggtacctgttctttgccagttaagatacatatcttattatctttgtttttttcaagtctatgctcctgtttgaagcttttcctgtaatttaggttgtctgtgaaatacctataacatataattcctatagagtatgccacattttttttctaactcatttcaaatgaaattctctcagattctagtttttgagcttgtccactagatctgaaaataaagcatcctttcctgagtccacttgaactaattgtgaatttgttacttaatttactggcatcttgggaaacaagttttgctgtggcaggaaggctgttttgagagtgagcgttgagtctactctggtttgtggatgacattgcattagggttatttcctgtattaccagtgcccccttgtggcaatatactttatgacttggaatgcaaacaccacttttaaaagcctgttttcaagtttttgaaaggcatttgttttctgttgtttgccaataatctgaaagtatcatgtgaaaggaattattttaaaagcattttaaacctttcccaaaggtaaaatgtgctcagattataggcacttgtaattctaaccttgtatccatttgatcaaagaaaatttgtagaacatttttacctctcatgatcacaatcattagtgtctccctttataacgacctatgttttgtttactttgaaacaccaaatttgttgtcttggttttttttacatgacagaactcatgcagtttcttttttagttgaaagttcacatcttgccccttgaatagtttgaacatttctttcttaattcttttttgtttttgttttgcactgtaaaactgatgaaaactttaagccaatcttaatgcactagcctctgtagtgtaaggaagtgtgagaaggagtttcttaatgagtttacacgtttaaatcaagcatattataagttatatgccatgtgttgaaggcttttctatttatatatataaagatttttagtatttgtttttagtgtccttgtgttgcaataatttaactcctttgactcagttgctgaaaatatttcttctattaagaagtgctcttgacttcaacacccaaacactgaaaatcatgtcaatgttacccaaagataagtttttatacagatacacaccttataagttctgatttattttcttactcattatgctgtgttctaaataaatcatgaatgagaagagtgctttattgtgaaattatttaaaactgtcctttaaaagaaaaagaggaaacgatgaacaaaaactaatctaattgccaagttagaattcattatttaatttacctcctatgcaatgattaatgctgcaaaatgtatggttatgttaccgtatattcacaaaagaaatattattacaaggtttcagaggtagccaattgcattcttttggaaatttactgtactgtttcaatgtgttaagtgccttgttgtaaagtaaaattttaagtctagattcattattttcctgacatatatttttcattatgatatctactgtatgctattgtgatagttttatgaaatgcttacattttaatcaaatatgtaaatttcagaagctcttttttcctacccaccagtaccttaatcattggtttatcacattggattcaaattcaggttccttttttgataaagaggaaatttgttttccatgcttgtgattttgtgtttgtaaacatttcaggaggaatttaggagtgtaactatagtttatacttctataatgttgtcttacatttacatttttaagtgcctaattgttaaaactgatttatgtttctcttctaaagaggatatgtgtacttggtttctaatctctttggttttgctttttaaaaaatgcaagagcctatactttgtatttacctaataaaccacagtgacatcaacagtcttttcaaaattaaaaaaaaaaaaaaaaa

SEQ ID NO: 6402 - DNA, 8947 bp, Homo Sapiens
  NM_152624
agtcttggggtccaaggctgagggagcgggacggaagtgagcgggtcccgccccttccccttctcgtctccgttggagtcgtctctgccgcggcttcctcggctgccagctctccggcgagccggagtcctagtgccgtaccgtcagtccccggccgcgcggagccgggatgcactgttcctgctgtgggtcctcatcatggagaccaaacgggtggagattcccggcagcgtcctggacgatctctgcagccgatttattttgcatattcccagcgaggaaagagacaatgcaatccgagtgtgttttcagattgaacttgcccattggttttacttggatttctacatgcagaacacaccaggattacctcagtgtgggataagagactttgctaaagctgtcttcagtcattgtccgtttttgctgcctcaaggtgaagatgtggaaaaagttttggatgaatggaaggaatataaaatgggagtaccaacatatggtgcaattattcttgatgagacacttgaaaatgtactactagttcaggggtacctagcaaaatcaggctggggatttccaaaaggaaaagtaaataaagaagaagctcctcatgattgtgctgctagagaggtctttgaagaaactggttttgatatcaaagactatatttgtaaggatgattacattgaacttcgaatcaatgaccagcttgctcgtttgtacatcattccaggaattccaaaagacacaaaatttaacccaaaaactagaagagaaattcggaacattgagtggttctctattgagaaattgccttgtcatagaaatgatatgacccccaaatccaaacttggtttggcacctaacaaattttttatggccattccctttatcagaccattaagggactggctttctcgaagatttggcgattcctcagacagtgacaatggattttcctcaactggtagcacgccggctaaacccactgtggaaaaattgagtcgaaccaaattccgccacagtcagcagttatttcctgacggttctcctggtgaccagtgggtaaagcacaggcaaccactgcagcaaaagccatataataatcattctgaaatgtctgaccttttaaaaggaaagaatcaaagtatgaggggaaatggcagaaaacagtatcaagattcacctaatcaaaagaaaagaacaaatgggcttcagccagcaaagcagcagaattctttgatgaagtgtgaaaagaaacttcatccacggaaacttcaggataattttgaaacagatgctgtatatgacttgcctagctccagtgaagaccagttgctagaacatgctgagggacagcccgtggcatgtaatggacattgcaagttccccttttcatccagagcctttttgagtttcaagtttgaccataatgctataatgaaaatcttggacctttgatagcagcacatgtattgtaaatgtcccaggatcagagacctgttgaatttgagtgggtgtctcctcaagccttacctttctcaggtgttttaaagaaatgcagggaggcaatgtttctgaagacattttctgtttataagagagtagaaagaaacacgagtttgcactgtaaatgcagttataaccttttatacagatttaccttttcagtgttcagtacaagtttaagttgctttctttgagggcatttattctgtgtgactgtgggttttattttgtattctggttaagaaaataatgtattgagttactgtcaagtagccaagttaatgggaatgctccatctacctgttacagtgattgcaataatagtatattggagtttttcaaagaaacttaaagtaatgcccaattattaaatgaacacaagagctgagatgtcacattcgtcagcattacaggtgatctattttggtggcattttgtacttctctctgcttctaaccactgaggctctctaatcttcctctggagttttagtgaaaggatttattgagcagcttctggaatataatgtgcatgtccaaaatgaactcagcgcttcaaaaggacaaagtctgtagcctggaggggcttgagtggatgggagctgatgctgtgattttgagctgtggttacatgcagtcagtaaacctgtgagactgctggaggaaatgtagcagacagcatggaggctgggacccagcagctactttgggtcatgtctttactgtcctgcctccaaccctttagtctcgtagacttttgttcttgtggaaatttcttctgtattccagttgtgtaaatatgtatggaaaactgatattactaggttttacgttgcatctccagtattgatctttggaaactgatgttacattaggttccaattcgcaatagtagcagagactgacatgcttttattgacctgctaagcccctggatgatggagcgagaagggaaggggtatgcagtttacccaagtccaaataaagcatttcactaggttacacgttatgtatatgtgttacataacagtaacatacataactcactcctaggaatgtattttgcttcaggatttttaaattcaaataaggatggcagtgcccattttaaggaggatttcagctataactgaggacaatcaccagggcgttaagggggctttagtgttttggctgcatctgacctcattgaaggaatttcttgggagtcgggggtgtttgagtatatgtgtgtgtgtgtaactatcatgtgggttttaaaaatccttttttacagtggtatccacaaaatacttctctgcttataaatgttattgtagaaatctttattctgtgtaggtagcctatttaattgggttccactgaacctcatgggacttttaaaagaagggctatttaaggaattcacttggtagtactttgctttagcttttaaatggcttgattttaaaggagaaattctatttattaatgaaagtgtcacccttttggtgctaagcaggagaattcacaattaaagcagtgtgtatagaattatgatattcagaatcctgcatcttttaatgtgacaaatttttgaatcctgtgacttttgctttttaatgcattatatgattgtgtttggaagcttttactgttcttttcagaaatacggctgctttgcttgggtctcttcgagccatatttatagttggtcccagcattccagacttctggtaaattgttaaaggagtgaaaatgtagtttgcctggcagatgaataattttcactcatttattgtcttctggaaaccatttaacttttactgttttttatttttttggtatgtgtttttttttttctttttaagtgcatactttggccagtcttcctggtgcctgtagagttggatttttcagctctcaatactgaagcaaaagagattatagttaccagaagtatggcctctaatggtgttgagccttttcaagaaccaacaaattatctttgtgattacagtagtttaactatggttaaatgttactgctgttgcgctgctttatttaatgcactgtggaacaaaatataagggtactgttggggtgtgattatgataacttcaggcttttagctctcctcaaagtttgaggttaaaaaaatgttaaaagatgtgagttaaagtttatgtgtgtgatgtgacttaactatgcagaaaatatttaagttggatgtacttgttttaggtacatctactatacttattctctcaaacctgggtaatagtttctcagtgttcaggttaccttgagaaaggccatgcttagcgaactggatttctcctttgagaaattttagtatggtttgaggaaatcaagtgataaaggagtatgctgaatatgcaatcatttacttctactgagtgctgcattttaagatgctagatgagaagagtagttggttttgcttcattatgttttatgtctttgagagagatacaggtcttggaattcactttttaaatgttacgttccaaccttatatgttccaaggtgcagtgcactgtgaatcttttatttttaaaaaaatttgtaggtgcttttatgtataactttaatgatttataagatgctaaatgaattgtttttgtacctaaccattgtaatccaaaagataagggtgtggtttacatgcttttcaaaaatttttgttaagaagtagcaaatgaatggtttaggatttcaaatagtgataccctcctgagacatgagcatttggagaggcctgagaacctaatagaactcatatagtgtgagtgaaatttgattaaagatgttggaaaatgaagttggatttttgtattcatgtataaaggaaagtctcccagtgctgtcaaaggaattgtggttactacttgctgttctgagctttgaatatcgttatttttctattaaatatcaattagtaagtatagctaatgaagacatataatgaaagtaattttatgctgtaagattgaattggtacttttccttattaaggctttagtaatttgtatgtaatgtcaaataaaaggaattcaaatctgagtaaataacagcctcctactataggaattagattcttctataaaagtcaccatattgtatcctatagaaaagttaaggtctgagtgcatgtgtgcattaaaaacatttcactacctattctctcatggacttctcatcctttcttttttcatctccaacagttaaatggtaaggagagcaaagttaattataaaaattagacattttgccaagttagttttcttaccacaataccctcttggcttttttttttttttttttgagatggagtttcactcctgttgcccaggctggagtgcaatggtgcaatttcggctcaccgcaacctacgcctcccgggttcaagtgattctcctgcctcagcctcccaagtagctgggattacaggcatgcgccaccacgccctgctaattctgtctttttagtagagacggggtttctccatgttggtcagggtggtctctcttggctttttatctttatttttgtaccagtggaccttcctgctccctgagactgttttgattgacatcttttgtgtttctatattttccgaggcagtattttctttgtatgttaatcatagttatagtaaagtcagactcattaacttttcttcctagtaattttgacttggattattttctagcctgggggatggggttcatatgtgttgttgtaactttagattactaaacaaaacaaactgtttttttgtttgaaggtatcctttacatacctgtctgtaggtaagcaagtgttagtaaaaacaattttgtcaaacagtactcctgacagcttggtaaagtctaggtagagtttctgattttgtattatgtcctaagacttgaaagtgcatttgtctagttgccaaaagttctaaaaatgagatggtgggctttctcagcatctttttgcttcctagaattgagttgctcttgaagtctgtactcctgtgtcagaaagatggcagactgcaaatgggcagtacaggctttgccccatgctttcaaagtaggattctggattgcagtttcaaaaaaatatgatagattattgttatagaatcaaagtgtcctgaagggagaagaatagctatagttgctgggcaaagagtgtaagaaagaaactttagagcatttatcaatacttgagtgctttattatgttccaggctagaaatgtgatcattgcatggcctaagtgtagtcattcatatatatatgaatatctatatctatatctatacatatatatgtatcgccattatcgagtgttttctagccctggataaagttaatttttttgaagtttgattgccaagcaatccagtgaatctaaagtaatttttctcactttaaagaccagtgatgaggagtctggtccttcctgtactgatactgtagaactccagtcaaacttcagtgcactgctttcttacaggaagacaactcagaacacacagccataatctgctttggtgtcagtcacatcacagtggttatacatttgtcctgaatggtgattcattcctttccatctaacttccttgtgacaaatagcatttactattgaaatagtcttaaaatagggaaaagagtgaaagttactcttatgcatgggagtgggcttaaagggttgacttccaccagctgagtacaaacaagtgtaaagaaaaactatgataaagtatggaggtcttgagaattgttcataatgaaatctttaatctgggttatcagagtaatgaaatcaccaataaaaacattccatttatcttggatcttctgtggttagcagaggagtatggtctagctatgttagcagcttgaaggcacaacgtaaaaggaatgagctttcacaaggtgcttacgttagctgggtagtattggtcaaaggtactctgaagagtgaatgcagaaatcagttggctgtgtttgtaatcttgtcccacatggaccctaacctttagtagacttcagtcttttagtccagtagaagacaatggccctgaatatgtgttttctgctttttggtggaaggtttcctgcaggtggttgggtggtttttgggttattggctactgttcgttcagtgccatttgaagacctgttgtttcttaatcctttttcttggtgtgactggccaggaaaaagtccattgagtcctttttttctccctggtgtcttaccccttctgtagaataatccatattttaaaatttgtttcacatctttatagcaaacctgccacagacttgcaagcagtgattttatctttccttcctgagaaggtgatctcacttttgatgtttgggtcacctgtggacacctgtgctcttttgagtctcaaggcttatagctttcacattggcttgggaacaacagacttgtgtgtggttctagagtgaaatgggcagtgttctgctggtcctcagtctttgagaggtcttaggcaacatccttagtatagtggaatttctgaggtcaaatttaacatttaatatattctccttttagttcattgaatctgaggttctaaatctgtagcttcattttgagcacaagtctgcattgtcattttttaagagattggcaggcatatccttttgtgatacttaggaaaagactatggatggcagcaaatgaaagtaaaggttctcaactgtgaatgaaatttagaaagataattcttcagcagttggttgattagatgggttagtgcttttggaatatataacagtagacttgtattctttatgcactatacatatgatacgcactgacagaaaagcacagaagacatactgctaagagtttctttgtgcatttcactactgttctaggggactgctgtctctttggttccttttaggtttgtgttaggatgttgcacaagtaatcatttaatgttaaatgcaagtgtccaaagaaatgagtcttaaagttctttggtcatatttcactttagagttaggacaggagacagctaacctgacttccattttacaaatattagaaactttttcttcagtaacaaaaacagggaaggacaataaaaccatgaactattttgctttatgtctgtttttaaaaaataattgttttgaagtttgcttattagcttaataccttatagtacttttaaaaaatcatccttggtaattattgacttatcctagatccatgtacaattcagacttttatctgttagctttaataaaaatttaaaaccatctcatttcagaataaaataaacggaattacagttcatgcattagcatttttaagtgaagttctcttaataagattgccttttgtctaaccgaaatagggcatacagattagtttggatgggaaagtggtaagacttgactttttaatactgtgcctatttccaaaagaagacttgatgtggctttttacattatgctttaaagatgttaatggaggatacatagtcttaaaacaatttgtttgggagtaagttttagtcggaaaaaggtgaagatatttatgctgagttatgttaagcaaattattttgagaccttttgctggtagacaaaaactgaggaaatgtttcactaaatatattatggtcaatgaaaaaaccagactttagagtaaatgtgataaccaagtagatttgtgaactttatttctttagtaattatttttatcttatgtgaaatgattcaacctttaatttttgcctagattatagcaatgttttgttttaccttatagggcattttaatgcttggagaaagactataagtgaatctacttcaagggattctgttcatggtggtatacagttcttggtgctcttttggaaattgtcaaacatttactgatagcagaaaaggaaccccaaaacacctgtagtgttcaccttgttataagaacagaaacatttggaacaggtttcattctgtttctagatttatgttgttgtagttgaacagcaactgtttttttccctcagtgttaacgaaaggataaagactacctgtattgttgggtatgactatcaaaggatttccggtgattcatgtttgtgaattggagtttaaatgtttgcaggattactgtacttccaaagacccactagaatgtcagctgtactctgtactctccactgagaaaatgaacaaaatcctatgtcttaacagttatgctctaactttttgaaagctttttgatgtaaataataggttagaaactaaaagccttttaatcttacaaaatacaatttgaacgatggaaggttgttcagatactggctttctgtaaaaacatcattgtgttagattgtttgtaatgtactatcaataaaattggctgcttgggcggttttagttaccacctta

SEQ ID NO: 6403 - DNA, 1531 bp, Homo Sapiens
  NM_152637
aaaagtcattgaagagcttgtggggctgtgggacctgcgccctctggaggaattccatacacccactcaactctggcaaataggaaattgtcaagtaggagacaaggagcaaagtcctatcacagcgggaggggacgccagcgcctgcagaggctgagcagggaaaaagccagtgccccagcggaagcacagctcagagctggtctgccatggacatcctggtcccactcctgcagctgctggtgctgcttcttaccctgcccctgcacctcatggctctgctgggctgctggcagcccctgtgcaaaagctacttcccctacctgatggccgtgctgactcccaagagcaaccgcaagatggagagcaagaaacgggagctcttcagccagataaaggggcttacaggagcctccgggaaagtggccctactggagctgggctgcggaaccggagccaactttcagttctacccaccgggctgcagggtcacctgcctagacccaaatccccactttgagaagttcctgacaaagagcatggctgagaacaggcacctccaatatgagcggtttgtggtggctcctggagaggacatgagacagctggctgatggctccatggatgtggtggtctgcactctggtgctgtgctctgtgcagagcccaaggaaggtcctgcaggaggtccggagagtactgagaccgggaggtgtgctctttttctgggagcatgtggcagaaccatatggaagctgggccttcatgtggcagcaagttttcgagcccacctggaaacacattggggatggctgctgcctcaccagagagacctggaaggatcttgagaacgcccagttctccgaaatccaaatggaacgacagccccctcccttgaagtggctacctgttgggccccacatcatgggaaaggctgtcaaataatctttcccaagctccaaggcactcatttgctccttccccagcctccaattagaacaagccacccaccagcctatctatcttccactgagagggacctagcagaatgagagaagacattcatgtaccacctactagtccctctctccccaacctctgccagggcaatctctaacttcaatcccgccttcgacagtgaaaaagctctacttctacgctgacccagggaggaaacactaggaccctgttgtatcctcaactgcaagtttctggactagtctcccaacgtttgcctcccaatgttgtccctttccttcgttcccatggtaaagctcctctcgctttcctcctgaggctacacccatgcgtctctaggaactggtcacaaaagtcatggtgcctgcatccctgccaagcccccctgaccctctctccccactaccaccttcttcctgagctgggggcaccagggagaatcagagatgctggggatgccagagcaagactcaaagaggcagaggttttgttctcaaatattttttaataaatagacgaaaccacgaaaaaaaaaaaaaaaaaaaaaaaaaaaa

SEQ ID NO: 6404 - DNA, 8466 bp, Homo Sapiens
  NM_152641
atggcaaactcgacggggaaggcgcctccggacgagcggagaaagggactcgctttcctggacgagctgcggcagttccaccacagcagagggtcgccttttaaaaaaatccctgcggtgggtgggaaggagctggatcttcacggtctctacaccagagtcactactttaggcggattcgcgaaggtttctgagaagaatcagtggggagaaattgttgaagagttcaactttcccagaagttgttctaacgctgcctttgctttaaaacagtattacttgcgttacctagaaaagtacgagaaagttcatcattttggggaggatgatgatgaggtaccaccaggcaatccaaagccacagcttcctattggtgcaattccatcttcctacaattaccagcaacacagtgtgtcggattatctgcgtcaaagttatgggctgtccatggactttaattcgccaaatgattataataaattggtgctttcactgttatctggactcccaaatgaagtggactttgctattaacgtatgcactctcctatcaaatgaaagcaagcacgtcatgcaacttgaaaaagatcctaaaatcatcactttactacttgctaatgccggggtgtttgacgacactttaggatccttttccactgtatttggagaagaatggaaagagaagactgatagagacttcgttaagttttggaaagacatcgttgatgataatgaagttcgtgacctcatttctgacagaaacaagtctcatgaaggtacatcaggagaatggatttgggagtctttatttcatccacctcgaaagctgggcattaacgatattgaaggacagcgggtacttcagattgcagtgattttgagaaatctttcctttgaggagggcaatgttaagctcttggcagctaatcgtacctgtcttcgtttcctattactttctgcacatagtcattttatttctttaaggcaattaggccttgacacattaggaaatattgcagctgagcttttactggaccctgttgatttcaaaactactcatctgatgtttcatactgttacaaaatgtctaatgtcaagggatagatttttaaagatgagaggcatggaaattttgggaaatctttgcaaagcagaagataatggtgttttaatttgtgaatatgtggatcaggattcctacagagagatcatttgtcatctcactttacctgatgtgctgcttgtaatctcaacactcgaggtgctatacatgctcacggaaatgggagatgttgcttgcacaaaaattgcaaaagtagaaaagagcatagacatgttagtgtgtctggtttctatggatattcagatgtttggccctgatgcactagctgcggtaaaactcattgaacacccaagttccagtcatcaaatgttatctgaaattaggccacaagctatagagcaagtccaaacccagactcatgtagcatctgccccagcttccagagcagttgtagcgcagcatgttgctccacctccaggaatagtggaaatagatagtgagaagtttgcttgtcagtggctaaatgctcattttgaagtaaatccagattgttctgtttctcgagcagaaatgtattctgaatacctctcgacttgcagtaaattagctcgtggtggaatcctaacatcaactggattttataaatgtcttagaacggtctttccaaatcatacagtgaagagagtggaggattccagtagcaatgggcaggcacatattcatgtggtaggagtaaaacggagggctataccacttcccattcagatgtactatcagcagcaaccagtttctacttctgttgttcgtgttgattctgttcctgatgtatctcctgctccttcacctgcaggaatccctcatggatcacaaaccataggaaaccattttcagaggactcctgttgccaaccaatcttcaaatctgactgcaacacaaatgtcttttcctgtacaaggtgttcatactgtggcacaaactgtttcaagaattccacaaaatccttcacctcatacccaccagcaacaaaatgctccagtgactgtcattcaaagtaaagctccaattccttgtgaagttgttaaggctacagttatccagaattccataccccagacaggagttcctgttagtattgctgttggaggaggacctccacagagttctgttgttcagaatcatagtacagggccacaacctgttacagttgtgaattctcagacattgcttcaccatccatctgtaattccacagcagtctccattacacacagtggtaccaggacagatcccttcaggcactcctgttacagtaattcaacaagctgtcccacagagtcatatgtttggcagagtacagaacataccagcatgtacttctacagtttcacagggtcaacagttaatcaccacatcaccccaacctgtgcaaacttcatctcaacagacatcagctggtagccagtcacaagatactgttatcatagcacccccacagtatgtaacaacttctgcatccaatattgtctcagcaacttcagtacagaattttcaggtagctacaggacaaatggttactattgctggtgtcccaagtccacaagcctcaagggtagggtttcagaacattgcaccaaaacctctcccttctcagcaagtttcatctacagtggtacagcagcctattcaacaaccacagcagccaacccaacaaagcgtagtgattgtaagccagccagctcaacaaggtcaaacttatgcaccagccattcaccaaattgttcttgctaatccagcagctcttccagctggtcagacagttcagctaactggacaacctaacataactccatcttcttcaccatcacctgtcccagctactaataaccaagtccctactgccatgtcgtcgtcctctacccctcaatcacagggaccacctcctactgtcagtcaaatgttatctgtgaaaaggcagcaacagcagcaacattcaccagcacccccaccacagcaggtacaagtacaagttcagcagccccaacaagtacagatgcaagttcaacctcaacagtcgaatgcaggagttggtcagcctgcctctggtgagtcgagtctgattaaacagcttctgcttccgaaacgtggtccttcaacaccaggtggtaagcttattctcccagctccacagattcctccccctaataatgcaagagctcctagccctcaggtggtctatcaggtggccagtaaccaagccgcaggttttggagtgcaggggcaaactccagctcagcagctattggttgggcagcaaaatgttcagttggtcccaagtgcaatgccaccctcagggggagtacaaactgtgcccatttcgaacttacaaatattgccaggtccactgatctcaaatagcccagcaaccattttccaagggacttctggcaaccaggtaaccataacagttgtgccaaatacgagttttgcacctgcaactgtgagtcagggaaatgcaactcagctcattgctccagcaggaattaccatgagcggaacgcagacaggagttggacttccagtacaaacgcttccagccactcaagcatctcctgctggacaatcatcatgtactactgctactcccccattcaaaggtgataaaataatttgccaaaaggaggaggaagcaaaggaagcaacaggtttacatgttcatgaacgtaaaattgaagtcatggagaacccgtcctgccgacgaggagccacaaacaccagcaatggggatacaaaggaaaatgaaatgcatgtgggaagtcttttaaatgggagaaagtacagtgactcaagtctacctccttcaaactcagggaaaattcaaagtgagactaatcagtgctcactaatcagtaatgggccatcattggaattaggtgagaatggagcatctgggaaacagaactcagaacaaatagacatgcaagatatcaaaagtgatttgagaaaaccgctagttaatggaatctgtgattttgataaaggagatggttctcatttaagcaaaaacattccaaatcataaaacttccaatcatgtaggaaatggtgagatatctccaatggaaccacaagggactttagatatcactcagcaagatactgccaaaggtgatcaactagaaagaatttctaatggacctgtattaactttgggtggttcatctgtgagcagtatacaggaggcttcaaatgcggcaacacagcaatttagtggtactgatttgcttaatggacctctagcttcaagtttgaattcagatgtgcctcagcaacgcccaagtgtagttgtctcaccacattctacaacctctgttatacagggacatcaaatcatagcagttcccgactcaggatcaaaagtatcccattctcctgccctatcatctgacgttcggtctacaaatggcacagcagaatgcaaaactgtaaagaggccagcagaggatactgatagggaaacagtcgcaggaattccaaataaagtaggagttagaattgttacaatcagtgaccccaacaatgctggctgcagcgcaacaatggttgctgtgccagcaggagcagatccaagcactgtagctaaagtagcaatagaaagtgctgttcagcaaaagcaacagcatccaccaacatatgtacagaatgtggtcccgcagaacactcctatgccaccttcaccagctgtacaagtgcagggccagcctaacagttctcagccttctccattcagtggatccagtcagcctggagatccaatgagaaaacctggacagaacttcatgtgtctgtggcagtcttgtaaaaagtggtttcagacaccctcacaggttttctaccatgcagcaactgaacatggaggaaaagatgtatatccagggcagtgtctttgggaaggttgtgagccttttcagcgacagcggttttcttttattacccacttgcaggataagcactgttcaaaggatgccctacttgcaggattaaaacaagatgaaccaggacaagcaggaagtcagaagtcttctaccaagcagccaactgtagggggcacaagctcaactcctagagcacaaaaggccattgtgaatcatcccagtgctgcacttatggctctgaggagaggatcaagaaaccttgtctttcgagattttacagatgaaaaagagggaccaataactaaacacatccgactaacagctgccttaatattaaaaaatattggtaaatattcagaatgtggtcgcagattgttaaagagacatgaaaataacttatcagtgctagccattagtaacatggaagcttcctccacccttgccaaatgcctttatgaacttaattttacagttcagagtaaggaacaagaaaaagactcagaaatgctgcagtgaaaaataattccacttacacagtgggggactcaaagtcagccacatttcacatactgttactgaagaaagcaccaagtcttaatggaacaaagaccatagaatgaattattttatctcctcccatgatgctgagaggaagcttcgtattctgatctctgagtgaatccctttgttctctgtttaaaaaaatctaaaaagaaaaaggaaaaaaaaaaaagaactgctgtgggattgtcaaccagcttatctgcaggatgtttcagatctgataaatcctgatggaaactggtatgatcagaattcagtaccatccacattggaatatacatggaatattgtaaaacctacatgagcagatgaaatagaagcattaaatatttttatctatatccaaaaaggagcacatttttatatttacaaaaccgtttaagctggtttgaataatttaaaaaagtttcagcacacctatacccccgatctcagagggggccaccaatatctagctatggatcgtgtgttttgtttagaaatcagtagcttggttttcttacttgagccaatatattttcacttatttattatcataaaaatttaccagtctgaatagatcttgtaaatatttgtgaatagaatgaatacctttcatgccactgcagccactggaaatacattctgtggtgtcctagaagcattattggtaggttctaaagttttctagactttcctgtcaattgtaagtaattgtgatatattctatgcagtggatgaatgttctttaaatttgtgtaaatacttctgcaaaggtactgatgctgtaaagtcaaaacagttttgtggaactgtgatttttttttcttttttctttttttttttctttttttttttgtattatacaccttgtagaactcattttgctggctgaaagagtatggaataatatatctcatgtcattttttagaagaaaaactatttgaaggtattttttggttttccttaacatgtatccactgtaaacgtttgtcgtgtacaagctcagagcttggacagaattttttgtatttgtaaattggtttaaatacatggaattttatacaggttttctcctgtgttatatatgcattatgtgcaggtatgatattttcttcactactttttctatcttaatatagtgtggaattttattgtattattcttccattcttaatactgtaccacattcctgctcagaaactgctcacttccttaaattgtcttttttcccccagcgtgaaatgtatccatttataactgcctattgcctgttctattagcatccaaaaatgtggaaggcctcccaaccaccatttctgctgtgtccttaggatgtgcagtaaaaaatatagacctaacagtttatgttatagaatggctttatttactttggtgactgtttatagtttttaaataaaagactgaacattttcttgagtccttcatttctgagtatgcttaagacatcttaaaaatatagagagaattctaaattcagctgaaggcaaggtataacggtcacctacctatttgattatatgttgattgataacatattaaatagagaacaaataagagaggtcctttacatgacaaatttgcatgaaataagcagattaaccaagtatttatttttcatcttgttataatgcagagcaaatgtagagaacagcaaatgattgatgcagttaaagctcaatatgcctttttttactggatactgtacatttggctaaaagcttttattgtttgatgttgtgtttcttgactgtttattcagaatcacagtgtatccaaatcttcagcttgaatttggaggcagattcttagagtgaaaaagcctcagtttccatattaaaaatgttttaaatattttgattgaattagtaccaatgtaaaatctagtttcttcctgaaggaggatccctggcgctgtcctgccatgtctcaaaggaatgtttgagaaacttcatctaatattagttataaggttgtggaatttatgcttggcccaccttccaagactggcactgcccaacagacaccgctgaaatcatgtgggtatccctaggatggccttcagagccctcaaacttacaagcacctggtagttgacatcatatggggaattttctattcaccgtacttatccaaaaatctcttttaaaaagtaaatttgtgcaacaacgtttatttgaaagataatgtcttctcaaaatcagaaactgcagtggtaattaaattaatagaaaagagaacaaactgcaggtttagaaaaatggttttcatattcaccattcttccacctcattgaattgcatgctgtagttctagcttttctgctataatatgtaaatatgactgtagccttttaagcttcagtctcagcagagaatttcctaaatgcgtttgacctaatgaaactgatcatggcttcccacttaggtttttcttcttatagctttatagaactatataataatatggacttgctgtgtaatggaattaaagtgcttttgcacaataagttctgcaaaaccctctcattcatgaaaaggtgctccttgctagacagaaacttgctgatttacagtattgttatttttgtctaaagttctgtaaatacatgctttaatgttatctttgagaaatctatgtaaataatatagtctacaacatagagactgtataattctgtgttatatatgtgcctagtgctctgttggcactcaataaattttaagtaacaaaattgataatcatatagcgaaggcatatttttcttccaagctcaagtcaggattgtgactatatattaatgagactcagtaatccaacccacacctgagaactcgtctcattactttatagtcatgtcatgtatgtttttttaaccatgaaatgacaataaaatgatttttaaaatg

SEQ ID NO: 6405 - DNA, 788 bp, Homo Sapiens
  NM_152644
ggagcatgcgcactggcaggccctcgctcagcctttggagaccatgcgcaggcgcggtgcactgtgcgcgggcaccacggcggtttttcgacgctggcggtggacgcaggcagcatggaccacggttgctgggcggatggggagcgtctatggtcagttgccttagaagtggtgagatgggaagctgcagttggaagaccctggaggatgcctgacaaggggatgtctgacacatgattggagctctttttgaaatgtttcttgcccttcctggagcagaggagccattatttatgcaggtacatcgaagtcttttgacctccatacagtgattatgcctgtcatcgctggtggtatcctggcggccttgctcctgctgatagttgtcgtgctctgtctttacttcaaaatacacaacgcgctaaaagctgcaaaggaacctgaagctgtggctgtaaaaaatcacaacccagacaaggtgtggtgggccaagaacagccaggccaaaaccattgccacggagtcttgtcctgccctgcagtgctgtgaaggatatagaatgtgtgccagttttgattccctgccaccttgctgttgcgacataaatgagggcctctgagttaggaaaggtgggcacaaaaatcttcatgagcaatacttcttagtagattgttttgttattcaaatcaagttctagtgtttttatgtgagattatataatttacagtgttgttttatatacttttgaataaatgtacactattaaaaataaaaaaaaaaaaaaaaaa

SEQ ID NO: 6406 - DNA, 2522 bp, Homo Sapiens
  NM_152649
agaaagcggctccagggagccagggcaccgtgagcctggtggttggcagctggagccacgtcggagggggaagtgtcgcagcattctctgcaggcatcacagacctgaggcagtggcctccggagggcactggacagaaacagccatccaagtggctgagtggagggaccctgctcaagtgcagctgcagtggccggggtttccctcaggtagggatcggggcgccttgtcgccgccagccacgtgtggcgtccggtacagtcagcagagtgcagggtgcgggcaccaggaaagggggcgcaggggaactcccgcgggcctcgcgtttgcaaacttctcgcctgggcaggaggcggtcgtgggaaagaaggtggaagagcgagctttttggaactgtgcacgggacagattggacgcacacccctcgggaggcgcgaaggcatggaaaatttgaagcatattatcacccttggccaggtcatccacaaacggtgtgaagagatgaaatactgcaagaaacagtgccggcgcctgggccaccgcgtcctcggcctgatcaagcctctggagatgctccaggaccaaggaaagaggagcgtgccctctgagaagttaaccacagccatgaaccgcttcaaggctgccctggaggaggctaatggggagatagaaaagttcagcaatagatccaatatctgcaggtttctaacagcaagccaggacaaaatactcttcaaggacgtgaacaggaagctgagtgatgtctggaaggagctctcgctgttacttcaggttgagcaacgcatgcctgtttcacccataagccaaggagcgtcctgggcacaggaagatcagcaggatgcagacgaagacaggcgagctttccagatgctaagaagagataatgaaaaaatagaagcttcactgagacgattagaaatcaacatgaaagaaatcaaggaaactttgaggcagtatttaccaccaaaatgcatgcaggagatcccgcaagagcaaatcaaggagatcaagaaggagcagctttcaggatccccgtggattctgctaagggaaaatgaagtcagcacactttataaaggagaataccacagagctccagtggccataaaagtattcaaaaaactccaggctggcagcattgcaatagtgaggcagactttcaataaggagatcaaaaccatgaagaaattcgaatctcccaacatcctgcgtatatttgggatttgcattgatgaaacagtgactccgcctcaattctccattgtcatggagtactgtgaactcgggaccctgagggagctgttggatagggaaaaagacctcacacttggcaagcgcatggtcctagtcctgggggcagcccgaggcctataccggctacaccattcagaagcacctgaactccacggaaaaatcagaagctcaaacttcctggtaactcaaggctaccaagtgaagcttgcaggatttgagttgaggaaaacacagacttccatgagtttgggaactacgagagaaaagacagacagagtcaaatctacagcatatctctcacctcaggaactggaagatgtattttatcaatatgatgtaaagtctgaaatatacagctttggaatcgtcctctgggaaatcgccactggagatatcccgtttcaaggctgtaattctgagaagatccgcaagctggtggctgtgaagcggcagcaggagccactgggtgaagactgcccttcagagctgcgggagatcattgatgagtgccgggcccatgatccctctgtgcggccctctgtggatgaaatcttaaagaaactctccaccttttctaagtagtgtatcaaaatctaaaccaaggagtctctggacaagaagctgggagaggcacaaactggacatctctctctctcatatccttcggcattgggttatctatgggtgcaaggagtgggcacgcttctctgttacaaatagaaaacgattccagtcatacaggacacatcccactccaaatgatatttccaaaaacatacctctgacagtaactttgatagatggtttgtcaaatgtatctttctgggtatccacacctcttggcaatgaaatttgcagctcctcccttccataaatgaagtctctttccccaccatttgaatctgggctggcactgtgacttgatttgatcaatagaatgtggaagaagtgactgtatgccagttccaagcctaggtttcaagaggccttataaatgtctgttggaaccttacccagccatgaacatgttgagtgagcatgctggagaatgagagaccacatgaagcagaaacatgctttcctagctgaagtcatactagcccaaccaacatggcagctaacacatgaatgaggccaatcaagaccagaagaaccactcaagcagatcccagcccaaattgcccattcacacaatcaggagctaaataaattactgttgtcttaacactaaaaaaaaaaaaaaaaaa

SEQ ID NO: 6407 - DNA, 1760 bp, Homo Sapiens
  NM_152653
gacaggcgtggtcgggtgcgtggtgcgtgggtccggctttcggtgactagacggtccgcaggggacatcccgtccctggggcctccccagtctccctccccctcgcgcctgggcagctctctcccagggcttcggctcgagcctgcgacctgcacggacacccccccctcaggatctaaaatgtccactgaggcacaaagagttgatgacagtccaagcactagtggaggaagttccgatggagatcaacgtgaaagtgttcagcaagaaccagaaagagaacaagttcagcccaagaaaaaggagggaaaaatatccagcaaaaccgctgctaaattgtcaactagtgctaaaagaattcagaaggaacttgcagaaatcacattggaccctcctcccaactgtagtgctggacccaaaggagacaacatttatgaatggaggtcaactatattgggacccccaggatctgtctatgaaggaggggtgttctttcttgacattaccttttcaccagactatccgtttaaaccccctaaggttaccttccgaacaagaatctatcactgtaatattaacagccaaggtgtgatctgtctggacatcttaaaggacaactggagtccggctttaactatttctaaagttctcctctccatctgctcacttcttacagattgcaaccctgctgaccctctggtgggcagcatcgccacacagtacatgaccaacagagcagagcatgaccggatggccagacagtggaccaagcggtacgccacataggggcctgctgcctgccgccccgcgggacctgtgcaagcacattcaccaagtgcatcggtagccctgcccacccctccagacctcggttcttattttcctatttttattaaatttggaaccattttgtgatggtatgttgtccatcttcccatcccagttcttcctgccccccttcctctctcccacgctctcttttatctctcattttattcccttgttgatttctgttaacttgaaagatttgggattttttcccacctcatcatagatgggaacttttgttttcagtgcaaacaatgttggagctgtaatagtaagagctttcttacaaagctttgtattactgtgtggttttgttttttttgttgttgtttatttgattttgatttttttttcttttatgtgatctttgggaaaacacattcagaattatatctcgtttctacttaaatgtagtgcttagggttaattttttgtactgaagtctttattggtgggtgcatgctactgggaacaagtttttgtacaaaagcttcaatcagaatcactgtgcattactgagactctgtttatcactagccttctgtccctcccgcagaagactgttggattgaacaaaataatatgtattttgatttacttaaagtgcttgtaaatttcttagggacctgccacttttgactgtggatcagttgatgtacacttgtattattaaagcactcaataaatcactgtggctgataactgcacttctggtaacccgacatttgctttgtgtcctggtgaccgctgtagccctacgtgcagtgaggcttgtctaattcaattacaggttcaagtgtatttttcatctcaaacctctaatatttctttggagttgagttgcttagcatgtggaatttctccagctgtcagtagcctgatgattttatggttgttatagtaaattgctatcattttacatattgactggg

SEQ ID NO: 6408 - DNA, 4144 bp, Homo Sapiens
  NM_152655
ggaccggaagtggaagtggtcttccaaggcttttttgccgctggtgtcaggagtattttcatattccaataccgataaatctttgaggtttctgggtgtctctggggagcccctgggccagattttcctctagactccagcccatctcttcagagcagctctgcttgagttcacagatgactgccaagcttcagacaccctacagaaaaagggttgagacccagtgtggccatgccagctaattggacctcacctcagaaatcctcagccctggctccagaggatcatggcagctcctatgagtgttaaccttgatgcctgaaagaactggaaattatgaagatagattcagaagtcaaatatgttaactaactgcattgaagagtagaagaaaacaatagcctaggatcagtgtccttcagggatgtggctatcgatttcagcagagaggaatggcggcacctggacccttctcagagaaacctgtaccgggatgtgatgctggagacctacagccacctgctctcagtaggatatcaagttcctgaagcagaggtggtcatgttggagcaaggaaaggaaccatgggcactgcagggtgagaggccacgtcagagctgcccaggagagaaattatgggaccataatcaatgtagaaaaatcctcagttataaacaagtatcctctcaacctcaaaaaatgtatcctggggagaaagcttatgaatgcgccaaatttgaaaagatattcacccagaagtcacagctcaaagtacacctgaaagttcttgcaggagaaaagctctatgtatgcattgaatgtgggaaggcttttgtacagaagccagaatttattatacaccagaaaacccatatgagagagaaaccctttaaatgcaatgaatgtggaaaatccttttttcaagtgtcgtccctcttcaggcatcagagaattcataccggagagaaactctatgaatgcagccagtgtgggaaaggcttctcttataactcagatctcagtatacatgagaaaattcatactggagagagacaccatgaatgcactgactgtggcaaagcattcacacaaaagtccacactcaagatgcatcagaaaatccatacaggcgagagatcctacatctgtattgaatgcggacaggccttcatccagaagacccatttgattgcacaccgaagaattcatactggagaaaaaccatatgagtgcagtaactgtggcaaatccttcatttccaagtcacaacttcaggtacatcaacgtgttcacacaagagtgaagccctatatatgtaccgaatatgggaaggtcttcagcaataattccaacctcgttacacataagaaagttcaaagtagagagaaatcttccatatgtactgagtgtgggaaggcctttacctacaggtcagagttgattattcatcagagaattcacactggagagaaaccttatgaatgcagtgactgtgggaaagccttcactcagaagtcagcactcacagtgcatcagagaattcatacaggagaaaaatcgtatatatgcatgaaatgtggactggccttcattcagaaggcacacttgattgcacatcaaataattcatactggagagaaacctcataaatgtggtcactgtgggaaattgtttacctccaagtcgcaactccatgttcataaacgaattcacacaggagaaaagccctatatgtgcaataaatgtgggaaggcattcaccaaccggtcaaatctcattacacatcagaaaactcatacaggagagaaatcttatatatgttccaaatgtggaaaggccttcacccagaggtcagacttgattacacatcagagaatccatactggggagaagccttatgaatgcaatacttgtggaaaagccttcactcagaagtcacacctcaatatacatcagaaaattcacactggagagagacagtatgaatgccacgaatgtgggaaagccttcaaccagaaatcaatactcattgttcatcagaaaattcatacaggagagaaaccctatgtatgcactgagtgtggaagagctttcatccgcaagtcaaactttattactcatcaaagaattcatactggagagaagccttatgaatgcagtgactgtgggaagtcctttacctccaagtctcagctcctggtgcatcagccagttcacacaggagagaaaccctatgtgtgtgccgagtgcgggaaggcctttagtggcaggtcaaatctcagtaagcaccagaaaactcataccggagaaaagccctacatttgttctgaatgtgggaagacctttcgacagaagtcagagttgattacacatcacagaattcatactggagagaaaccttatgagtgcagtgactgtgggaagtctttcactaaaaaatcacagctccaagtgcatcagcgaattcacactggagagaagccttacgtgtgtgctgagtgtgggaaggcctttactgacaggtccaatttgaataaacatcagacaacacacactggagacaaaccctacaagtgtggcatctgtgggaaaggcttcgttcagaaatcagtgttcagcgtccatcagagcagccacgcttgagagaaacagtgtgagaaaacccccctgagggttgggtctgattgtacactgttgcacgcatgcagcagaaaaatatgtatattattgtaaatagaaatgaccacagcagaatgtcacacatggctgttctggagagggcctctgagaaggcactgaatgaggcgagggacccttcctacattgtcaccatccccagtaaaccttgggtcattattcatactgacaaggaaccgagtcaatttggtgaataggaaaagccttctcatgaaaactacaatagaatactgttaccaaattcttcctaagaaagatcgtattaagttaacgataatcctgtttactgtggattaggtatagtgccaacaaattgaatgataaaacaacataatacgtagttattttgatagtgatgaatcctaagttatgtgagttgttcgttgtggaacacattgtgtaacagactcctgggtgtttttctttctcattcgaatctaccacagttggtcatatccaaccctcattcagtatttctatcaagaaagagatgctacaaaaaaaaaaagaaaaaacctttatgtatacagacgtaaacctcagaatgtatgttgagtccccactgtcatctaccaagacttgcacccccctcattatctaccatgactgtctctcagcctcacgggccctcagcactttgtgttttgacccccagcaccgtgtcttgtgaactcccatcaccttcaagaaagcttccgaggtaagaattttatggtcatctgggacaacttaaatctcccttctgctgtcatagttcttccaactcagttgcctttttttttttttcgtactcatcactgacttgaagcttagtatctggcttccttaaggatgtaactttcatgtaacagattaataacttatatgaaaaccaacacaaccatatgtttagggctggaaagggccatgacgcctggccatttttcctgttttaccttactcttatgtgtgtcacacttcatcaattccggaaacagtttctggagatctcctcattacctcttttacaatcacctcactccagcatggtgtctgttacctcttcccacttgtgacaatgtctagtaaggtccactctccattctgtgtgatgaccacttattacaaccctcagaataggggacagtggtgtgccccctgcaatacaatggtttctatctcctgatacttttattacacctctagcaggatgtcttgtgatcctccttattgatttttccctcacgatgatgaacaattatctcccgttactcacctagcagtatctaactgtccctaacacagcatgtgggaatgccctcaatacggtggatgctgttaactttcttccttcccctcaggcaatggcggtgacttacaatgaaccataatgtccacatttcccaactgtattttggagcctcttctgtccccttctttctaggaccccagttaaaaaaaaaaaaaa

SEQ ID NO: 6409 - DNA, 2268 bp, Homo Sapiens
  NM_152665
tcagagtccagggagagtgcgcgggcggccgccggctgaatgaagcctgggacgcgggagccgcgccgcgcgcagtgtctgcagtgccggaggtctgggaggctccgggcgaagcctccctgctgcaggttatgatgatgtcagacaatgctaaaggcagagcagctcattcatggaagaaaagagggagtatttcttctctaagtaatcatgaattttggcgaaaggaaattcatgggcgcatcaaagattctatgagtactgtgtcttatatggaagaacccagtcagcgtgatgatatctctcgccttacagttcagatggaaaacacctatcagttgggtcctcccaaacattttcctgtggtcaccgtcaatcatattttgaaagatgtagtaaccagctatctacaagtagaagaatatgaaccagagctctgtagacagatgactaaaaccatttctgaggttattaaagcccaggtcaaggacttgatgattccacggtataaactaattgtgattgttcacattggacaactgaacaggcagagcatacttattggaagcagatgcctctgggatcctaaaagtgataccttttcatcttatgttttcagaaattcttctctcttcgctcttgcaaatgtctatgcagtttaccttgagtgattgaaaataagaaatctagctcttacttttgaaaattctgaggcaggctgtatgtctgtacacaaaagttttactgccaaaaactttgagaaagaaacaacactgatatttcaagcaactggaagcttttgaattttttcatattctagtaaagatttggggaggggagggtagccacagaaagaatcttgtttatctaaagcaggaacttgatcttggttttgctggattgctttccatagacatagattcttattaaatatttgttttggtactaattattttaattattctttaattagagtgttacaatttcctgcattgttttttaataaaaagaagctttagaaaaactatggctatataccctgaccaataaatgatagtagaatattcaacatggtatacacaaatgataaataatgtgcctcagtgctgcatataaaagaatactggttttcattttgtacttaataaattgagcagcattcattaagtgcaattattgttacatgtacctgacagttgaaactgctgaggtagaattaatggcttcataacaattatcgtggtcccacgggctgcaagctaaaactagaagctcttgtggcttgcctgcactttacacaattgtgggagaaccgaaagttggctcttcagtaatggaaactataaagtgaataaaggctttttgggacactgaagtagacattgtgatattaaatatacatgatgcttaatactaaatgtgtctgtaacacataaaatcatttattggaaagagacattgcttttaaatatcctaggctaacaaactttttcacaaaatatatggctggcaccttaacaaataaagcatgtgtagttaccattttactcctatgaatttaatactaaagtgacccagtgaggtttttgaatagacgggtgctaaaatttacagggctgaaatagcttattattctgctggttaatgtatcttacgccacggatcatttatttttatgaagctttcaagtctttgtgtgcaagtaaaatgatgttgtggcgttgttcttggatggtaagtggactgcctagaggacatttgttaaaggtcaaagacaaattgtacacatatggagaaaattagcaatgctgtagtcttaaggaaaaaatgatttatcattcatatcaaaaagagtttagcaaatggaaaaccagttaatgctttaattttaaaatgttttggtgtcttacttttccctaaaaatgacatgtagtaaaaaatggatacttttaaaatcccttcccttctgctattttctggcttttaaagtgattattcaaaatgaatttgtcaattttcacttttttttttctgttagtgcattagtgggaatatgtctatgtaataatttatcacaaccaatatttgtcaatctccatagaacagttttcaatctggattagattacacgtataacaagtaaatgagcttcatattttcattacacattggtgaacatctcccttcgtggaacaacagcgggggtaatcatatcactaattttgtatgaataaatgaaaatgaagaaacttctttaacatataaaaa

SEQ ID NO: 6410 - DNA, 1455 bp, Homo Sapiens
  NM_152672
aaattcctccggggtgaactctgagatagaaagttggcccgggaagctcaaggagggagagcggcagaggggaagactctgcaattctgcttgccccccaccccggcccaggcaagccaccctgcccccggcccccacctgcccgccccgcctgcccttcctcaccccggtgcctgcgggattgctggagagaacgcggcgatggagccgggcaggacccagataaagcttgaccccaggtacacagcagatcttctggaggtgctgaagaccaattacggcatcccctccgcctgcttctctcagcctcccacagcagcccaactcctgagagccctgggccctgtggaacttgccctcactagcatcctgaccttgctggcgctgggctccattgccatcttcctggaggatgccgtctacctgtacaagaacaccctttgccccatcaagaggcggactctgctctggaagagctcggcacccacggtggtgtctgtgctgtgctgctttggtctctggatccctcgttccctggtgctggtggaaatgaccatcacctcgttttatgccgtgtgcttttacctgctgatgctggtcatggtggaaggctttggggggaaggaggcagtgctgaggacgctgagggacaccccgatgatggtccacacaggcccctgctgctgctgctgcccctgctgtccacggctgctgctcaccaggaagaagcttcagctgctgatgttgggccctttccaatacgccttcttgaagataacgctgaccctggtgggcctgtttctcgtccccgacggcatctatgacccagcagacatttctgaggggagcacagctctatggatcaacactttccttggcgtgtccacactgctggctctctggaccctgggcatcatttcccgtcaagccaggctacacctgggtgagcagaacatgggagccaaatttgctctgttccaggttctcctcatcctgactgccctacagccctccatcttctcagtcttggccaacggtgggcagattgcttgttcgcctccctattcctctaaaaccaggtctcaagtgatgaattgccacctcctcatactggagacttttctaatgactgtgctgacacgaatgtactaccgaaggaaagaccacaaggttgggtatgaaactttctcttctccagacctggacttgaacctcaaagcctaaggtggatggcttggacaatgaaaggatgctgtactcattagaatacaagattcctttactgtccctcaaccttgaccaaatgggaagcattcccccttgtcaacacaagctggcagatacatttgactctacagatgaaggtgaacaatgttagaataaaattgctttggatcttgcctggaaggtgttttaagttttgtaataaacaagatgatgtctgaaaatgtgtaa

SEQ ID NO: 6411 - DNA, 1767 bp, Homo Sapiens
  NM_152676
atcttgcagcagcactggctcggcctccagacgctgcgcgggcccagcaggggcggtggcgcggcccgggggcgcgccagggcctttgggtgcaggtgactgtagggcctgcgggtggggtcccctggcgggaagcccgtcactgcgcggccccgctctcttcaccgtgtattttattcgtccagcttggcgcaaggcccgtggccgtcttcaacgtgagaaggaaaggggccaggggtcaagctttctgcaggctctgctgccctgaggtgccatgccggaggtggacagcactgggagagctctttctcctgctgttctgggttcctggatggaatgccttcagaaatcttgctgaagatattttcctacttggatgctgtgagccttctgtgtactggatgtgtgagcaggcgcttttatcatctagccaatgacaattttatttggatcggaatctactcaactgctttttcacctgcaagatcaaattggaaatttaattcagtagagaagatagctatgtctatgagctttctgtcagttcaggataaagaagctggttattggaagaaagaatatatcacaaaacaaatagcatctgtaaaagccgcactagctgacattctcaaacctgtcaacccttacacaggccttccagttaagaccaaagaggccctcagaatatttggtttaggttgggcaattatactgaaagaaaaaggtggaaaagaatatatcatggagcatgttgatctttccataaatgacacatcagttactgttatatggtatggcaaaaaatggccatgcctagcatcattgtcaaccttagatttatgtggcatgacaccagtttttaccgactggtataaaactcccaccaaacatagactccgatggcattctttaattgcaaagtacaatctgagtcatttgaccatatctaccatgattggctgtgacagactcattcggatcttctgcctgcaccctggcctcctggtgggagtgtggaagaaggaggaagaactggcttttgttatggcaaatcttcattttcatcaccttgtggagaggagcacattaggctcggctactatcccctatgaactgcctccacatagcccctttttggatgatagccccgagtatggactgcacggctaccaactccatgttgatctgcacagcggtggggttttctacctatgtggtacatttcgcaatctcttcaccaagagaggaaatattgaaaatggacatgtgaagctcattgttatacatttaaaaaataacagagaacacctacctcttattggaaaagttggcctctcgtggaaaactgatatttttgatggctgtataaagagttgttccatgatggacgtaactcttttggatgaacatgggaaacccttttggtgtttcagttccccggtgtgcctgagatcgcctgccacaccctctgacagctctagcttcttgggacagacatacaacgtggactacgttgatgcggaaggaagagtgcacgtggagctggtgtggatcagagagaccgaagaataccttattgtcaacctggtcctttatcttagtatcgcaaaaatcaaccattggtttgggactgaatattagcagtaggtggcaaattattgttgttatttagttgtttatttttgactggctttgttcttggtgttgaaaattaaaataaagcaaatctgcagagtgctgtgcaatgccaaaaaaaaaaaaaaaaaa

SEQ ID NO: 6412 - DNA, 2225 bp, Homo Sapiens
  NM_152681
accaaagaaaaaagacacctgtgcctggcaggtcgatacgctactaatttgcccgaggtacgaacgaaacagaagatgctgatttctggataaaacgttctgcagtgccaggctgcagtgtgttctactgaatgcatgtaccataatttacttaattatctgggctgattctgaatttctattatgaacaaagccacaggttccttggatatcacccagagtattgaagacgacccacttctggatgcccagcttctcccacaccactcattacaagctcactttagaccccgattccatcctcttcctacagtcatcatagtgaatcttctgtggtttattcatctcgtgtttgttgttttagcatttttaacaggtgtgctttgttcttatcctaatccaaatgaggacaagtgcccaggaaattacacaaacccattgaaagttcagacggttataatccttgggaaagttattttgtggattctccatttactccttgaatgctacatccagtatcaccacagcaaaatcagaaaccgaggctataacttgatctaccgatcaacaaggcatctcaagagacttgcgttgatgatacagtcctctggcaacacagtgcttctcctcatactgtgcatgcagcactccttcccagagcctggcagattgtatcttgacctcattctggccatcttggcactggaactcatctgttccctgatatgtctcctcatttgcacagtgaaaatccggagatttaataaagctaaaccagagcctgatatacttgaagaagaaaaaatctatgcttaccccagcaatattacctcggagactggattcagaactatttcaagcctagaagaaattgttgaaaagcaaggagacaccattgaatacctgaagcgacacaatgcgctgctgagtaagcgattgttggctctcacttcctcagacctgggctgtcagccaagtagaacgtgagaggctcacggtcatgacagcaattgcagaggaacccagagtaattgagactgactgaccacctgacaagctgccacggggaactgcagcttttgctgaatagcattttacagtgtttgttggaaacctgaatttggttctgacttctgtggctgtttaaaatatagggcttgtgggtcacttgaaaagtacctgtagaagcccggataacttgaggggaatgtctgtttgtacttttggaaattatttaactgcttggtttatcctaggatcagaggctaaacaactccatagtcaacacttttccacctgacattagaaccctgtaatgatttcattatggataggggaagtctaacaagacaatcgattttaaacagggttttaatcaaataagttcttcccacttttaagctgatgaaagaagtcattatttcttgtgaatattttttcctggagagccttatcatgtattttatatgcttatgtggtgttggatgacatcatggaccatatagcttttatagagaatttttctcaccataggactgaggtctcaccaggtgatctactatgcaaattcctacagttttctattcttaagaaataagggccgggcacggcggatcatgaggtcaggaaattgagaccatcctggctaacacggtgaaaccctgtctctactaaaaatacaaaaaaaattagccgagcatggtggcgggcacctgtagtcccagccacctgggaggctgaggcaggagaatggtgtggacccaggaggcagagcttgcagtgagccgagatcacgccactgcactccagcctgggcgacagagcgagactccgtctcaaaaaaacaaaaaagaaaaagaaaagaaataagatatgatgattgattacttggaccagtgttagaccgacctgtgttagacgaacctgtgttgcctattatattggcagcaccttccattagcaatagctgaaaaattcagagaagaatttagaactttcactttatttttgccattcttcaagaagttgctgtatatttcagtctggttataccttcaattgatcaataacttcaattataggaaaggcatcttctataattttaaattactgtaaaaaaaagataccttttaaagccttggattatacttaaaaattgtaatggaagaaatgcatattaagttatatgcagatattaaacatatctgattctgaagataaaactg

SEQ ID NO: 6413 - DNA, 2000 bp, Homo Sapiens
  NM_152684
atcttcttcctgccctcgccgtggcgggcgacggtttctcgcgccgtggctggctcggccggccggggcaccgcgccgggctccatgcagccgggctgcgcggtcccgcagagcgggcgcctccggggctcgagtcggggacccggcaggagcgggccggggatggcggcggcgggcggcgggtcggccgtggagccccggagaggcggccgccaccaccgctgcccgcagtctgcgaggtgtccggcggtccgctcagggcctcttttgcagactcggtgcccggagtgcgccggcgccgcccgccaggtcttggcactgctggcgcggccgcggcggcgggggcccggctccagatcaccgacccccacgagcgccggccctgcctgcccgctattttggttccatctcttctgcatatttatgcttgcctgttacattccctggcctctgagtgtcctttggcagtttccaaagcatttgggcaagaaggagcttgggcagcttcacaacaggtggggacgcgcaggggaggggccgcggccggaccggcagagtttcaagggctggcgcgccggcggactttccacactgtctttcgggactggggttaggagacagcccttggccaccactgtgtccttactttgtcgctttacttggggctggacctcccctttccagctctggcgtgtgaccccgcaacgagcgtggtgtcgagaccaccaccagctggggcggtgggagcgaaggtgccccaggctcggggaaggtggaaaccttttccccgctccccaagtgattgttgcgcgctccggtgaggggacagtggtacctcgatttcccgtgtgccagcttcgggactcagctgtgcttttgtgtctctttgattagcaaaagcaaaacgaattcctccccgaacactaagcttcctggaaacttccctagacctaaacttgagaaccgcatataaatgggccttgagggttctgtcgtcagtagcgggttacgtgattgcaaacgagcaagtttaaaacggagtgggctttgggctgcagagccgcctggcattctgacagctgagcaggaggcagaggtgagagtccaagatggactaaaaatgtcccagcagctgggagcccaacctcggcccaacctcgttgaaaggaggaacattcggtgcagccgtcggaaccttattatttatgaaaggggacagctcacaggattacatttttctaagccaatcctgtgaccatcctccatgaaattctctattttggttgcatgtggtcaaaactgagcctcactgaaacaattgaaaacaaatactcccgacaaatcttaagaatcgttttgaaaatcaaaaggtggggaaaatgttgtggcttctgagctttcttcagcccatattctattattctctgatgttttatggtgtaaaatcatacccattccattatgtattgattgtcaagaaggaagtaggcttttattgctatttttatgtcagtttccatttactgtctcaccacatttattgggttattgcctttgcctttgactcaacaggagctggaagggtaggaatcccaaattctgttgcctaaggcagccagttgtcagaatggactttcctcattttctattatgaggcctgaggaaagacattcagttccaaaggctgtgcctatccttttaaatagaagagagagggcccggcacggtggctcacgcctgtaatcccagcactttgggaggccgaagggggcgaatcacgaggtcaggagttccagaccagcctggccaacatagtgaaaccccgtgtctactaaagatacaaatattagccgggcgtaatggcgggcgcctgtattcccagctactcgggaggctgaggcaggagaatggcttgaatccgggaggcggaggttgcagtgaaccgaaccgagatcgcgtcgctggactccagcccgggcgacagagtgagactccgtccc

SEQ ID NO: 6414 - DNA, 1915 bp, Homo Sapiens
  NM_152692
cgcgggcgggcaaacggacggctccgcccagccgccggctcctttaccccgccccactacccccgccttcgcggcgctcgtttcctggcgctccccacctttagcgagaccaacgagagaacaccgcctgcagctagaacagcctggtcaggagcgtaacggagtggtgcgccaacgtgagaggaaacccgtgcgcggctgcgctttcctgtccccaagccgttctagacgcggatgaagtgcaaaacaaacttctccatagaggagttgttgcaaagttccagtttataccaaacagtaatcagattccattggaagctaaagattttgagagccttttgtactatatgcaactaacttgatttcaagcttgggaaccttttaaaaaaaacattaaaagcaaaatgaaaaatgctttctgaaagcagctcctttttgaagggtgtgatgcttggaagcattttctgtgctttgatcactatgctaggacacattaggattggtcatggaaatagaatgcaccaccatgagcatcatcacctacaagctcctaacaaagaagatatcttgaaaatttcagaggatgagcgcatggagctcagtaagagctttcgagtatactgtattatccttgtaaaacccaaagatgtgagtctttgggctgcagtaaaggagacttggaccaaacactgtgacaaagcagagttcttcagttctgaaaatgttaaagtgtttgagtcaattaatatggacacaaatgacatgtggttaatgatgagaaaagcttacaaatacgcctttgataagtatagagaccaatacaactggttcttccttgcacgccccactacgtttgctatcattgaaaacctaaagtattttttgttaaaaaaggatccatcacagcctttctatctaggccacactataaaatctggagaccttgaatatgtgggtatggaaggaggaattgtcttaagtgtagaatcaatgaaaagacttaacagccttctcaatatcccagaaaagtgtcctgaacagggagggatgatttggaagatatctgaagataaacagctagcagtttgcctgaaatatgctggagtatttgcagaaaatgcagaagatgctgatggaaaagatgtatttaataccaaatctgttgggctttctattaaagaggcaatgacttatcaccccaaccaggtagtagaaggctgttgttcagatatggctgttacttttaatggactgactccaaatcagatgcatgtgatgatgtatggggtataccgccttagggcatttgggcatattttcaatgatgcattggttttcttacctccaaatggttctgacaatgactgagaagtggtagaaaagcgtgaatatgatctttgtataggacgtgtgttgtcattatttgtagtagtaactacatatccaatacagctgtatgtttctttttcttttctaatttggtggcactggtataaccacacattaaagtcagtagtacatttttaaatgagggtggtttttttctttaaaacacatgaacattgtaaatgtgttggaaagaagtgttttaagaataataattttgcaaataaactattaataaatattatatgtgataaattctaaattatgaacattagaaatctgtggggcacatatttttgctgattggttaaaaaattttaacaggtctttagcgttctaagatatgcaaatgatatctctagttgtgaatttgtgattaaagtaaaacttttagctgtgtgttccctttacttctaatactgatttatgttctaagcctccccaagttccaatggatttgccttctcaaaatgtacaactaagcaactaaagaaaattaaagtgaaagttgaaaaataaaaaaaaaaaa

SEQ ID NO: 6415 - DNA, 3438 bp, Homo Sapiens
  NM_152696
gcagagtctgcagtgcggagggggcgggaagtccaggccccgcactcgatccacgctggctccctacggaggcccacctactcgaggcccaccgactcctactgcaatcagtactatgcgatcgtcctagagagtccattcagctgcacttccgcctcagtatggcatcacagctgcaagtgttttcgcccccatcagtgtcgtcgagtgccttctgcagtgcgaagaaactgaaaatagagccctctggctgggatgtttcaggacagagtagcaacgacaaatattatacccacagcaaaaccctcccagccacacaagggcaagccaactcctctcaccaggtagcaaatttcaacatccctgcttacgaccagggcctcctcctcccagctcctgcagtggagcatattgttgtaacagccgctgatagctcgggcagtgctgctacatcaaccttccaaagcagccagaccctgactcacagaagcaacgtttctttgcttgagccatatcaaaaatgtggattgaaacgaaaaagtgaggaagttgacagcaacggtagtgtgcagatcatagaagaacatccccctctcatgctgcaaaacaggactgtggtgggtgctgctgccacaaccaccactgtgaccacaaagagtagcagttccagcggagaaggggattaccagctggtccagcatgagatcctttgctctatgaccaatagctatgaagtcttggagttcctaggccgggggacatttggacaggtggctaagtgctggaagaggagcaccaaggaaattgtggctattaaaatcttgaagaaccacccctcctatgccagacaaggacagattgaagtgagcatcctttcccgcctaagcagtgaaaatgctgatgagtataattttgtccgttcatacgagtgctttcagcataagaatcacacctgccttgtttttgaaatgttggagcagaacttatatgattttctaaagcaaaacaaatttagcccactgccactcaagtacatcagaccaatcttgcagcaggtggccacagccttgatgaagctcaagagtcttggtctgatccacgctgaccttaagcctgaaaacatcatgctggttgatccagttcgccagccctaccgagtgaaggtcattgactttggttctgctagtcacgtttccaaagctgtgtgctcaacctacttacagtcacgttactacagagctcctgaaattattcttgggttaccattttgtgaagctattgatatgtggtcactgggctgtgtgatagctgagctgttcctgggatggcctctttatcctggtgcttcagaatatgatcagattcgttatatttcacaaacacaaggcttgccagctgaatatcttctcagtgccggaacaaaaacaaccaggtttttcaacagagatcctaatttggggtacccactgtggaggcttaagacacctgaagaacatgaactggagactggaataaaatcaaaagaagctcggaagtacatttttaattgcttagatgacatggctcaggtgaatatgtctacagacctggagggaacagacatgttggcagagaaggcagaccgaagagaatacattgatctgttaaagaaaatgctcacaattgatgcagataagagaattacccctctaaaaactcttaaccatcagtttgtgacaatgactcaccttttggattttccacatagcaatcatgttaagtcttgttttcagaacatggagatctgcaagcggagggttcacatgtatgatacagtgagtcagatcaagagtcccttcactacacatgttgccccaaatacaagcacaaatctaaccatgagcttcagcaatcagctcaatacagtgcacaatcaggccagtgttctagcttccagttctactgcagcagctgctactctttctctggctaattcagatgtctcactactaaactaccagtcagctttgtacccatcatctgctgcaccagttcctggagttgcccagcagggtgtttccttgcagcctggaaccacccagatttgcactcagacagatccattccaacagacatttatagtatgtccacctgcgtttcaaactggactacaagcaacaacaaagcattctggattccctgtgaggatggataatgctgtaccgattgtaccccaggcaccagctgctcagccactacagattcagtcaggagttctcacgcagggaagctgtacaccactaatggtagcaactctccaccctcaagtagccaccatcacaccgcagtatgcggtgccctttactctgagctgcgcagccggccggccggcgctggttgaacagactgccgctgtactgcaggcgtggcctggagggactcagcaaattctcctgccttcaacttggcaacagttgcctggggtagctctacacaactctgtccagcccacagcaatgattccagaggccatggggagtggacagcagctagctgactggaggaatgcccactctcatggcaaccagtacagcactatcatgcagcagccatccttgctgactaaccatgtgacattggccactgctcagcctctgaatgttggtgttgcccatgttgtcagacaacaacaatccagttccctcccttcgaagaagaataagcagtcagctccagtctcttccaagtcctctctagatgttctgccttcccaagtctattctctggttgggagcagtcccctccgcaccacatcttcttataattccttggtccctgtccaagatcagcatcagcccatcatcattccagatactcccagccctcctgtgagtgtcatcactatccgaagtgacactgatgaggaagaggacaacaaatacaagcccagtagctctggactgaagccaaggtctaatgtcatcagttatgtcactgtcaatgattctccagactctgactcttctttgagcagcccttattccactgataccctgagtgctctccgaggcaatagtggatccgttttggaggggcctggcagagttgtggcagatggcactggcacccgcactatcattgtgcctccactgaaaactcagcttggtgactgcactgtagcaacccaggcctcaggtctcctgagcaataagactaagccagtcgcttcagtgagtgggcagtcatctggatgctgtatcacccccacagggtatcgagctcaacgcggggggaccagtgcagcacaaccactcaatcttagccaggtaagtgctatgggctactgccttctgtttgggccctgcactgttgttactttctggagaaccctgcttctggctggatgctgaataaagccaaatgaagccccttttgtgtcaaacaaaaaaaaaaaaaaaa

SEQ ID NO: 6416 - DNA, 17207 bp, Homo Sapiens
  NM_152701
gactgagagcagggagcagcaggcatggggcatgccgggtgccagttcaaagccctgctgtggaagaattggctctgcagactcaggaacccggtccttttccttgctgaattcttctggccttgtatcctgtttgtaattctgacagttcttcgttttcaagaacctcccagatacagagacatttgttatttgcagccccgagatctacccagctgtggtgttatcccctttgttcaaagccttctttgtaacactggatcaaggtgtaggaacttcagctatgaagggtcaatggagcatcattttcgtttgtctaggttccaaactgcagctgaccccaagaaagtcaacaacctggcctttttaaaagagatacaagacctggcagaggaaattcatggaatgatggacaaggcaaaaaacttaaaaagactttgggtagaacgatccaacactccagattcttcttatggttccagtttttttacaatggatctcaataagaccgaggaggtaatattgaaactggaaagcctccatcagcagcctcatatctgggattttctacttttactgccgagactacacacaagccatgatcatgtggaagatggcatggatgttgcagtgaaccttctccagaccattttgaattccttaatatccctagaagatttagattggcttccactcaaccaaactttttcccaggtttctgaacttgtactgaatgtgaccatttcgacactgacatttctgcagcaacatggagtagcagtcaccgagccagtttaccacctgtccatgcagaatatagtgtgggatccacagaaagtccagtatgatctcaaatcccagtttggctttgatgatcttcacacggaacagatcctgaactcttcagctgaactgaaggagattcccacagacacttccttggagaagatggtgtgttcagtcttgtctagcacatcagaggatgaagctgagaaatggggccacgttggaggctgccaccctaagtggtcagaagccaaaaactatcttgtccatgcagtcagctggctgcgagtctaccaacaggtgtttgttcagtggcaacagggtagcctgcttcagaagacactcacaggcatgggccatagtctggaggctctcaggaatcagtttgaagaagagagcaagccctggaaggtggtggaagctctgcacactgcactgctcctgctgaatgacagcttgtcagcagatggcccaaaagataatcatacatttccaaagatattacagcatctgtggaaattgcaaagcttgctgcaaaacctgccccagtggccggcactgaagagatttcttcagcttgatggagctctcagaaatgcgatagctcagaatttacattttgtccaagaagtcctcatttgcctggagacatcagctaatgattttaaatggtttgaacttaaccaattgaaactggaaaaggatgtgttcttttgggagctgaaacagatgttggcgaagaatgctgtctgcccgaatggtcgtttctctgagaaggaggtctttttgccgcctggaaactccagcatatggggtggtctccagggactgttgtgctattgtaactcctctgagacgagtgttttaaacaagctacttggttcagtagaggatgctgatcgtattttgcaagaggtcattacttggcacaaaaatatgtcagttttaatacctgaagaatatttggactggcaggaacttgagatgcagctgtcagaagcaagcctttcctgtactcggctcttcctgctgctgggagctgatccctctcctgagaatgatgtcttttctagtgactgtaagcaccagcttgtctccacagtgatatttcatacacttgaaaaaacacaatttttcctggaacaagcatattattggaaagccttcaaaaagtttatcaggaagacttgcgaagtggcccaatatgtaaatatgcaagagagtttccagaacagactattggcttttcctgaggaatctccttgttttgaagaaaacatggattggaaaatgatcagtgataattattttcaatttttgaataacttactcaagtctccaacagcttccatatccagggctttaaatttcacaaagcaccttctaatgatggaaaagaagttgcacacccttgaggatgaacaaatgaactttcttttatcatttgtggaattttttgagaaattattgttgcctaatctttttgactcctccattgttcccagtttccacagcctcccatctctcacagaggatattctgaatataagttctctgtggacaaatcatttaaaaagtttaaagagagacccatctgccactgatgctcagaaactcttggaatttggcaacgaagtgatttggaaaatgcagactctcggaagtcactggataaggaaggaaccaaaaaatcttttgagattcatagaattaatactttttgaaattaatcccaaattactagaattatgggcctatggcatttcaaaaggaaaaagagctaaattggaaaacttctttacacttttaaatttttctgttccagaaaatgagattctgagtacaagttttaacttttcccagttgttccattcagattggcctaaatcaccagctatgaacatagattttgtacgtttaagtgaggctataataactagtctccatgaatttggatttttggagcaggaacagatctcagaagctctgaacacagtctacgctatcaggaatgcatctgatcttttctcagccctttctgaaccacaaaaacaagaagttgataaaattttgactcacatacacctaaatgtcttccaggacaaggattcagctttacttctgcaaatttattcttcattttaccgatatatttatgaattattgaatattcagagtagaggctcttcgttgactttccttacacaaatctcaaaacacattttggatatcataaaacaatttaatttccaaaacatcagtaaagcatttgcatttttatttaagacagcagaggttcttgggggaatttctaatgtatcttactgtcagcaattgctttcaatttttaactttttggagcttcaggcccaatccttcatgtctacagagggccaagaactggaagtgatccacactactttgacaggcctcaaacagctgctcataattgatgaagattttcgtatttctttatttcaatatatgagccaattcttcaacagttcagtagaagacctattggataataaatgcttgatttcggacaataaacacatttcttccgtaaattattcaacaagtgaggagtcttcatttgtttttccattggcacaaattttttcaaacctctcagcaaatgtcagtgtgttcaacaagtttatgtccattcactgtaccgtttcatggcttcaaatgtggactgaaatctgggaaaccatatctcaattatttaagtttgacatgaatgttttcacatctcttcatcatggtttcactcagcttttggatgaattggaagatgatgtgaaagtctctaaaagctgccagggtatacttcccacccataatgttgctagactcatattaaatttgtttaaaaatgtaactcaagccaatgacttccataattgggaggacttcctggatctcagggattttttggtagctttaggtaatgcattagtttcagtaaaaaaacttaacttggagcaagtggagaaatcccttttcaccatggaagctgccctgcatcagttgaagacatttccattcaacgaaagtacaagcagagagtttttaaattctctgcttgaagttttcattgagtttagcagtacctcagaatatatagtcagaaatctagattcaataaatgactttctttcaaataatctcacaaattatggagaaaaatttgaaaatatcatcactgagctaagagaagcaatagtatttcttagaaatgtatcacatgatcgagatttgttttcctgtgctgatattttccaaaatgttactgagtgtattttagaagatggctttttatatgtaaatacctcacagaggatgttacgtattctagacacgttaaattccacattttcctctgagaacacaattagcagtctgaaaggatgcattgtatggttagatgtcataaaccatttgtatttgttgtctaactccagtttttcacaaggtcatcttcaaaatattttggggaatttcagagatatagaaaacaaaatgaactctatattaaaaattgtaacttgggtgttaaatataaaaaaacctctttgttcatcaaatggctcacatataaattgtgtcaatatttacttgaaagatgtaactgactttctaaatattgtacttactacagtctttgaaaaagagaagaaacctaaatttgagattttattagctcttttaaatgattccacaaagcaagtaaggatgagtatcaacaacttaacaacagactttgattttgcatctcagtccaattggagatattttactgaattaattctaagaccaatagaaatgtcagatgaaattcctaatcagtttcaaaatatttggcttcatttaataacactggggaaggaatttcagaagcttgtaaaaggtatttactttaacatcctggaaaataattcctcttctaaaactgaaaacttgttaaacatatttgccaccagtccaaaagaaaaggatgtaaacagtgtaggcaattccatttatcacttagctagttaccttgccttcagcttatctcatgacctccaaaattcaccaaaaataataatttcacctgaaataatgaaagctacaggtcttggtattcaactgataagggatgtgttcaactccttaatgcctgtagttcatcacactagtccacaaaatgcaggttatatgcaagctttgaagaaggtaacttctgtcatgcgtacccttaagaaggcagacatagaccttttagtggatcagcttgaacaagttagtgtaaacctaatggatttctttaagaatatcagtagtgtgggaactggcaatttagtggtcaatttgcttgttggcttgatggaaaaatttgcagacagctcacattcttggaatgttaatcatctgctgcagctctcacgcctgtttcctaaagatgttgtggatgctgtgatagatgtgtactatgtgcttcctcatgctgtaaggctcctgcagggagtacctggtaaaaacatcactgaaggcctcaaggatgtctacagcttcacactccttcatggcataaccatttcaaatatcaccaaggaagacttcgcaattgtgataaaaattcttttggatacaattgaattagtatcagataagccagatattatttcagaggctttagcttgttttcctgtggtttggtgctggaatcacacaaattctggatttcggcagaattcaaagatagacccctgcaatgtccatgggctcatgtcttcttccttttatggcaaagtggccagtatacttgatcatttccacctgtctccccaaggtgaagattcaccatgttcaaatgaaagctcccgaatggaaataactaggaaagtggtctgcataattcatgaattagtggactggaattctattcttctggagctctctgaagtcttccatgttaacatttctcttgtgaaaactgtgcagaaattttggcataagatattaccgtttgtcccaccttcaataaatcaaactagggatagcatctctgaactctgtcctagtggttccataaagcaagttgctttgcaaatcatagaaaaacttaaaaatgtcaactttacaaaagttacatcaggtgaaaatattcttgacaaactaagtagtttaaacaagatccttaacattaatgaagacacagagacatctgttcaaaatattatttcctcaaatttggaaaggacagtacaattgatttctgaagactggagcctagaaaaaagtacgcataatctactctctttattcatgatgctccagaatgcaaatgtcacaggtagcagtttagaagcattatcaagttttattgaaaaaagtgaaacaccttacaactttgaagaactatggcccaagtttcaacaaatcatgaaagacctaacccaagattttagaatcagacacctgctttctgaaatgaacaaaggaatcaaaagtataaattcaatggctcttcaaaagataactttgcagtttgcccatttcctggaaatcctggattcaccgtcattgaagacattagaaattattgaagattttctattggtcacaaaaaactggcttcaggaatatgcaaatgaggattactccagaatgatagaaacattattcattcctgtgaccaatgagagttcaactgaagatatagctttgttagccaaagctattgctactttttggggctctttaaaaaatatatctagagcaggcaattttgatgttgcctttcttacccatctgctaaatcaagaacagctgactaatttctcagttgttcagctgctttttgaaaacatcctaattaatttgatcaataacttagctgggaattctcaggaagcagcttggaacttaaatgatactgaccttcaaataatgaatttcattaaccttatcttgaaccatatgcagtcagaaactagtaggaaaacagttctctctctgagaagcatagtagatttcacagaacagtttttgaaaacattcttctccctttttctaaaggaagattctgagaacaaaatatctcttctgctgaaatatttccacaaagatgttattgcagagatgagttttgtcccaaaagataaaattctagaaattctgaaactggatcaatttcttaccctgatgatacaagacagattgatgaacattttttcaagtttaaaggagactatatatcacctaatgaaaagttcatttatattagacaatggagaattttattttgatactcatcaaggactgaagttcatgcaagatttatttaatgcccttctcagggaaacttcaatgaaaaataagactgaaaataatatagactttttcacagtggtgagtcagttgtttttccatgtgaataagtctgaggacctcttcaaactcaatcaagatcttgggtcagctcttcaccttgtaagagaatgttcaacagagatggcaagacttctggatacaattttacactctcctaataaggacttctatgctttgtatcctaccctccaagaagttatacttgctaatctaacggatttgcttttctttataaataattcattccctctaagaaacagagcaacattagaaattactaagagattagttggtgctatttcaagagcaagtgaagaaagtcacgtcctgaaacccctcttagaaatgtctgggactctggtcatgctgttgaatgacagtgctgacctgagagatcttgccacatcaatggactccattgtgaaacttcttaagctggtcaagaaagtttcggggaagatgtccacagtttttaaaactcattttatctccaataccaaggacagtgtgaaattctttgacactctgtattccatcatgcaacaaagtgttcaaaatcttgtgaaagaaatagctactttaaaaaaaatagatcatttcacatttgaaaagataaatgatttgttggtgccatttcttgacttggcctttgaaatgattggggtagaaccttatatatcatcaaactctgatattttcagtatgtcacctagcatactctcatatatgaaccaatctaaggacttttctgatattttggaagaaattgctgaatttttaacatctgtgaaaatgaacttggaagatatgaggagtcttgcggtagcatttaacaatgagactcaaacattttctatggattctgtcaacttacgggaagaaattctgggttgcttagttcctataaataacatcaccaaccaaatggacttcttataccctaatccaatttccactcatagtggccctcaagatataaaatgggaaataattcatgaagtgatcccttttttggataaaatattatcacaaaacagcacagaaataggatctttcttgaaaatggtgatctgtctcaccttagaagctctttggaaaaacttaaagaaagataattggaatgtttctaatgtgttgatgacatttactcagcatccaaataaccttttgaaaaccatagaaacagttttagaggcctccagtggaattaaaagtgactatgaaggtgatttgaataaaagtttatattttgacacacctttgagtcagaatataactcatcatcaacttgaaaaagcaatccataatgttttaagtagaatagctctctggaggaaaggacttctgtttaacaactctgaatggataacttccacaagaactttgtttcagccactttttgagattttcattaaagcaaccaccggaaagaatgtcacatcagaaaaagaagagagaaccaagaaagagatgattgactttccttatagtttcaaaccatttttctgtttggagaaatacctgggaggattatttgtattgactaaatactggcaacaaatcccactaacagatcaaagtgttgttgagatttgtgaagttttccagcagactgtgaagccctcagaagccatggagatgctgcagaaagtgaagatgatggtcgtacgtgtgctcaccatcgttgcagaaaacccttcctggaccaaggacattttgtgtgctactctgagttgcaagcaaaatgggataaggcatctcattttatctgctatacaaggggtcactttggcgcaggaccacttccaggaaattgaaaagatatggtcctcgccgaatcagctaaattgtgaaagtcttagcaagaatctttctagcaccttggagagcttcaagagcagcttggaaaatgccactggccaggactgcacaagccagccgaggctggagacggtgcagcagcacttgtacatgttggccaaaagcctcgaggaaacttggtcatcagggaatcccatcatgacttttctcagcaatttcacagtaactgaggatgtaaaaataaaagatttgatgaagaatatcaccaagttgactgaggagcttcgctcttccatccaaatctcgaatgagactatccatagcattctagaagcaaatatttcccactccaaggttctcttcagtgccctcaccgtagctctgtctggaaagtgtgatcaggaaatccttcatctcctgctgacatttcccaaaggggaaaaatcttggatcgcagcggaggaactctgtagcctgccagggtcaaaagtgtattctctgattgtgttgctgagtcgaaacttggatgtgcgagctttcatttacaagactctgatgccttctgaagcaaatggcttgctcaactccttgctggatatagtttccagcctcagcgccttgcttgccaaagcccagcacgtctttgagtatcttcctgagtttcttcacacatttaaaatcactgccttgctagaaaccctggactttcaacaggtttcacaaaatgtccaggccagaagttcagcttttggttctttccagtttgtgatgaagatggtttgcaaggaccaagcatcattccttagcgattctaatatgtttattaatttgcccagagttaaggaactcttggaagatgacaaagaaaaattcaacattcctgaagattcaacaccgttttgcttgaagctttatcaggaaattctacaattgccaaatggtgctttggtgtggaccttcctaaaacccatattgcatggaaaaatactatacacaccaaacactccagaaattaacaaggtcattcaaaaggctaattacaccttttatattgtggacaaactaaaaactttatcagaaacactgctggaaatgtccagccttttccagagaagtggaagtggccagatgttcaaccagctgcaggaggccctgagaaacaaatttgtaagaaactttgtagaaaaccagttgcacattgatgtagacaaacttactgaaaaactccagacatacggagggctgctggatgagatgtttaaccatgcaggcgctggacgcttccgtttcttgggcagcatcttggtcaatctctcttcctgcgtggcactgaaccgtttccaggctctgcagtctgtcgacatcctggagactaaagcacatgaactcttgcagcagaacagcttcttggccagtatcattttcagcaattccttattcgacaagaacttcagatcagagtctgtcaaactgccaccccatgtctcatacacaatccggaccaatgtgttatacagcgtgcgaacagatgtggtaaaaaacccttcttggaagttccaccctcagaatctaccagctgatgggttcaaatataactacgtctttgccccactgcaagacatgatcgaaagagccatcattttggtgcagactgggcaggaagccctggaaccagcagcacagactcaggcggccccttacccctgccataccagcgacctattcctgaacaacgttggtttcttttttccactgataatgatgctgacgtggatggtgtctgtggccagcatggtcagaaagttggtgtatgagcaggagatacagatagaagagtatatgcggatgatgggagtgcatccagtgatccatttcctggcctggttcctggagaacatggctgtgttgaccataagcagtgctactctggccatcgttctgaaaacaagtggcatctttgcacacagcaatacctttattgttttcctctttctcttggattttgggatgtcagtcgtcatgctgagctacctcttgagtgcatttttcagccaagctaatacagcggccctttgtaccagcctggtgtacatgatcagctttctgccctacatagttctattggttctacataaccaattaagttttgttaatcagacatttctgtgccttctttcgacaaccgcctttggacaaggggtattttttattacattcctggaaggacaagagacagggattcaatggaataatatgtaccaggctctggaacaagggggcatgacatttggctgggtttgctggatgattctttttgattcaagcctttattttttgtgtggatggtacttgagcaacttgattcctggaacatttggtttacggaaaccatggtatttcccctttactgcctcatattggaagagtgtgggtttcttggtggagaaaaggcaatactttctaagttctagtctgttcttcttcaatgagaactttgacaataaagggtcatcactgcaaaacagggaaggagagcttgaaggaagtgccccgggagtcaccctggtgtctgtgaccaaggaatatgagggccacaaggctgtggtccaagacctcagcctgaccttctacagagaccaaatcaccgccctgctggggacaaacggtgccgggaaaaccactatcatatccatgttgacggggctccaccctcccacttctggaaccatcatcatcaatggcaagaacctacagacagacctgtcgagggtcagaatggagcttggtgtgtgtccgcagcaggacatcctgttggacaacctcaccgtccgggaacatttgctgctctttgcttccataaaggcgcctcagtggaccaagaaggagctgcatcagcaagtcaatcaaactcttcaggatgtggacttaactcagcatcagcacaaacagacccgagctctgtctggaggcctgaagaggaagctctcccttggcattgctttcatgggcatgtcgaggaccgtggttctggatgagcccaccagtggggtggacccttgctcccggcatagcctgtgggacattctgctcaagtaccgagaaggtcgtacgatcatcttcacaacccaccacctggatgaagctgaagcgctgagtgaccgcgtggccgtcctccagcatgggaggctcaggtgctgcggtcctcccttctgcctgaaggaggcatatggccaggggctccgcctgacactcacgaggcagccttctgttctggaggcccatgatctgaaagacatggcttgtgttacatccctgataaagatctatattccacaagcatttctcaaagacagcagtggaagtgagctgacctacaccattccaaaggacacagacaaggcctgcttgaaagggctcttccaggccctggatgagaacctgcatcagctgcacctgacgggctatgggatctcagacaccaccttagaagaggtgtttttgatgcttttgcaagattccaacaagaaatctcacattgccctggggactgagtcagagctgcagaaccacaggcctacaggacatctgtctggctactgtggctccctagcacggcccgcaactgtgcagggcgtccagctgctccgcgcacaagtggccgcgatcctggcccggaggctccgccgcacgctgcgcgccgggaagagcaccctcgccgacctgctgctgccagtcctcttcgtggccttggccatgggcttgttcatggtgagacccctggccaccgagtaccctcccctcagactcacacctggacattaccagcgggccgagacctactttttcagcagtgggggcgacaacttggacctcacccgtgtgcttctgcggaagtttagagatcaagatttgccctgtgcagatttaaacccacgccagaagaattcttcatgctggcgcacagatcccttttctcacccagaattccaggattcatgtggctgcctgaagtgtccaaatagaagtgctagtgctccctacctgaccaaccacctgggccacacactgttgaatctctcaggcttcaatatggaggagtacttgctggcaccatctgaaaaaccaaggcttggaggttggtcttttggattaaaaatccccagtgaagctggaggtgcaaatggaaacatatcaaaacccccaactctggcaaaggtgtggtataatcagaagggttttcattccctaccttcctacttaaatcatctaaacaaccttattttgtggcagcacctaccccctactgtggactggagacaatacggaataacactctacagccacccatatggaggggccttgctgaacaaggacaagatcctggagagcatccgtcagtgtggagtggccctctgcatcgtgctgggattctccatcctgtctgcatccatcggcagctctgtggtgagggacagggtgattggagccaaaaggttgcagcacataagtggccttggctacaggatgtactggttcacaaacttcctatatgacatgctcttttacttggtttccgtctgcctgtgtgttgccgttattgtcgccttccagttaacagcttttactttccgcaagaacttggcagccacggccctcctgctgtcacttttcggatatgcaactcttccatggatgtacctgatgtccagaatcttttccagttcggacgtggctttcatttcctatgtctcactaaacttcatctttggcctttgtaccatgctcataaccattatgccccggttgctagccatcatctccaaagctaagaatttacagaatatctatgatgtcctcaagtgggtctttactatttttcctcaattctgtcttggtcaaggactggtagaactctgctataatcagatcaaatatgacctgacccacaacttcggcattgattcctatgtgagtccctttgagatgaactttctgggctggatcttcgtgcaactggcctcgcagggcacagtacttctcctcttgagggttctgctacactgggaccttctgcgatggccaaggggtcattctactctccaaggcacagtcaaatcttctaaggatacagatgttgaaaaagaggaaaagagagtgtttgaaggaaggaccaatggagacattcttgtgttatacaaccttagtaaacattatcgacgctttttccagaatattattgctgtgcaagatattagtttgggcataccaaaaggagagtgctttggacttctaggggtgaatggagctgggaagagcacgactttcaaaatgctgaatggtgaagtttctctaacttcaggacatgctatcatcaggactcccatgggagacgccgtggacctgtcttctgctggcacggcaggcgtgctcattggctactgtccccagcaggatgccctggacgagcttctgactggttgggaacatctctattattactgtagcttacgcgggattccaaggcagtgcatccctgaggttgctggagacctcatcaggcgcttacacctcgaagcccacgcggacaaacctgtggccacctacagtgggggaaccaagcggaaactctctacagccctggccctggtggggaaacctgacattcttttattggatgagcccagctctgggatggatccctgctctaagcggtacctgtggcaaacaataatgaaggaggttcgggaaggctgtgctgcggtgctgacctcccacagcatggaggagtgtgaggctctttgcacaagactggccataatggttaacggcagcttcaaatgtcttggttctcctcagcacatcaaaaataggtttggtgatggttatacagtcaaagtttggctctgtaaggaagcaaatcaacattgcactgtttctgaccacttgaagctttattttccaggaattcagttcaagggacagcacctgaatttattagaatatcatgtgccaaaaagatggggatgcctagctgacttgttcaaagttatagagaacaataaaaccttcttgaatattaagcattattccattaaccaaaccactttggagcaggtatttattaattttgcttctgagcagcagcaaactctacaatctactcttgatccatccactgacagtcaccacacacatcacttgcccatctgagcactaaagaagtttccataaggaataaaaccttgtcttccattacaattaacagtcaaggataaaacaagcacgcgcacaatcaaggagctggaacacactctccaggccgtcaaattattctcttgttcattttctattttgaatctccttgttagttaataaccaccaaatggaaaggtcattctttctgcagacttttggggagctcctccaaaacatttgttctctttaccatgccagatggacaccagcttctttgtgacaaaggcatgaatgatttgacagtgtccaaactgagacattctggagctggaaagcctgtcacactagagtgtgtgtgacatgtccactctaaacatgtcacttttctgttaagaaaactgagccccctccccacaggttaaaaaactttagtaacttgtttgtatagaaaatagtaacaaggactattttctattgttgtcatctatttactagatacatgtttttaatgattttaatgtaagcttttattaatactgatgacattatatggtatgatatgaaaaaatcaccaattttttacatataaaagatacctttttaaaaaaataggttttaagagctcttttagtatacactttagcaaaattaattaaattgaactagttactctgtatcaattacagtagttctaccagaatctcccaggttataatttatgagggtagagaaataaaatgtagatgcattttctttttcttcatttggatgaataattactgttttttgttattctaagtcagtgtttttcaaagcgtagtggtccccatattagctgcattgccatcttctgggagcttgcaagaaatgtacattctcaggatccactccagacctattgaatctcaaattctggggcttaaacaagcacattccaagttaagaaccaatgacctaagggaatgtctggttacctcctagttatacaagcaaaatctgcatagtatgtagtcttttttatttatttattttttttttttgaggcggagtctcgctctgtcacccaggctggagtgcagtggcgcgatgtcggctcactgcaagctccgcctcctgggttcacgccattctcctgcctcagcctccccagcagctgggactacaggcacacatcgccacacccggctaatttttagtatttttagtagagacggggtttcaccgtgttagccaggatggtctctatctcctgaccttgtgatccgcccccctccacctcccaaagtgctgggattacaggcgtgagccaccgtgtccggccgtagtttattttaaaatatatttttaaaagctttgtaaaaattatgtcattctcagaattgttgtcttcaaagcattgtcagatgtagagtgctcagatgtggctcttaaagactatatacatctgaatttttcatcctatagttagtaagatgcataaaatcaatccactactgaaatagtttccagtcagacatttctgagttcagacatttctcaacattcttttaacaacatttttctgaatcctcaatagaaaatcacattaatcttattttaaaatttggcctttttcaacactaacgttgagtaccggtagcttgtgatcaaaggcatatacttccttatgagatttctttactaaagcaagatttcattaaatctctatttcctaaatatcattctatacaaaagatattttttaaacggtaaggattaagacaatcactgatagctttgttgtgagcaattttgattcccatgtatcacatgaattacacttccttaaataaattacagtttatggctgtatgatttattctctaattctaacatagtctagttgtcaaaaggaaatatgtaatctttttatgattgttgaatcaataaataccaatttgtgaaacatgaatgtgtttaaactgcagtgaataaatgagatgtgctttaatttaacccaaaaaaaaaaaaaaaaaaaaaaa

SEQ ID NO: 6417 - DNA, 2803 bp, Homo Sapiens
  NM_152713
ctcctgccagggttgggtgcgccgctgaacggatggctgagggagccccgcggatcgtttaggaaagccggccagctgatcgtcgtgtgttgccacccattcatgtcaagatgactaagtttggatttttgcgattgtcctatgagaagcaggacacacttttgaagcttctcattctgtcaatggctgctgtattatccttctccactcgtctgtttgctgtcctgagatttgaaagtgttatccatgagtttgatccgtactttaattatcggactaccaggttcctggctgaggaggggttttataaattccataactggtttgatgaccgagcctggtaccctttgggacgaatcattggaggaacaatttacccaggtttaatgatcacctctgctgcaatctaccatgtactccattttttccacatcaccatcgacattcggaatgtctgtgtgttcctggcccctctcttctcctccttcaccaccatcgtcacgtaccaccttaccaaagagctcaaggatgcaggggctgggcttcttgctgctgccatgattgctgtagttcctggatatatctcccgatctgtggctggctcctatgataatgaagggattgccatcttttgcatgctactcacctactacatgtggatcaaggcagtaaagactggttccatctgttgggcagctaagtgtgcccttgcttatttctacatggtctcgtcatggggaggttatgtgttcctgatcaacttaattcctctccacgtcctcgtgctgatgctcacaggccgtttctctcaccggatctatgtggcctactgtactgtttactgcctgggcactatactttctatgcagatctcctttgtgggtttccagcctgtcctttcatcagagcacatggcagcctttggggtctttggtctctgccagatccatgcctttgtggattacctgcgcagcaagttgaatccacaacaatttgaagttcttttccggagcgtcatctctctggtaggctttgtccttctcaccgtgggagctctcctcatgctgacaggaaaaatatctccctggacggggcgtttctactcgctgctggatccctcttatgctaagaacaacatccccatcattgcttctgtgtctgagcatcagcccacaacctggtcctcatactattttgacctgcagctcctcgtcttcatgtttccagttggcctctattactgctttagcaacctgtctgatgcccggatttttatcatcatgtatggtgtgaccagcatgtacttttcagctgtaatggtgcgtctaatgctagtgttggcacctgttatgtgcattctctctggcattggagtctcccaggtgctgtccacatacatgaagaatctggacataagtcgtccagacaagaagagcaagaagcaacaggattccacctaccctattaagaatgaagtggcaagtgggatgatactggtcatggctttctttctcatcacctacacctttcattcaacctgggtgaccagtgaggcctactcttctccgtccattgtactatctgcccgtggtggggatggcagtaggatcatatttgatgacttccgagaagcatattattggcttcgtcataatactccagaggatgcgaaggtcatgtcctggtgggattatggctatcagattacagctatggcaaaccgaacaattttagtggacaataacacatggaataatacccatatttctcgagtagggcaggcaatggcgtccacagaggaaaaagcctatgagatcatgagggagctcgatgtcagctatgtgctggtcatttttggaggcctcactgggtattcctctgatgatatcaacaagtttctttggatggtccggattggagggagcacagatacaggcaaacatatcaaggagaatgactattatactccaactggggagttccgtgtggaccgtgaaggttctccagtgctgctcaactgcctcatgtacaagatgtgttactatcgctttggacaggtttacacagaagccaagcgtcctccaggctttgaccgtgtccgaaatgctgagattgggaataaagactttgagcttgatgtcctggaggaagcatataccacagaacattggctggtcaggatatacaaggtaaaggacctggataatcgaggcttgtcaaggacataaatgtcacgtccagctctgatatgcttcgcactgagcacatcacatttaggacgttgaagatttttttttttttttttttttaatatgcagtttgtaagaacaaaactggatggcatcagaattgtctggaagttttgtcttgggcagtatgggctgggccaaatgaaatgatttttataattctaaacaggttaccaaatgaaatgtcatggctttactttggtcaattaaaggggggaatttttttaaaaaatgtgccttatttgttttgacttataactgatttgagggaggcaaaagctatgctaggctgccagaaggacataagcagaccttgtccattctcttagctccctaaattagccaaatagagacttctttctcaaatcaggaaaactatcaaagaccaattcagatcctacatttacagacagttttgtcataaccctttgcattgcagcacctagtacaattccttggaaacagcgtggctcaataaatttttattgaatgaataaatgtgggaccagaagagtgctagaagagtgcctttctgggctactatgtctctgttc

SEQ ID NO: 6418 - DNA, 4041 bp, Homo Sapiens
  NM_152715
ttccgggtcaatgcaggacactgggctccggcggccagagtgggggactaggtgaagcggcgccgggccggggctggccgggaccaggcccgaggctgagcggcggcgacagcggtggccgggaggggggaggagaggcgcagccagaggagccgccgcagtagctcccccgcctcccgggctgagggcattttaagaaagaaagatggatcaacctagtggaagaagtttcatgcaagtattatgtgaaaaatatagtcctgaaaattttccttatcgccgtggcccggggatgggagtccatgtcccagccacacctcagggctctcctatgaaagatcgcctcaacctcccaagtgtactagtgttgaacagctgtggaataacctgtgcaggagatgaaaaagaaattgctgctttctgcgctcatgtgtcggaactagatctttctgacaacaaactcgaagactggcatgaggtcagtaaaattgtgtcaaatgttcctcagttggagtttctaaacctgagttccaaccctctgaatttgtcggttttagaaagaacatgtgctgggtccttctctggggttcgcaaacttgtcctcaacaacagcaaagcttcttgggagacggtccacatgatactacaggagttaccagatttggaggagctcttcctgtgccttaatgactatgaaacagtgtcttgtccttctatttgctgtcattctcttaagctactacatataacagacaataacctccaagactggactgaaatacgaaagttaggagttatgtttccttcactggataccctcgtcctggccaacaatcatttgaatgctattgaggagcctgatgattcattggccaggttgtttcctaatcttcgatccatcagcctccacaagtcaggtttgcagtcctgggaagacattgataaactaaattcatttcccaaactggaagaagtgagattgttaggaattcctcttctgcagccatataccaccgaggagcgaaggaaattggtaatagccagattgccatcagtttccaaacttaatggcagcgttgttactgatggtgaacgagaagattctgagagattttttattcgttactatgtggatgttccacaggaagaagtgccattcaggtatcatgaactgatcactaaatatgggaagttggagcctttggcagaagtggacctaagaccccagagcagtgcaaaagtagaagtccactttaacgatcaggtggaagaaatgagcattcgtctggaccaaacagtggcagaactaaagaaacagttaaaaactctagtacaattacccacaagcaacatgcttctctactattttgaccatgaagcaccctttggcccagaggaaatgaagtacagctctcgggcattgcattcctttggcattagggatggagataaaatttacgtggaatccaaaacaaaataacctctaccagccttgtgaaaaacatacacataaggacttgttgcagggcatttgtttttaatgtggttttctttaggagggagaggttgtttttgttttgttttgttctgtttaggtttgggaaggattttgtatatttttccccctggagtgagtaggggccatttttgggtgttttctaccacagattgatttggctcagccagcggaattggccacatttccagtgtatgtgccctctctaaggaaagatgacaaagaaatcaccgacttcttactgtgttcactgggatttgcctgccacttggttatcattactgttgggtgaacctgtgaagataacatgaacactgtagccccttagaagggtctcatagagaatttaaacagggtgacaaggaatcttcacaggaagggccagaacttctctctcccagttcttccttccgctaccctccctccttggcttttttggttcagttccatttttttttcattttgacatgtggtttacctaatagttttgttctgttcataattcttatttctcaacctgggtgatttttttgttctcatttctcccttttgaaataattgaaagtgttttaagcatttttaacctgattctaatctcaggtacgcagtaagaagctataactctgttagaacctcgaagagtagatgtagaatgaaaactccaggaaaacttgcagttattctggaagcaccggcagaacagtctgatctctttgtatgttactaactcacttttaatgtccctgtacattatgtcagccattactttcataacatgaaatatgtcagattccagagttcttttatttttgcttattgaatgtatttcctcatatctttctttttcattactttaaactattgggaattgaggcctgacttcataaataattcaatagagtcctggatacgtgcaccaggagagttgagaattagctcataaactatctgtggtgtgtgtggggaatgaagttgggggatgtgggggaagagcttatgactttcccacctgtgtcatccattggaagcccttgctcttgcactttgcattaaaagtgggaaacattaatcaaagggagattttattcccaggttttccctgggactttgtgatatcataattgaacagttcttttgttttacatttcaatttagttgcctcatagaagtataactgcccaatctatgagtaaagtgtaagtgtcaaaactttacaattgcctccaagtcatattttttgcagaagcacatttaaagcacttttctgtaaaagctagttccttacctgcttggaaatctttttgtttgttcttctattcctttgttaatcagatgtaatccctttctttaatgtgtatttttcttggtccaccatgtttacagatgggagacttgagagatacttagcataactggggcagaaagtgtgtaagtgaagtatttttcaaagaatgcagttattatctgattgcatttgaccttttgacctttgttacataattctacccctcctacaaatttaatttttttatgaaatttttaggtgacttgtaaattcttcatgtatgaggagttgtgtttattaatgctactttttaaattttcctgtgccatgtggcagatgtttattctcttaatgcacttcaggtttgctatctgtaaagcctttgacccaggcctactgagtcaaatctacattcagtgtaacattaaaggtggaaaccaaagggtttgagaaagacgaataaggcctattctccttctgctgcagactttatctttcaaaatcataaaaatgagcaatggagatccaggctgggtatagacaagaataattattttgcaaacacattttcctgacagatttttggaagtaggaaaaaagtatggcaacagtgtcatgaagattgaaactgtaggtgctttgtgtatgtatgcatgagtgcagatgagtttgagagagaaaaagtgtaattgagccctttgcttttgtcagcctgggaaacagatgcgttcttattttttgaagttgtgtgaccctggactgtcccacagcagaaggcagaacaaacacttatgttatgctttaatcataagtggaatggtcacaattaataagatattttatatatggcaaagttttatgaaatgcttttttactattagagacctgtttcttctgttattacagaacacagtgtttatcaactgcggacataattcttttattatacagttgcatgtaaagggagcttctcatttaattcagcggatgtgggtatttttagggcattgtaattgatggttttaataattgctgaataatttttgattaagagaaaaatgtaatacaattactggtctgagttacagaacagaagttaatgaaaaaggctatttgagcatgtgtacttatagattcatttgggtggctgagaaaagatgctgcttttgaaataaaattggtgctgtgtagacacttgtaaccaaaattatttttataacagaactaaaaaaaaaaaaaa

SEQ ID NO: 6419 - DNA, 3193 bp, Homo Sapiens
  NM_152729
gccgcgtccggcccggtcctgtcccgcagcgtcccgccagccagctccttgcacccttcgcggccgaggcgctccctggtgctccccgcgcagccatggctcagcacttctccctggccgcctgcgacgtggtcggattcgacctggaccacactctgtgtcgctacaacctgcccgagagcgccccgctcatttataatagctttgcccagttcctagttaaggagaaagggtacgataaggaattgctcaatgtgaccccagaggattgggatttctgttgcaaaggtttggcattggatctagaagatgggaacttccttaaacttgcaaataatggcactgttctcagggcaagccatggcaccaagatgatgactccagaggtgctggcagaggcatatggcaagaaagagtggaagcacttcttgtcggacactggaatggcttgccgctcaggaaagtattacttttacgacaactactttgacctgccaggagctcttctgtgtgccagggtggtggactatttaacaaaactgaacaatggtcaaaaaacatttgatttttggaaggatatagttgctgctatacaacacaattataaaatgtcagcttttaaggaaaactgtggaatatattttccagaaataaaaagagatccaggcagatatttacatagttgtcctgaatctgtgaaaaaatggcttcgacagctaaagaatgctgggaaaattcttctgttaattaccagttctcacagtgattactgtagacttctctgcgaatatattcttgggaatgattttacagacctttttgacattgtgattacaaatgcattgaagcctggtttcttctcccacttaccaagtcagagacctttccggacactcgagaatgatgaggagcaggaggcactgccatctctggataaacctggctggtactcccaagggaacgctgtccacctctatgaacttctgaagaaaatgactggcaaacctgaacccaaggttgtttattttggtgacagcatgcattcagatattttcccagctcgtcactatagtaattgggagacagtcctcatcctggaagaactcagaggggatgaaggcacgaggagtcagaggcctgaggagtcagagcctctagagaagaaaggaaaatatgagggaccaaaagcaaaacctttaaatacttcatctaaaaaatggggctctttttttattgattcagttttgggactggaaaatacagaagactccttggtttatacatggtcttgtaagagaatcagtacttacagcactattgcaattccaagtattgaagcaatcgcagaattacctctggactacaaatttacaagattctcttcaagcaattcaaaaacagctggctactatccaaatcctccactggtcttatcaagtgatgagacactgatatccaaataagttgtctttactgaaaaatgaagtgaagacccatatatgcagttaaaaaaaagttaattttcaaaaaatactgtaaaagactttaaggaacaagttttattgaccaataagttgatatttgtccataggtctcctttctataaatcatcttgatgtttaacaactcttattatattaaaatctcagtatcctaaaacttagaaccttattgatattttctatacagtagttttgtgattagaattcacctggggacacacactcacacgcacagtcactcttacacatatgcctagtccagtggttctcaaagtgtgatccatagactaatagcatagcattacctgagaacttgataatgcatatttgcaggccccacgcaaaacctgctgaatcagaagctctgagagtaaggcctaccaatctggtttaacaagcccgtcaggtgattctgatttacagtacagtttgagacccactggctagaacatatcctccagagacttggcttaattggtctgggtaaatatggctgagcgttgttatcttttgttatcttttatatgccctaggaaagtacaaccagaattgaaaaccaactgatctataccagttctttcaattaatagtcaagaacattgagtccagtgagattaagtgatttttgcaggctatgaggttttatgctattcctgtgttctccaaaacaagaaaataaaaagacatgacttattctctgttcatacagcaagtatggaaaaaagatgatctagaagtcaactatctcaacctccattgttacccactaggtttttttctaataatgttaaaggctatttaatttatttaatcaactttaagcattacattctcaattggggacaaaaattggttcttggggtgaaaaaatattagatatggcttgtggacttccaatatcatcctatccaacaaaatcttattccttagtattaatttatctcattgggaagaaatttgtagttaaaactatttaatgtaatttgaatttaatttctgtaattgggaaggagggtaataatgaacaaaaagtttgagaaaaaaatgctttaatgggttttacaggcatgctacaatccaggactgtggtgttctatgtgccgtgtatggtcatattagtagctatttgttgcaagatacttgaagccaaatgtttgcagtataggttcctggctactgtttatgctgtgatttcactctgtctatcatgggcagtattagaaaacacactggttttcactatctggtttacaaacactatcattattttacctggattgaagtgcagaatttggcatatcgatgcatgcaatggaaagaaaaaaaatttgttaaaatttgtaaatgttcagctaaatctcagatatactgtgggatgagtatctcagggtaagtaacaaaaaaacaaacaaaaaaaatcactgaaatttttccctcacagtcagtagctttgtttgatatttaacaataagtatatggtgatatacttgaaatttatgtccagaatgtcactggaatattacaatgagcataaataatcaagcttaggactaaatgaaagatactatctcatgtatgctttaaatagagaatttatttcttttaaaaataaagctatttttccttaaaaaaaaaaaaaaaaaaaaaaaaaaaaaaaaaaaaaaaaaaaaaaaaaaaaaaaaaaaaaaaaa

SEQ ID NO: 6420 - DNA, 962 bp, Homo Sapiens
  NM_152732
agcttcaggtctccatggaggcggcttctcctagcaactcgacgggcgttgagcggagccgctgacctgatggacgccgacagcctcctgctgtctctggagctggcgtccggcagtgggcagggcctcagcccggaccgtcgggcctcgctgctcacgtctcttatgctggttaagcgcgactaccgctatgatcgggttctcttctggggccgcatccttggcctcgtcgccgattactacatcgcgcagggcctgagtgaggaccagctcgcaccgcgcaagacgctctatagcctgaactgcacagagtggagcctcttgccccctgccacagaggagatggtggcgcagtcgtctgtggtgaagggccgcttcatgggggacccatcatacgaatatgaacacactgagctgcagaaggtgaatgaaggtgaaaaagtctttgaagaagaaatagtggtccagatcaaggaagagacccgcttggtgtctgtcattgaccagattgacaaggctgtggccatcatcccccgaggcgccctcttcaagaccccttttggacccacccatgtcaatcggacctttgaaggactgtccttgtctgaggccaagaagctcagctcctacttccatttcagggagcctgttgagctaaagaataagaccttgcttgagaaggctgacctggacccctccctggatttcatggactccttggagcatgacattcccaaagggtcctggagcatccagatggagaggggcaatgccctggtggtgctgcgcagcctgctctggccgggcctcaccttctaccatgctccccgcaccaagaactatggctacgtctacgtgggcactggcgagaagaacatggacttgcccttcatgctatagaatgggagccagcctggatgtttttaaacagagtctaaacatgattttcttaagcttcagtg

SEQ ID NO: 6421 - DNA, 2730 bp, Homo Sapiens
  NM_152735
ttccggtctgggacggagctgtagcggcactgtaactgcgagggcagcgccgcgtgtgtaacggcgggggcgtgtcggcgggaaggacaatcgggccgggactcgcggtgtccgggtgaccgcggcttcccgggagcagacctctgtgggcactgtgaggcggaacggagcggcggggcaggagctgttctgggcagccttcatcccgcgtggagtctacccccaagcccttctcctcttcccaattcttgtcaccttcgaggaggccatggaaaccccaacacctttgccgcctgtacccgcctccccgacctgcaacccagccccacggacaatccagatcgagttcccacagcatagctcgtctctgctggaatctctgaaccgccacaggctagagggaaagttctgtgatgtgtccctcctggtgcagggccgggaacttagggctcataaagcagtgttagctgctgcctctccttacttccatgacaagctgcttctgggggatgcgcctcgtctcactctaccgagtgtcattgaagccgatgccttcgaggggctgctccagctcatttattcagggcgtctccgcctgccactggatgctcttcctgctcatctccttgtggccagtggccttcaaatgtggcaggtagtagatcagtgctcagaaattcttagagaattagaaacttcaggtggtggaatttcagcccgtggaggaaactcctaccatgcccttctttccactacatcctctacaggaggctggtgcattcgctcttcgcctttccagaccccagtacagtcctctgcttctactgaaagccctgcttccactgagagccctgtgggaggggagggaagtgaactgggagaagtgctgcaaattcaggtggaagaagaagaggaggaggaggaagatgatgatgatgaggaccaggggtcagccacactctctcagactcctcagccccagagagtatcaggggtttttccccgtcctcatggaccccacccactgcccatgactgctactccccgaaagcttccagagggtgagagtgcaccacttgagcttcctgcccctcctgcactgccccccaaaatcttctacattaagcaggaacccttcgagcctaaggaggagatatcaggaagcggaactcagcctggaggagcaaaggaggaaaccaaagtgttttctggaggggacactgaagggaatggggagctagggttcttgttgccttcagggccagggccaacatctgggggagggggtccatcctggaaaccagtggatcttcatgggaatgaaatcctgtcagggggtggaggacctgggggagcaggccaggccgtgcatgggcctgtgaagctaggggggacaccccctgcagatggaaaacgctttggttgcctgtgtgggaagcggtttgcagtgaagccaaagcgtgaccggcacatcatgctgaccttcagccttcggccttttggctgtggcatctgcaacaagcgcttcaagctgaagcaccatctgacagagcacatgaagacccatgctggagccctgcatgcctgtccccactgtggccgtcggttccgagtccatgcctgttttctccgccaccgggacctatgcaagggccagggctgggccactgcccactggacttacaagtgactgctgaggctatacactagcttctagaacaagataaccactgctgctgatggatacttttccctcactgccatggcacaccagtcatggatcttgtaatcatgccaagagaatagatacattatggacctcttgttcttagatatgggcctctcagcctggcagatgtggaaactcaaatttctcgtcccactccaggttttggctagccaaccctgcaggaaagtggtttataggccattcatacttaagttgatcacttgcccatggtggacatttttgtggtggtgatgtccattaaggaaaccagattttcaattatttagtgagagaagagttagagcaaaagacagtggtaaatgttttattccgtctccatgaggaattgaaggagttggtctccacctagagatacatttgatttacagcttaagtaattcagaggctaagctctaagcttttttctctcattgctggaatgatttaagcagaagtccttttgtgtacttttaaaattgtatctttccaggagcccctcagattgtaccttgctttctcaccaatagacaccttcccgacacttttttaatgttgtagctgagcactttaacaagttgagcattccatgtttcattcttagaaccttctttaatagagggtcttccctcaacagcctgtgcctctggtctacctttgaccaccactgataactaatatattggtcacaatgactggaatgtgactagtgatctcaggagatggcactgtcctaaagtgctgtcagggtggcaccactgctctctgaacaacttaccttggtcagagggactcaggtttgggacagcacaagctgaaggctggagagtaacttgcatagtaggaccatacctcttcctttcccatcccacccacatatgatagacagcccctctgttgagatatggaggggacagatactggaatcgggggtgggacttgcagttacttaaaattttttaataaactgtgccctgaaacctaaaaaaaaaaaaaaaaaaaaa

SEQ ID NO: 6422 - DNA, 2076 bp, Homo Sapiens
  NM_152739
agttgttacatgaaatctgcagtttcataatttccgtgggtcgggccgggcgggccaggcgctgggcacggtgatggccaccactggggccctgggcaactactacgtggactcgttcctgctgggcgccgacgccgcggatgagctgagcgttggccgctatgcgccggggaccctgggccagcctccccggcaggcggcgacgctggccgagcaccccgacttcagcccgtgcagcttccagtccaaggcgacggtgtttggcgcctcgtggaacccagtgcacgcggcgggcgccaacgctgtacccgctgcggtgtaccaccaccatcaccaccacccctacgtgcacccccaggcgcccgtggcggcggcggcgccggacggcaggtacatgcgctcctggctggagcccacgcccggtgcgctctccttcgcgggcttgccctccagccggccttatggcattaaacctgaaccgctgtcggccagaaggggtgactgtcccacgcttgacactcacactttgtccctgactgactatgcttgtggttctcctccagttgatagagaaaaacaacccagcgaaggcgccttctctgaaaacaatgctgagaatgagagcggcggagacaagccccccatcgatcccaataacccagcagccaactggcttcatgcgcgctccactcggaaaaagcggtgcccctatacaaaacaccagaccctggaactggagaaagagtttctgttcaacatgtacctcaccagggaccgcaggtacgaggtggctcgactgctcaacctcaccgagaggcaggtcaagatctggttccagaaccgcaggatgaaaatgaagaaaatcaacaaagaccgagcaaaagacgagtgatgccatttgggcttatttagaaaaaagggtaagctagagagaaaaagaaagaactgtccgtcccccttccgccttctcccttctctcacccccaccctagcctccaccatccccgcacaaagcggctctaaacctcaggccacatcttttccaaggcaaaccctgttcaggctggctcgtaggcctgccgctttgatggaggaggtattgtaagctttccattttctataagaaaaaggaaaagttgaggggggggcattagtgctgatagctgtgtgtgttagcttgtatatatatttttaaaaatctacctgttcctgacttaaaacaaaaggaaagaaactacctttttataatgcacaactgttgatggtaggctgtatagtttttagtctgtgtagttaatttaatttgcagtttgtgcggcagattgctctgccaagatacttgaacactgtgttttattgtggtaattatgttttgtgattcaaacttctgtgtactgggtgatgcacccattgtgattgtggaagatagaattcaatttgaactcaggttgtttatgaggggaaaaaaacagttgcatagagtatagctctgtagtggaatatgtcttctgtataactaggctgttaacctatgattgtaaagtagctgtaagaatttcccagtgaaataaaaaaaaattttaagtgttctcggggatgcatagattcatcattttctccaccttaaaaatgcgggcatttaagtctgtccattatctatatagtcctgtcttgtctattgtatatataatctatatgattaaagaaaatatgcataatcagacaagcttgaatattgtttttgcaccagacgaacagtgaggaaattcggagctatacatatgtgcagaaggttactacctagggtttatgcttaattttaattggaggaaatgaatgctgattgtaacggagttaattttattgataataaattatacactatgaaaccgccattgggctactgtagatttgtatccttgatgaatctggggtttccatcagactgaacttacactgtatattttgcaatagttacctcaaggcctactgaccaaattgttgtgttgagatgatatttaactttttgccaaataaaatatattgattcttttctaaaaaaaaaaaaaaaaaaaa

SEQ ID NO: 6423 - DNA, 2012 bp, Homo Sapiens
  NM_152740
gtaaagggattgacaggccctgccgcgtcaggccgctcctctcggctccgcgctccttccctcgcgcgtgggcacccgcccccgagcggtgagagcgcgtgcgcgcgcgcccttctccgtgggcgagccagccagtcccgctgcacacgctcgcagtctgtgggccctccgggaggcggcggaggtcaccgcggggagaggggcgggcgcagcatggcagcctccttacggctcctcggagctgcctccggtctccggtactggagccggcggctgcggccggcagccggcagctttgcagcggtgtgttctaggtcagtggcttcaaagactccagttggattcattggactgggcaacatggggaatccaatggcaaaaaatctcatgaaacatggctatccacttattatttatgatgtgttccctgatgcctgcaaagagtttcaagatgcaggtgaacaggtagtatcttccccagcagatgttgctgaaaaagctgacagaattattacaatgctgcccaccagtatcaatgcaatagaagcttattccggagcaaatgggattctaaaaaaagtgaagaagggctcattattaatagattccagcactattgatcctgcagtttcaaaagaattggccaaagaagttgagaaaatgggagcagttttcatggatgcccctgtttctggtggtgtaggagctgcacgatctgggaacctcacgtttatggtgggaggagttgaagatgaatttgctgctgcccaagagttgctggggtgcatgggctccaacgtggtgtactgtggagctgttgggactgggcaggcggcaaagatctgcaacaacatgctgttagctattagtatgattggaactgctgaagctatgaatcttggaatcaggttagggcttgacccaaaactactggctaaaatcctaaatatgagctcaggacggtgttggtcaagtgacacttataatcctgtacctggagtgatggatggcgttccctcggctaataactatcagggtggatttggaacaacactcatggctaaggatctgggattggcacaagactctgctaccagcacaaagagcccaatccttcttggcagtctggcccatcagatctacaggatgatgtgtgcaaagggctactcaaagaaagacttctcatccgtgttccagttcctacgagaggaggagaccttctgagtgtgccctttggccacggacactgttgggaaccaaactctgtcttggagcctccttttagctcactccacaagtaaatggatttaatcaaaggtcacctatctgcttttgattgtctaggtcacagtaatccctaggatttttcaccgcttattctttttgtctttttaacaaacatattatccgaattttttttctgcaagccactgatagtctctgctaactagcttaattgacctttttacaaagtttgatccccaagcatcctcaactaaatcattgaatacttcaatcaggatattatctgctttactttacaaataaaaccaaatcttttgtcaacaggatgaaacccatcttaaaggaaagaaaaggaattggtgtgaagagagaagttagagaagggaaatgcagtgaattactatctgtgtccatcaggaagtttgtcctgttaaccaaatggttactgcactaccagggttactggtttattttccagggagctgataaagcaggagaactgttgctgcatgttttctatttggactccgtcacaatatggtaggatatccctcaccaactcccgacactcagcagacttgtttttatatttttttctttcttgttcattcttactacgtattttttgacttaagaatgacatctttagatgcatttcagagccaatgatgatatttgctttagataattattatattattataaatatagccatattattttgaattcaaataaatttctatactggtaataaaaaaaaaaaaaaa

SEQ ID NO: 6424 - DNA, 2666 bp, Homo Sapiens
  NM_152742
ggcagatgccgcctggtccagctatcgtgctcggtattcagttttccggagcagcgctctttctctggcccgcggagcggtcccgcggccgagtaccggattcccgagtttgggaggctctgctttcctccttaggacccactttgccgtcctggggtggctgcagttatgtccgcgctgcgacctctcctgcttctgctgctgcctctgtgtcccggtcctggtcccggacccgggagcgaggcaaaggtcacccggagttgtgcagagacccggcaggtgctgggggcccggggatatagcttaaacctaatccctcccgccctgatctcaggtgagcacctccgggtctgtccccaggagtacacctgctgttccagtgagacagagcagaggctgatcagggagactgaggccaccttccgaggcctggtggaggacagcggctcctttctggttcacacactggctgccaggcacagaaaatttgatgagttttttctggagatgctctcagtagcccagcactctctgacccagctcttctcccactcctacggccgcctgtatgcccagcacgccctcatattcaatggcctgttctctcggctgcgagacttctatggggaatctggtgaggggttggatgacaccctggcggatttctgggcacagctcctggagagagtgttcccgctgctgcacccacagtacagcttcccccctgactacctgctctgcctctcacgcttggcctcatctaccgatggctctctgcagccctttggggactcaccccgccgcctccgcctgcagataacccggaccctggtggctgcccgagcctttgtgcagggcctggagactggaagaaatgtggtcagcgaagcgcttaaggtgccggtgtctgaaggctgcagccaggctctgatgcgtctcatcggctgtcccctgtgccggggggtcccctcacttatgccctgccagggcttctgcctcaacgtggttcgtggctgtctcagcagcaggggactggagcctgactggggcaactatctggatggtctcctgatcctggctgataagctccagggccccttttcctttgagctgacggccgagtccattggggtgaagatctcggagggtttgatgtacctgcaggaaaacagtgcgaaggtgtccgcccaggtgtttcaggagtgcggcccccccgacccggtgcctgcccgcaaccgtcgagccccgccgccccgggaagaggcgggccggctgtggtcgatggtgaccgaggaggagcggcccacgacggccgcaggcaccaacctgcaccggctggtgtgggagctccgcgagcgtctggcccggatgcggggcttctgggcccggctgtccctgacggtgtgcggagactctcgcatggcagcggacgcctcgctggaggcggcgccctgctggaccggagccgggcggggccggtacttgccgccagtggtcgggggctccccggccgagcaggtcaacaaccccgagctcaaggtggacgcctcgggccccgatgtcccgacacggcggcgtcggctacagctccgggcggccacggccagaatgaaaacggccgcactgggacacgacctggacgggcaggacgcggatgaggatgccagcggctctggagggggacagcagtatgcagatgactggatggctggggctgtggctcccccagcccggcctcctcggcctccataccctcctagaagggatggttctgggggcaaaggaggaggtggcagtgcccgctacaaccagggccggagcaggagtgggggggcatctattggttttcacacccaaaccatcctcattctctccctctcagccctggccctgcttggacctcgataacgggggaggggtgccctagcatcagaagggttcatggccctttcccctcctcccccctcagctgggcctggggaggagtcgaagggggctgcagagagggtagagaagggactttgcaggtgaatggctggggccccaaatccaggagattttcatcagaggtgggtgggtgttcacaatatttattttttcatttggtaatgggaggggggcctgggggtatttatttaggagggagtgtggtttccttagaaggtatagtctccagccctctaaggctggggctggtgatcagccccaacagagaaaatgaggagtttagagttgcagctggggaaggggtttgaaggaagttggaagtggggaggggtgggggcatctggtctcagaaatggaccagctggatgcagggcaggggactgagggtgcttgagtaggatgtgagacttcatgggcctgggttctgttgagttttttcagtatcaatttcttaaaccaaattttaaaaaaaacaaggtgggggggtgctcatctcgtgacctctgccacccacatccttcacaaactccatgtttcagtgtttgagtccatgtttattctgcaaataaatggtaatgtattggaaaaaaaaaaaaaaaaaaaaaaaaaaaaaaaaaaaaaaaaaaaaaaaaaaaaaaaaaaaaaaaaaaaaaaaaaaaaaaaaaaaaaaaaaaaaaaaaaaaaaaaaaaaaaaaaaaaaaaaaaaaaaaaaaaaaaaa

SEQ ID NO: 6425 - DNA, 3013 bp, Homo Sapiens
  NM_152743
accggatgctcggcatgaaccactaggcgcctggcgggggtgatctgtcggagcgaccggcttggcgcctgcctgtccccagcccctctcagcttgaactccttccttcaagtctgggccctcgaggcttccagagcggcctccaggggtgcagtctcagttccccacgccagccgtctccgtcctccgcctcctccgggcctggcaggtggcactgtccggaggcggagccttgggcgaggggtggttgcggcggaggacgcaaccgagcgggcctgcggcctcaccatggacccagaatgcgcccagctgctcccggctctctgtgctgttctggtagatcccaggcagccggtggcagatgacacctgtttggagaagctcctggactggtttaaaacggtcactgaaggagagtccagtgtcgtgctgctgcaggagcacccctgcctggtggagctgctgtcccatgtgctgaaagtccaggacctgagttctggggtcctctccttctcactgcgcctggcaggaaccttcgcagcccaggaaaactgcttccagtatcttcagcagggggagttactaccagggctctttggggagccaggacccctcggccgagcaacctgggccgtccccaccgtgcgcagcggctggatccagggcctgcgctccctggcacagcaccccagcgccctgcgcttcctggccgaccatggtgcggtcgacaccatcttctccctgcagggagactccagcctgtttgtggcctcggcggccagtcagctcctggtgcacgtcctggctttgtccatgcgaggtggagccgaggggcagccctgcctgccggggggtgactggcccgcgtgtgcccagaagatcatggatcacgttgaagagtccttgtgctccgcggccacccccaaggtcactcaggccctgaacgtcctgaccacgaccttcgggcgctgccagagcccctggacggaagccctgtgggtgcggctgagtccccgcgtggcctgtctgctggagagagaccccatccccgccgcacactcgttcgtggacctgcttctctgtgtggctcgttctcccgtgttcagttcttccgacggcagcctgtgggagacagtggcgcgggctctgagctgcctgggtcccacccacatgggacccctggctttggggatcctgaagctcgagcactgtccacaggcactgaggacccaggccttccaggtccttctccagcccctggcctgtgtcctgaaggccacggttcaggcccccggacccccaggcttgctggacgggacggcagacgatgccacgacggtggacacactcctggcctccaagtcgtcctgcgccggcctcctgtgccgcaccctggctcacctggaggagctgcagccgctgccccagcgcccttcaccgtggccccaggcgtctctactgggggctacagtgactgtcctgcggctctgtgacggctcggctgcccctgcctccagtgtggggggccacctctgtgggaccctggcgggctgcgtccgggtccagcgagcagccctcgacttcctggggacgctgtcacaggggacaggcccccaggagctggtgacgcaggcgcttgctgtcctcctggagtgcctcgagagccccggctccagccccacggttctgaagaaggccttccaggccacgctcaggtggctcctgagctcacccaagacccccggctgctctgatctcggccccctcatcccgcagttcctcagagagctgttccctgtgctgcagaaacgcctgtgccacccctgctgggaggtgagggactccgccctcgagttcctgacccagctgagcaggcactggggaggacaggctgacttcagatgcgcactcttggcttcagaggtgcctcagctggccctgcagctcctccaggaccctgagagttatgtccgagcgagtgcagtgaccgccatggggcagctgtccagccagggcctgcacgcccccaccagccctgagcatgcagaggcccggcagagcctgttcctggagctcctgcacatcctctccgtagactcggagggcttcccacggcgggcggtcatgcaagtcttcactgagtggctgcgggacggccacgccgacgcggcccaggacacggagcagttcgtggccactgtgctgcaggcggcgagccgagacctggactgggaggtccgcgcccagggcctggagctggccctcgtgttcctgggccagactttggggccgccgcgtacccactgcccctatgccgtggccctacccgaggtggccccagcccagccactcaccgaggcactgagggctctctgccacgtggggctctttgacttcgccttttgtgccttgtttgactgcgaccgccctgtggcgcagaagtcttgtgacctccttctcttcctgagggacaagattgcttcctacagcagcctgcgggaggccaggggcagccccaacactgcctccgcagaggccaccctgccgaggtggcgggcgggtgagcaggcccagcccccaggggaccaggagcctgaggctgtgctggccatgctcaggtccctagacctggagggcctgcggagcacgctggccgagagcagcgaccacgtggaaaagagtccccagtccctcctgcaggacatgctggccacgggaggcttcctgcagggggacgaggccgactgctactgagcagaaccagagtctgccactggggctcaggaccaagggaggcagcaccatgtccttctgtgggacactgccagccccagggctccagcccagcccggtggatcctctggggaagccaggaccaggagagaagcaaggtcaagaaatcccacagtttgatgtattaaagaaatgacttatttctactcaaaataaatggcattgaagtctttctttaaccctttttgagttaatttaataataatgatctgagacaagg

SEQ ID NO: 6426 - DNA, 6452 bp, Homo Sapiens
  NM_152748
gtgctatgcagagaaggtcaaagacaatggccttctcattcctgatgtccgcatggtgatgtggcttgatgtttctattctcacttgtcattgacacagtgagggaggcaaaacagtgtggatgcagcagaataaccacaaccaggattttgaactgaataagtaagaaagattatcactttgaatatacggaatgtgatagcagtggctccaggtggagagttgccattccaaattctgcagtggactgctctggcctgcctgacccagtgagaggcaaagaatgcactcttcttggatccctcgtggaaactacatagaatctaatcgtgatgactgcacggtgtctttgatctatgctgtgcaccttaagaagtcaggctatgtcttctttgagtaccagtatgtcgacaacaacatcttctttgagttctttattcaaaatgatcagtgccaggagatggacaccaccactgacaagtgggtaaaacttacagacaatggagaatggggctctcattctgtaatgctgaaatcaggcacaaacatactctactggagaactacaggcatccttatgggttctaaggcggtcaagcctgtgctggtaaaaaatatcacaattgaaggggtggcgtacacatcagaatgttttccttgcaagccaggcacattcagcaacaaaccaggttcattcaactgccaggtgtgtcccagaaacacctattctgagaaaggagccaaagaatgtataaggtgtaaagacgactctcaattttcagaggaaggatccagtgagtgtacagagcgccctccctgtaccacaaaagactatttccagatccatactccatgtgatgaagaaggaaagacacagataatgtacaagtggatagagcccaaaatctgccgggaggatctcacagatgctattagattgcccccttctggagagaagaaggattgtccgccttgcaaccctggattttataacaatggatcatcttcttgccatccctgtcctcctggaacattttcagatggaaccaaagaatgtagaccatgtccagcaggaacggagcctgcacttggctttgaatataaatggtggaatgtccttcctggcaacatgaaaacttcctgcttcaatgttgggaattcaaagtgcgatggaatgaatggttgggaggtggctggagatcatatccagagtggggctggaggttctgacaatgattacctgatcttaaacttgcatatcccaggatttaaaccaccaacatctatgactggagccacgggttctgaactaggaagaataacatttgtctttgagaccctctgttcagctgactgtgttttgtacttcatggtggatattaatagaaaaagtacaaatgtggtagaatcgtggggtggaaccaaagaaaaacaagcttacacccatatcatcttcaagaatgcaacttttacatttacatgggcattccagagaactaatcagggtcaagataatagacggttcatcaatgacatggtgaagatttattctatcacagccactaatgcagttgatggggtggcgtcctcatgccgtgcctgtgccctcggttctgaacagtcgggttcatcgtgtgtcccctgccctccaggccactacattgagaaagaaaccaaccagtgcaaggaatgtccacctgacacctacctgtccatacatcaggtctatggcaaagaggcttgtattccatgcgggcctgggagtaaaaacaatcaggaccattcggtttgctatagtgactgctttttctaccatgaaaaagaaaatcagagtttgcactatgactttagcaacctcagcagtgtgggctcattaatgaatggccccagcttcacctccaaaggaacaaaatacttccatttcttcaatatcagtttatgtgggcatgaggggaagaagatggctctctgtaccaacaatataacagactttacagtaaaagaaatagtggcagggtcagatgattacacaaatttggtaggggcatttgtatgccagtcaacaattattccttctgaaagtaagggtttccgagcagccttatcatcacaatccatcattctggcagatacattcataggagtcacagttgaaaccacattgaaaaatattaatataaaagaagatatgttcccagttccaacaagccaaataccagatgtgcatttcttttataagtcttctacagcaacaacatcttgtattaatggccgatcaactgctgtgaaaatgaggtgtaatcctactaaatctggagcaggagtgatttcagtccccagcaagtgcccagcaggtacctgtgatgggtgtacgttctatttcctgtgggagagtgctgaagcttgccctctgtgtacggagcatgacttccatgagattgagggagcctgcaagagaggatttcaggaaaccttgtatgtgtggaatgaacctaaatggtgcattaaaggaatttctttgcctgagaaaaagttggcaacctgtgaaacggttgacttttggctgaaggtgggagccggtgtgggagcttttactgccgttttgctggtggctctgacctgctacttctggaaaaagaatcaaaaactggaatacaaatattccaagttagtaatgacgactaactcaaaagagtgtgaactcccggctgcagacagttgtgctatcatggaaggagaagataatgaagaggaagttgtatattccaataaacagtcactactaggaaaactcaaatctttggcaaccaaggaaaaagaagaccattttgaatctgttcaactgaaaacctcaagatccccaaatatatgaagagacagtgctgtagccttgagactaatgaacaaagaaacctgctctagttttacaggaccatattttagggtctgtcctcatacctgtcacattggtgatctcacagaggagggccatgccgctgaaaagggaaggagattgaaacatttgattgccttatcacatggtcaagtaccttgccaaataaaggaaagcaaatgatttgggtctcaactgaagatgaagctcaactcaggaagagatttatctgtatatacacataactgaaaaccaagtttaagcccaccaatgcactgctgatgcatgccatataattaatgggtaacttttattctttatgatgtctacataacaagtgtgatttggaaggcacatgtgagcatatgcattatgatccaatttatgttttttctttgtttatattttggggaaaattaaaatttttttaaggtatatttttcccattatttattttcctgaccttaaaacagcttttctactaaaaaatggtgagcaatgaagacaataaatttttcatttttccataggttatcttctcttgatttaaatttcaggaagagttagcatgtgcttgggttatctagatttataattgcctttgaaattccatcctcgttggagctggtaagaagggcttgactgaaagtttgaaggaatctaaaaaacaaaaaagtaagaaaggtaacgagaagccctaattctccattaatgcaaactagctgctagtatcatagaagtcaaatgacttaaaacagtttatgtagtgctagaagtataattaaagtaaataggaaagcttgtcaatcaaatcactggcaaaatcatgaagaagagagtgagaaggtttgtctataagtacagatgactgtatgaaatactggggtaatttcatggtctccagaaaatgtcagtgggacttttgttctttgtcaagcaccagaggttatatggttatttttctgctgcaagactttgaggatgttgactttctcagaaactttttaaaaaaataatccaataaggcaggaattcagttttgaaaaattacatataattgtattcataataagaatgtggttatttcataagcagttatgaaagaattattgttcttattcaaaagtgatccagataattgtgatattttctatggtgggctactggtattagcacgacttggatattatttgttgaaggaagtatgaatgaagttggatttgaccaatttcgtgtaaaccttaattgatttaaaactgggaaagaggggggtttcctggccattgctgatctaaggtgctcttatttgtttccaataaacagtaatctttatagaccttaatgcagatttaaaaaaatagttgtgattggctgagagaggcagggcatatatgtagggaaatgatttgccccaagcattccaatgaagtatgacttgtaacttttgtgtctgaaggtggtgtctttatttttgtggaaaatgggagaaaaatgaataattgtgtttatttggctgattggtaatacactagaccattctgttattattgaatgaatgttttgtgtatatctctgctgttgcacatatgagtataggtgaggttgtcattgtttgctctgggattcagggagggagtcactttgcataaacctttttttgcatttaatttcttgaatgttcttataaagaagacattatgttggcattcttcatttttatcctgccaacagagtgcttatgagcatgtctgcattttgatcaaaatttaaacagaagagtgaaaatacatttgaaatgaaccctttcagaggaaccctggcaaagctgtatagactggacagagtgagaaaacttccacagccacctgtcacctttctcctcatcttccactgtgttcaatatgtatgttccaagccatagagataattgggattttctcccaggtagcttctttcttctcctgtcactggactaaaatctctgacatgtcaaaaatgccttaaattttaatgaactctccgaaaatgtagttgatattggagaatttattttatttctaattttagatattaaatatattttgtcagcacagtcccatctttgggaaggaggtgattttttcccttggattccagtggtttgtcattttatttcaagcactgaagaagtatgacagaaagaatattatggggaaaatatttagaccaatcctggctataaaatttcctttagttttatgcctggcctttgcaaagctcagtgaaatgttgaaaggaataaattaatcatgtttctgtgacttttgattgacacttgttccttttcccccctaagtggtagaagaagttatttgttatttttctaaaaggcacaattttgaagccttaactacttcattaagtcaactgttgcctataacatctcttagcactcgtcaaaacgtatttaaatcaattttccaatggatgagaacatgtcttctgtggataaattatattatgtcatttaacaacattgagcattttgatatgtgttcactgaattaaaaaacctgaatttcattattgttgacttttcccctctttagttactagtaatcacatcctttctaggattaaaaatatttcatagtatttttgtgtagatgtctgtccttattttcttcccaaagaaaaaaggttgtttaaattgattatgtggaagaattacttgggtccagtctttagcatctggggtctccaggtccccaggtgggtcatgattgactgcttcttcaagacccatcttgccaactctcacttgatgtctgtcaatagaactacttcctgtggcacatggttatttctaatgggaggctaatgtgtacataatttctctcttcctcatagaaataaatttctctgggggttgctgtgagaggatgacttcattagccatgtttaaagtgagtgtactgctcacgtttatctttgtacactaagagtatgtagagttgatcttcagagaaactaaacctccctcatatctatttatagtaatcatgaatatgattgcagttgacaggcccaactcctaaactgagtttgcccaaagaaaatgtccttagaggagtaaacttttagaaatctcaacacccgactcattcgttggaagctaaaatggaattcatcttcatactaactggctacagattattctcttgctggattttacttttattttaacatttttacatgagttccttttagaatcataaatgaaagaagtaaaactttaagatgggaatgaataattgaaaagagaattatatttactattataattgatattattcgctattatgattacacttgtctagatcagagcccagcaaacattttttttgtaaagggtcagatagtacatagttttggctttgcagggcatgtgggctctattgcatttactcaactctgccattgtagtatgaaagcaaccacatacaaaatgtaaatggatgggcgtggctgcattccaataaaactttatttatggacactgaaaaaaaaaaaaaaaaaa

SEQ ID NO: 6427 - DNA, 1656 bp, Homo Sapiens
  NM_152749
aacactcaatgtcggaacgttccgaagatgacgtcggagcgttctcgaatcccgtgtctctcggctgctgctgccgaaggaacagggaaaaagcaacaagaaggaagagcaatggcgacactggatcgcaaagtgcccagtccggaggcgtttctgggcaaaccctggtcctcctggatcgacgccgccaaattacactgctccgacaatgtagatttagaagaggctggaaaagagggtggaaaaagcagggaggttatgaggcttaataaagaagatatgcacttatttggccattacccagcacatgacgacttctatctcgtagtgtgcagtgcctgtaaccaggtcgtcaagccacaggttttccagtcgcactgcgggagaaagcaagacaacaggagaaatgaaggcatctccaggagtggaccagagagcagccaagccatagagaagcatcaggtgtgagaatggaaaacgcagaagagacgtacaacttctgaaagatctcagaggactggcattgtctggagacggcttcctggaagaggagactccagcagagccctgaagtgtggacaagcttccattcactgcaaattcgtgagcacactctggtgtcaggatctagtaaggaaatgggcttgagcagagcagggggtacctgtggggttcttctcttcattttcaccaccacaaagctggtctaagctgccatcaattcccacctggacaactgcaaaagccttccagctgttcctgcttccactcttgctcctctacaattcattctgcacgcagaagtcagaatcaaaatcaaagttcatcatgtcattctcttgacttgtggcttccctttgctcttaagctaaaagtaaaaatcattatcatggctacaaagtcttgtgtggtctgggccacatcctgtgccaggctccctttcattgtctatattccagtcaagctggccttcaaaatttcagcacattgggtctttctgccacaggcccttgcacatacatgcttttccctctgtacatgtgattttctttcatccccgctttccaaagctaactctgactcatccttcagactgcatcttaatgattacttccttctggaagactcccctaattttcacaactagatgagctctcccttatatgttgaaaacaagtatttcttgtgtgaacagaaatgtttaatgtctgccttcccaactcagccacaagctctgtgaggatggggactcagtctttgcatccctcagagcctaacatagtctcagttaatacgtgatagctggagcgtgacatttcattaggaacagtgaggctagttgagaaattatacctcaccagtatataggagagtaccattaggaattcttaatgggatgaaaacctgaattcatgtctagaccctgccacctgctggctgtgctgttttaaataaattgcagatcctctcagagcctgtttcctcatatataaaataatggggatcctaacagccccctcatatggttgtagcaggaatttaattaaataatatatggaaaagcatttttttaactgtaaaaccatacataaatatcctttgtcacttttcccagtgcatgacacactgggtcattaaacatctattggatgggtg

SEQ ID NO: 6428 - DNA, 6500 bp, Homo Sapiens
  NM_152750
aaaaccaggaggggaagctgagtggcttctggaataaactttgggtgtgagacgggattcaggctgtggctaatgtgctggaagcacgcacagttgtgaccatcaagtatgcaggaagcaatcattctcctggctctcctgggtgccatgtcagggggagaagcactacacctaatcctcttacctgctacaggcaatgtggcagagaattctccacctgggacttcagtgcacaagttttctgtgaagttatcagcatcattgtcacctgtgatcccaggatttccccagatagtcaactcaaatcccctcactgaagcttttagggtgaattggctgtcaggcacctactttgaggttgtcaccactgggatggaacaactagattttgaaacaggaccaaacatatttgatttgcagatttatgtgaaggatgaggttggtgtcacagacctgcaagtcctgactgtccaggtaacagatgtgaacgagccacctcagtttcaaggcaacttggcagaaggtctacacctctacatagtagaaagagcaaaccctggattcatttaccaggttgaggccttcgatccagaagacacaagccgaaacattcccctcagttatttcctgatttctcccccaaagagcttcagaatgtctgctaatggcaccctcttctccacaacagaattggactttgaagcaggacacagaagtttccatctcatcgtggaggtgagggacagtggaggcctcaaagcctccacagagctccaggtgaacatcgtgaacctcaacgacgaagtccctcgctttaccagcccgacacgagtgtacacagtcctggaggaactgagtccaggaaccatcgtggccaatatcacagcggaggatcctgatgatgaaggttttcccagccacctcctctacagcattaccactgttagcaaatatttcatgataaatcagttgactggtacaatccaagtggcccaaaggatagaccgagatgcaggtgaattgagacaaaatcccaccatttccctggaagttctagtgaaggacagaccatatgggggtcaggagaatcgcatccagataaccttcattgtggaagacgtcaacgacaatcctgccacatgccaaaagttcaccttcagcattatggtgccggaaagaacagccaaggggacgttgcttcttgacctaaacaagttctgctttgatgatgacagtgaggcaccaaacaacagattcaacttcaccatgccatctggagtggggagcggcagcagatttttacaggatccagctggctctgggaagattgtgctgattggtgatctagactacgaaaatccaagtaacctagcagccggcaataaatatacggtgataatccaggtgcaggatgtggcccccccttactataaaaataacgtctacgtttatatcctaacaagcccagaaaatgagtttcctctcatttttgataggccatcctatgtatttgatgtgtcagaaagaaggcccgccagaacccgagtgggacaggtgcgagccactgataaagacctcccccagagcagcctcctgtactccatctccactggaggggccagcctccagtatccaaatgtattttggattaatcccaagacaggagaactccagctggtaactaaagtggactgtgaaacaacccccatctatattctcagaatccaggccaccaacaacgaagacacaagctctgtcactgttactgtgaacatccttgaagaaaatgatgaaaagccaatttgtactccaaactcttatttcctggccctcccagtggatctgaaagttggcacaaatattcagaatttcaagctgacatgtaccgaccttgattccagccccagatctttccgttattccattggcccaggtaacgtcaacaatcatttcaccttctctcccaatgctggttccaatgtcacacgcctgctgcttacatctcgctttgactatgctggtgggtttgataagatctgggactacaagctacttgtctacgtaactgatgacaacttgatgtctgacaggaagaaagcggaggctcttgttgagacaggaacagtgacactgagtattaaagtcattccccacccaaccactatcatcaccacgacccccaggcccagggtcacctatcaggtcctgaggaaaaacgtttactctccatctgcatggtacgtgccgtttgtcatcactttgggctccatattgcttctgggtctcctcgtgtacctggtcgtcctattggccaaagccatccacagacactgcccctgcaagactgggaagaacaaggaacctctgacaaagaaaggagaaacgaagactgcagagagagacgtcgtggtggaaactatccagatgaacactatctttgatggagaagccatagatccagtgaccggggaaacatatgaattcaactcaaaaactggagccagaaagtggaaagatccactaacccaaatgccaaaatggaaagagtccagccaccagggagctgccccacgcagagtcactgctggggaagggatggggtcactgagaagtgccaactgggaagaagatgagctgagtggcaaagcgtgggctgaggatgctggtctgggttccagaaatgagggtggcaagctgggcaacccaaagaacagaaatccagccttcatgaacagggcttaccccaaaccacacccaggaaagtaaacggggtctaaggaggggcctgtcaatcactgagatgctgcctcaccctaaattctatggggatggtgtgggcatggtgtaggggggaaaatgtgggctgaggggattcagacatccagggtcaaacatgggatgtttgacaaatttttaaacaaatagaaaggggtttgatcacatagttgcgtgttctgaaatgatacaggaacattttctatcagatttcagaactacctgtgcttctgataagcaagactgttaactttggggtgtggaattgttgtgtttcttctttgcattgactgctaggaagctctattctgttcaccatagaaagtttgtaggaattcctgacataaatagtgaagactatccttacatctggtttccaccttattttcctgccctcgttttaacatcacccagatttcttcagttataaatatgccatacacctttgtaagtcacctcaaatcttcttcaaaagaagcagaacagtgaaaaaaacagatgagtaagttaagagttggtcatctggaaagaagaaaactcagtaggcaccttcttttgttttttcttgtggtgtccggatcagcatcctgcatgtgagattcatccacgttgtcctgtctagcagtagttcagttctcttcatggttatgtctggtttcattctatgattatatcacaatttatctattctacacttgggtggcagctgcttcagattttttacttttaaaaaatatacttaaaagtgaactacaggcagggcatgatggctcatgcctgtaatgccagcactttgccaaggtgggcagatcacctaaggtcaggagttcaagatcagcctggcctagatggcaaaaccctgtctctactaaaaaatacaaaaattagcttggtgtggtggtgggcacatgtaatcccagctacttgggaggctgaggtagggagaactgcttaaacctgagaggtggaggttacagtgagttgagattgtgccactgcactctagcctgggtgacaaagcaagactccatctcagaaaaaaaaaataaaagtgaattacaacactatgaactttcttgtacatgtcttttggtgaacataaacactcacttttttgctcatatatctaagagtgggattgctggagcaattgctggatctgccaaagagttccaaagtggtggctctgattcacattccagcagcaaacactgagagttgcaattgctctctatccttgccaacacttgggattgtcaatccttttaactttagccattctggttaaaattactattgaagtgaaatcactttttcctcaaagctgaaacaccatcagccttacaacctacctgccttgctccttcccacttcctatgattggaaggaactgcaggactctgagtggggacatactggaagccccatctagacataaaactcagacttccacctgtaggcatgagcaatgaactgggaataaatggtattatgatggaataggaaatgtaactttccaatgtgtgcctagcagagcctgagcaagcttcactcgagctctatgccctgctgcccagctgctgcgaccctagtccagtaaccctaagaaaggtccaggtgagtgttcattagggaagcactcccttcccaactggggagtcaggtgagagcctaccaggtccacaaggtcctgtgggagacagactggatccagcaaatgtagagcttcagagagagcagcagcttgtttactgtgtgcctagtgccagtgtcacttctcaagcaaaagaagcatttgcaaaatgcctgtcctggcctagattgagcgtgatttattaataagggttggttgccagggaactcccttgaatggatttaaactttgcaaaagaaggcagaactgttcatttatgcaggttaaagtgagtgaagtggctgattgcccatttaaggcattgcaaatctgtggggcccggagtcaaatgctttccttggaagctctcagcttcaatgcaagtaaaatgaggttctgagaaggctgaagggggacttaataactgcttataagcccattaagaatgattaaaagggccgggtgaggtggctcatgcctgtaatcccagcactctgggaggctgaggcaggtggatcacctgaggtcaggagtttgagaccagcctggccaacatggtgaaaccctgtctctactaaaaaatagaaaaattagctggacgtgttagcaggcacctgtaatcccagctactcaggaggctgaggcaagagaatcgcttgaacccaggaggcagaagttgcagtgggctgagattgcgccactgcactccagcctgggtgacaagggcaaaactctgtgtcaagaaaaaaaaaaaaaaaagaataattaaaaggagagagtggtgagcagctggtctttcttctccagtgatgacagggcaagagggaattgtgcttaatggccagagaagagatttaagtcaggcaccaagagggacttcctgaagcctggggcctctctgaagagctcagtgtcttctctggtgataggcaggaagagctgagtgtcttcctagtcgcaaggcaagcctcgagaaactcaagaaataggggcaagagtgcgccaggaggagagaacacctgctgccccgtttcttttgtatatccggctatttggttcggggaaatccagaagtcaaagtgtcaccggtggagggtcttgactgcaagttgtccaagttcttggagttttgaacaaagaatggaacaaaatgcccagcaaagcagagaaagaatgaggcaacgaaagaatgaaagcagggatttattgaaaaccaaagtacactccacagtgtgggaacgggcctgagcaagtgactcaagggcccagatacagtcttctcagtccaaataccccttggaggtttccccttggccacttcatgctcacctcatggaaatgaagtagtggaccacaattggtctgattggttgcaggaagcaaccaatcagagactgaagtggagttacaaaggtcacgctcctgtgcaaacatctgattggttgcaaaaagcaaccaatcagaggctaaggtgaagttacaacgttgcaacgaagactcggctggcaatcagtctgattggttacagacagccaatttcccagcgttgaccaggttttggggggaacaaaattatctgaataaaatgaagacagcaaccgtcgtggatttggtgaaagttttctcccatctccctctcaaggccttaaacaggtatgagttgattatagccaatgtttacttttctcattctgattcattataaaactggggtaaatacgttcaggaattagaccacgtaacaattataattgtcgaagactttgaaactgcatagtagattgtgacattggagctttttgttgtgctcattagaaagcagggtctgaaactcagcctgtgtagcaagcacgggtggctcacaagcagaactgggaaatgacacttctgctccccagagccccctttcacatctggggttctcattgtttgcctttttacttaatgtattttgtaatggctgtgaaaattaagctacaaaatgagtgaacattgaagacaatgattgctattgaaacttaggatttctcatttcaaacttagcgtgtgtttatccttcgtattcattcaataaatatctgtggagcaacta

SEQ ID NO: 6429 - DNA, 1547 bp, Homo Sapiens
  NM_152755
gctggatttaaggttgccgctagccgcctgggaatttaagggacccacactaccttcccgaagttgaaggcaagcggtgattgtttgtagacggcgctttgtcatgggacctgtgcggttgggaatattgcttttcctttttttggccgtgcacgaggcttgggctgggatgttgaaggaggaggacgatgacacagaacgcttgcccagcaaatgcgaagtgtgtaagctgctgagcacagagctacaggcggaactgagtcgcaccggtcgatctcgagaggtgctggagctggggcaggtgctggatacaggcaagaggaagagacacgtgccttacagcgtttcagagacaaggctggaagaggccttagagaatttatgtgagcggatcctggactatagtgttcacgctgagcgcaagggctcactgagatatgccaagggtcagagtcagaccatggcaacactgaaaggcctagtgcagaagggggtgaaggtggatctggggatccctctggagctttgggatgagcccagcgtggaggtcacatacctcaagaagcagtgtgagaccatgttggaggagtttgaagacattgtgggagactggtacttccaccatcaggagcagcccctacaaaattttctctgtgaaggtcatgtgctcccagctgctgaaactgcatgtctacaggaaacttggactggaaaggagatcacagatggggaagagaaaacagaaggggaggaagagcaggaggaggaggaggaagaggaggaagaggaagggggagacaagatgaccaagacaggaagccaccccaaacttgaccgagaagatctttgacccttgcctttgagcccccaggaggggaagggatcatggagagccctctaaagcctgcactctccctgctccacagctttcagggtgtgtttatgagtgactccacccaagcttgtagctgttctctcccatctaacctcaggcaagatcctggtgaaacagcatgacatggcttctggggtggagggtgggggtggaggtcctgctcctagagatgaactctatccagccccttaattggcaggtgtatgtgctgacagtactgaaagctttcctctttaactgatcccacccccacccaaaagtcagcagtggcactggagctgtgggctttggggaagtcacttagctccttaaggtctgtttttagacccttccaaggaagaggccagaacggacattctctgcgatctatatacattgcctgtatccaggaggctacacaccagcaaaccgtgaaggagaatgggacactgggtcatggcctggagttgctgataatttaggtgggatagatacttggtctacttaagctcaatgtaacccagagcccaccatatagttttataggtgctcaattttctatatcgctattaaacttttttctttttttctaaaaaaaaaaaaaaaaaaaaaaaaaaaaaaaaaaaaaaaaaaaaaaaaaaaaaaaaaaaaaaaaaaaaaaaaaaaaaaaaaa

SEQ ID NO: 6430 - DNA, 5156 bp, Homo Sapiens
  NM_152758
gaggtgagcgcggacgtcagagtggagagcggaaggtcagggaggctcggagcggaagtgagactagggagtctgtccgccattgtggacccgagaagcagagagcgagagggggaagaggagcgtgcaagcggaaaagacgggcctcttcctccgactcccgagcgcgaggccctcattttgggttctcagcgaacggcggcagcggcggcggctggaacaatcactcggccaagggcgacagccaactgctgtgagtgcacggggagaggcccaggcagcggcggcggcggcggctctcgggttgcggtgaagaatgtcagccactagcgtggatcagagacctaaagggcaaggaaataaagtttcagtacaaaacggttcgattcatcaaaaagatgctgtaaatgatgatgattttgagccatacttaagtagccagacaaatcagagtaacagctatccaccaatgtcagatccatacatgcctagttactatgctccatccattggatttccatattctcttggggaagcagcgtggtccacagctggagaccagcctatgccatatctgacaacctatggacaaatgagtaatggagaacatcactatataccagatggtgtatttagtcaacctggggcattaggaaatacccctccatttcttggtcaacatggatttaacttttttcctggtaatgctgatttctctacatgggggacaagtggatctcagggacaatcaacacaaagttctgcttatagtagcagttatggctatccacctagttctcttgggagagctattactgatggacaggctggatttggcaatgatactttgagtaaggtgcctggcattagcagtattgagcaaggcatgactggactgaaaattggtggtgacctgacagctgcagtgacaaaaactgtaggtacagctttgagcagcagtggtatgactagcattgcaaccaatagtgtgcccccagttagcagtgcagcacctaaaccaacctcctgggctgccattgccagaaagcctgccaaacctcaaccgaaacttaaacccaagggcaatgtgggaattgggggttctgctgtaccaccacctcctataaaacacaacatgaatattggaacttgggatgaaaaagggtcagtggtaaaggctccaccaacccaaccagttctgcctcctcaaactataatccagcagcctcagccattaattcaaccaccaccattggtgcaaagccaactgcctcaacagcagcctcaaccaccacaaccacagcagcaacaaggacctcagccacaggcccagcctcaccaagtgcagcctcaacagcagcagctgcagaatcgctgggtagctcctcgtaacaggggagcaggcttcaaccagaacaatggagcgggcagtgaaaactttggtttaggtgttgtacctgtcagtgcttcaccttctagtgtagaagtgcatcccgtgctggaaaagctaaaggccataaacaactataatcccaaagactttgattggaatctgaagaatggacgtgtgtttataattaaaagctactctgaggatgacatacatcgttccattaaatactctatctggtgtagtactgagcatggtaataagcgtttggatgcagcttaccgttccctgaatgggaaaggcccactctatttactcttcagtgtgaatggcagtggacatttttgtggagtggctgaaatgaagtctgttgtggactataatgcgtatgctggtgtctggtctcaggataagtggaagggcaaatttgaagttaaatggatctttgtcaaagatgttcccaataaccaattacggcatattcgcttagaaaataatgacaacaaaccggttaccaattcaagggacactcaagaggtacccctagaaaaagctaagcaagtgcttaaaataattgctactttcaagcataccacctcaatctttgatgactttgcacattatgaaaagcgtcaagaagaggaggaagccatgcgtagggagagaaatagaaacaaacaataaccgtatgaagatgtcctgttaaatttacaacactaacgatgtagactctggaaatgcctaataagtcaaagaagacgtattaaagctcttttctgcttaaggtgacatctttgaacactttaacacaaagttgactcttctcgtaatggttttcatcagcgcatctgcccttatactcttcaccaaacacacttgagaactgtaacttcgtcaagcactttctgtcctgaagcttttaccagtatctgctgtcttttgtaattatgcatcctagctaaggcacagaagactgaatgaatgcaaggattcattaactctttgaatttgttaaatactaacagttaaccattagaagtggttcaatgatgtaagagtcacactgcttcaactttttctttgttgtagtttttaaattgtcgatttttagctatttgacagattaaaagcaaaataatcatgccatatttagtcctggagttcaagtctaaatgttgatgtgaaaaattattgtagtaaacttttaatatggcaaagcaaccttaagctctattttagccaaatgaaacataatctgaaattatattagaacatttcccttgtcttcaaactgtttggtgtaacagaatattgatatgcagcttggtggatttcaccagttaatgcacattcttcttccctcctccccccattaatatgtatactgaaaaatgtgcatttgtctgaggaattattttgtttgctaccacttaatgaatctcaaaattttgagtaaatgtacctcagtctaatcagactttttatgacctttataactacatttaaaacccttaattcctatttctgggtgtttgcgagcctgattgctatcatgaagtaaaaatttattactctaggtattcactagctaaataaacatagttcttgtttagcaagcatatgttgttcctcagctcttttctccagcttttgcagtgtcctggcatccttaaaatactttgaaaatatggccttgatccatggattaaatcagtatctaagtgaatgtgttgatgttttattgatcagatctatataagtgggaatacagcatatatctggatattcttatagttatctttttaacatcttatttttttcattaattacatatcaacattaattttgtatcttgaagcaaattgattttgtataattaaatgtgtcaagcatctgtattaattgatttgatggcataaggttatgaaaataatgtactgccccatgtattactgttccaaaaggagaaagctatgtagaaagatacattaagggtgaaaatagcaatacagtagatttgaataccttgatgttttgcattacttcatttatgtttacatcatgtttagaaatgttttcatttactgtggtctttggtcacttcagctcaaagacctagtgatggatatttctttgaggctttcatttatataattttattttgtacaatgttttttttaaatgtgcaaatactgtattcaagtgaaaaaaatacagtatttgtagataaccatagctactacacagttcttcggtagtcccagtgtagttatatcagtgtttactgaagggaacatcaaaatattaatggtatattataaaataaagactttcttaaaggaaaattgcacctattttacctttttaagagtaagccatgaaatcttgtaacatgtctcttaactatttataatgaaaagtggcatttgggtatagtcaccacagcaatgttctacatccctaagattatctaggtaggacatgtcaaagatgactgttgtcattctggaggtcctattagagaatattataaaagggtgaccttgtaggaaggatctgagtcctccccctgaggttctctttttcttggtgctttattagcaactctggatatttttataaaactagttacattataaacggtttcaaacatgtttaatttacattaggtttttatgtaagagtgtcatggaagcactcagcaagcaggctgattgcaatagactcagacatgcgaataaatgtaattgagagtctattcatggtgaggagtacatcccagtgcctttaacctggatttctaatcttaagtgaaatgggtgcagcattcctttggaaaaaaaaatctttttattttcaagtgataattttgtgtttttctcatataagttttctccagagcacccaccttctcttccttcttggtctgtcattatattgcaaaatatttttcctctgaatgaaattatcacaggttgtctcaagcacaaccaactgaatgtctcttaactgtggggaccaaaagggagagagcctggggtctacaagaggagacacatcatcaaatgtttgaatgatcacaaattaagacattatcagcccagtaaatttcttgcttaatgtttttccaagttctggcttgaatatttcttattaaagctatcttatgtgggtattttattttgaaaggtattatagtttgtatatttaacagtaaggaggaaactgtaaccaaaattagtatttctctatacgtattggtacttgaagattcctttcaaaagaaatccagcgttttcctaattttagtacttaatttctctttttaatttaagtgatctttctaattcgaaagctgtgttctttttgaataccgtgcatgggggttaagctgatgttaaaacagtttgcaataaaaaaaaatgaatcagcttaagtcatttaatcatttcaagtgcattctgcatcctttaaaaataagtttaagaaatttaagagaattgtgttttcattaagttttgcatatcttttgttatgccatgtaaattccctttttcgtatgattaaaggaaggttatgataaaatgattagttcatttacattcacttgtagcaattacatgagaatttgaattttgtcgtgtttgggtttgttcattcctgtgaatgatggtacagttaggtgagattttctgttatggtacccaaactcaccatttggtcctctttaatctttgagggtttcaataaaaattgttcactcata

SEQ ID NO: 6431 - DNA, 2243 bp, Homo Sapiens
  NM_152772
gggacactggggctgggggggtttgttgggctggtgagttttcgaggtgactgtgctgtgctcggtgaggggacgcccagagagccctgacccggggtcactccgtcgccgttctcctcttgtctacgtgctggacccggtgctacctttttacccacacttaagtgacgcaaaatgcccttcaatggcgagaagcagtgtgtgggagaggaccagccaagcgattctgattcttcccggttttccgaaagcatggcttcgctcagtgactatgaatgctccaggcagagctttgcaagtgactcctccagcaaatccagctctcctgcttcaacaagccctccaagggttgtaacatttgatgaagtgatggctacagcaaggaacttatcaaacttgactcttgctcatgagattgctgtaaatgagaactttcaattgaaacaagaggctctcccagaaaagagtttggctggtcgagtgaagcacattgttcaccaggccttctgggacgtcttggattcagaactaaatgctgaccctcctgagtttgaacatgccatcaaactgtttgaagaaatcagagagattcttctctcttttctcactcccggtggcaaccggcttcgcaaccaaatctgtgaagttttggacacagacctcattaggcagcaggctgagcacagtgctgttgacatccaaggcctggccaactatgtcatcagtacgatgggaaagctgtgtgctcccgtgcgagataatgatatcagagagttaaaggctactggcaacatcgtggaggtgctgagacaaatattccatgtcctggacctcatgcaaatggacatggccaattttacaattatgagtctcagaccgcaccttcaacgccagttggtggaatatgagagaaccaagttccaggaaattttggaagaaactccaagtgctcttgatcagactacagaatggataaaagaatctgtaaatgaagaattattttctctttctgagagtgctttaactcctggggccgaaaatacctccaagccaagcctgagccctactttggtgctaaataatagttacttgaaactgttacagtgggattatcagaaaaaagaattaccagagacacttatgacagatggagcacgtcttcaggaactaacagaaaagctgaatcaattgaaaattattgcctgcctgtccctaattaccaacaacatggtgggtgctattacaggaggcctgcctgagcttgcaagcaggttaacaaggatttcagctgttctacttgaaggcatgaacaaagagacctttaacttgaaggaagtcctgaattctattggtattcagacttgtgttgaggttaacaagaccctgatggaaagaggtttacccactttaaatgctgagattcaagctaatcttataggtcaattttcaagcattgaagaggaggacaatcctatctggtccttgattgataaacgaattaagctttacatgagaaggctactttgtcttccaagccctcaaaaatgcatgcctcctatgccaggaggcctagctgtcattcagcaggagctagaagccctaggctctcaatatgcaaacattgtgaatctcaacaaacaagtgtatggaccattttatgcaaatatacttcgaaagctgctcttcaatgaggaagccatggggaaggtagatgcttcacctcctactaactaaagaagaactgacattggacgagagattggaaatccagtactttggtatccagtccacttccattgatggcattagagatccagcacattctcagtactgtggtgcagtattagcccaaatctgtgtaatgggtaatattagcattacagaagacacacacatcacatagaccctcagaagacgtaaacatcacatagaccctatttgtgcatcattttcaagtttaaaacagatatttgtaatgaacagaaaacaatttgtaattaattatattacctatataatacttgtaaatgttttcttaaccatttatatttggcttatgacatttaacccctaaggagttgtttttctcacttgttattatcaaacctaatggtttttaattttggtacaactccttaaagggttgaaggttgtgacaataactgagggaactgatgttctgaataaatgatgtgaagtaaacacaattgtatttgaaaaaaaaaaaaaaaaaaaaaaaaaaa

SEQ ID NO: 6432 - DNA, 690 bp, Homo Sapiens
  NM_152773
tgtgcggggcgctcgcgggcttcagcgaggcgggagggcggccctgttgccctggagacgctttccctgctgccggccgcgaccgcaacccgctaggccttcatcgcgagctacgcccggaccgagaagccccggcatggccacgtccatcggagtgtccttctcggtgggcgacggggtgcctgaggctgagaagaacgcaggggagcccgagaacacctatattctgcggcctgttttccagcagaggttcaggccctctgtggttaaagactgtatccatgctgtgctcaaggaggaactggcaaatgctgaatattctccagaagaaatgcctcagcttacaaaacatttatcagaaaacattaaagataaattaaaagaaatgggatttgaccgatacaaaatggtggtgcaagtagtgattggagaacaaagaggtgaaggagtattcatggcttctcgctgtttctgggatgctgacactgacaactatactcatgatgttttcatgaatgacagtttattctgcgttgtagcagcatttggctgtttctactactgaatgaatctttgaaaagctggtaaaagacatgaccatgaagaaatctgaactttttaatattgttaaatatcttgacaaaataaagatgttagtagtttgacaactgaaaaaaaaaaaaaaaaaaa

SEQ ID NO: 6433 - DNA, 4562 bp, Homo Sapiens
  NM_152778
gcaggcgccgttggggtgcgcatccggggacctgcaggttacaagcagcagatcccaccttcagtcctggctctgacaagccctccagcttcacgccacccgggatgggagaaagcaggtgtcgcgagagttgggcgcaagacgccttgtagggagtgtaactatggccggcctgcggaacgaaagtgaacaggagccgctcttaggcgacacacctggaagcagagaatgggacattttagagactgaagagcattataagagccgatggagatctattaggattttatatcttactatgtttctcagcagtgtagggttttctgtagtgatgatgtccatatggccatatctccaaaagattgatccgacagctgatacaagttttttgggctgggttattgcttcatatagtcttggccaaatggtagcttcacctatatttggtttatggtctaattatagaccaagaaaagagcctcttattgtctccatcttgatttccgtggcagccaactgcctctatgcatatctccacatcccagcttctcataataaatactacatgctggttgctcgtggattgttgggaattggagcaggaaatgtagcagttgttagatcatatactgctggtgctacttcccttcaggaaagaacaagttccatggcaaacataagcatgtgtcaagcattaggttttattctaggtccagtttttcagacttgttttacattccttggagaaaaaggtgtgacatgggatgtgattaaactgcagataaacatgtatacaacaccagttttacttagcgccttcctgggaattttaaatattattctgatccttgccatactaagagaacatcgtgtggatgactcaggaagacagtgtaaaagtattaattttgaagaagcaagtacagatgaagctcaggttccccaaggaaatattgaccaggttgctgttgtggccatcaatgttctgttttttgtgactctatttatctttgccctttttgaaaccatcattactccattaacaatggatatgtatgcctggactcaagaacaagctgtgttatataatggcataatacttgctgctcttggggttgaagccgttgttattttcttaggagttaagttgctttccaaaaagattggcgagcgtgctattctactgggaggactcatcgttgtatgggttggcttctttatcttgttaccttggggaaatcaatttcccaaaatacagtgggaagatttgcacaataattcaatccctaataccacatttggggaaattattattggtctttggaagtctccaatggaagatgacaatgaaagaccaactggttgctcgattgaacaagcctggtgcctctacaccccggtgattcatctggcccagttccttacatcagctgtgctaataggattaggctatccagtctgcaatcttatgtcctatactctatattcaaaaattctaggaccaaaacctcagggtgtatacatgggctggttaacagcatctggaagtggagcccggattcttgggcctatgttcatcagccaagtgtatgctcactggggaccacgatgggcattcagcctggtgtgtggaataatagtgctcaccatcaccctcctgggagtggtttacaaaagactcattgctctttctgtaagatatgggaggattcaggaataaactagctaagactgtgatggaaactacttgctgtgtggcacttcctggtctaaagctctgctagacaattgcggtgagccagtctccaagaatcagactacagatattgcagattttgaagaacaagaacatatgttgaataacagagagaattctacatgtcattgtgaatagtaggttatataaaaacatactagatgataatttccttacctcagaaatgaaatattattcttataatacctttttgtggttgcatgaactaatgagtgaatggacaatgatgaataaatgtgaagctgtattcttaatacccactgcagaagtgtcattaaaataatatacagtggaaccagaaagagggttctgtaagaattagccatagcagaacaaaattatagaattttaaatacctctacccaagtagaggtatttttattcagacacctactttttatttataaaaaaatgcattttctattatcaagttcacttatgaaataaaaattataacacatattttccatttagcgtgcctaacatcctaccttgccttctatgagtctttcttctaatactacacctctgccttattttagttcagggtttcactaagtaacccctacattaataaatgagtatggataatgctaatatttgagcaatacagaggattaagagatcaagatacttcactgcctattagcctaatagggatacctactttctttcaaatgccaaaaattcacattagaaacataatccagatatgtgttattttatatatatatatacaaaacagtaaatggtttcttaaaattattgctatttttcaacccccttaaactggagaaaaacatttaattagtaaaacattaattaatttactttaatttttcccatctctcagtagtggcggggaggaacacaacagttttcaatctatgtctgcatagttgtgtagagctgcagaattttagttggatttttaatttggatgatccctgacagccccaaactagtcaggctaataagtatttgaggcaaaatggctttaatctaacaatttactgagtttacctgaagttggctaaataacactgtatgtttaacttctacctctacataagttgaatgctgataaaaggaactagtagataactatgtatattgataagcactgttaagaaaatgcaaaaatatttctaaacacttttccaaatgttttctactttaagttagaaatagtttcaaatctgagaataaacactatataatctgcactttataggttgggtgcagtgtctcatgcctgtaatcccagcactttggaaggccaaggcaggaggattgcttgaggccaggaattcaagaccagcctgggaaacaaagtgagaccctgtctttacaaaaaataaaaacaaaaatttaaaactgtataatctgcactttatgctaaactagctgtgctcttaaactcaattttttcagctctaataaagggcttaatttgatagaattattctacgattaaattttgaagactgttttcactctcctctgccgcccatagcaagactgcttccatagatttctcagaaccgtagccagttctggctatttggtcaagtctgggatccctcttacctgctattctgcagctgctttctctgtcttacattttttgggccacgtctaatcttaaagagtaaactctacccttggtttgcatagtgtgcatgacaaaaataacaagaataatggtaatgatgaaaatgataagagcaaaatttgtggagtgctttccacattccaggtaatgtgtaacatacaatttaattcttacagcagtcttatggagtgaaaatactattatgattcccgttttacagatgaaagaatggaggcacagaaaagttacttgtctaagtaacagtctatccttaaagtccacagtcttaaccacttgatttttcatagtgaggaaaatatcccagaaagttgcagtttcaattaatcactaattgtagggtaatttaactataccagtgagtcctactagcagaaatatttgggcaacataagcccactgactggagcttttgtcttagcataataacctgtttccagcaagaatataacagaaaaaagtttcccagctttcaaaggtttataatattgattaaaatttagataaacttaaccttacacaaatgactcttactttcctttttattgagagcattttctttggagcattttcttctttggaggattataccttgctcatcttggcacaaaagaaggcgaaaggaagtaacatgggattgggaaaagagcaaggagataaagtttgaggaaaaaaaatcaccatgttgatgtcttcttgagtaggccaagttgcgtataaagagaaaatgacaacaggagattttaaggtatgatatattgttaagagtagtacatatttaagaagagaaaatatgtttttgaaaacaaatttaaacttgaaaggatgattttcatattttgaagggatttataacttcacaaagcatctccattctatcttgttcagctttacatttaaaaataaactcttcttgttcatataaaccttatctcttacataaagtgaaatctgttaattttttgttttgacaaggataaactacttacctgcatctgtttaagaatagattaacttattttgagaagaaattctgggcaccatttttgaccattgaagacttatttgtaatttaatttctactttacattgtgaatgttcattttctaataaacaagattattttgcatatgtaaaaaaaaaaaaaaaaaa

SEQ ID NO: 6434 - DNA, 2604 bp, Homo Sapiens
  NM_152783
ggcgtcgccccgcccactccggctcggcggctctgggcctgcggcgggcgctgcgggttggagctcgggacgtgatcgtgggcgcgcagccagcggctccctgcccttcccctccgggccctgagtaccggccccccaccaaggaggagcccgaggtctccgtcccggcggcgatgctgccccgtcggcctctggcgtggcccgcgtggctgttgcggggtgctccgggagccgcgggttcttggggtcggccggttggccccctggcccgcagaggctgctgctccgccccggggacccccgaggtgccgctgacccgggagcgctaccccgtgcggcgcttgccgttctccacggtgtctaagcaggacctggccgcctttgagcgcatcgtgcccggcggggtcgtcacggacccggaagcgctgcaggctcccaacgtggactggttgcggacgctgcgaggctgtagcaaggtgctgctgaggccacggacgtcggaggaggtgtcccacatcctcaggcactgccacgagaggaacctggccgtgaacccacaggggggcaacacaggcatggtgggtggcagcgtccccgtctttgacgagatcatcctctccactgcccgcatgaaccgggtcctcagcttccacagcgtgtctggaattctggtttgccaggcgggctgcgtcctggaggagctgagccggtatgtggaggaacgggacttcatcatgccgctggacttaggagccaagggcagctgccacatcgggggaaacgtggcaaccaacgctggaggcctgcggtttcttcgatatggctcactgcatgggactgtcctgggcctggaagtggtgctggccgacggcactgtcctggactgcctgacctccctgaggaaggacaacacgggctatgacctgaagcagctgttcatcgggtcggagggcactttggggatcatcaccacggtgtccatcttgtgtccacccaagcccagggctgtgaacgtggctttcctcggctgcccaggctttgctgaggttctgcagaccttcagcacctgcaaggggatgctgggtgagatcctgtctgcattcgagttcatggatgctgtgtgcatgcagctggtcgggcgccatctccacctggccagcccggtgcaagagagtccgttttacgtcctcatcgagacttcaggctccaacgcaggccatgacgctgagaagctgggccacttcctggagcacgcgctgggctccggcctggtgaccgatgggaccatggccaccgaccagaggaaagtcaagatgctgtgggccctgagggaaaggatcacagaggcgctgagccgggatggctacgtgtacaagtacgacctctccctccctgtggagcggctctacgacatcgtgactgacctgcgcgcccgcctcggcccgcacgccaagcacgtggtgggctatggccaccttggagatggtaacctgcacctcaatgtgacggcggaggccttcagcccctcgctcctggctgccctggagccccacgtgtacgagtggacggccgggcagcagggcagcgtcagcgcggagcacggagtgggcttcaggaagagggacgtcctgggctacagcaagccaccgggggccctgcagctcatgcagcagctcaaggccctgctggaccccaagggcatcctcaacccctacaagacgctgcccagccaggcctgacggccactcctgctgctgccaaggcccactgggggtcggcgggtggctctcgggcgggggtgttgcggtggctctgagggatgagccggcagtgggcaggggaccaggcacctggttgaagggactgggagcccgcactggggaactgccggacgcaggccctcgggcaggagcatctggcagagtggggggcgtggcaggcaccctcctttgcagggcgaggtggggcctctgcagccatcctggacaggccggggtggcggcagctttgcccacgtggaagcggggtgggtctcacttgcgtggtggcccctggccccatcttgcctgctgcggcctggggagcaggcgctgggtggtggttctgcctgcttgctgctcgttccccgggcatgcgtgggcagcggggggcatgcgtgggcagcagggggcgtgggcagcgggggcacgggcaggaccacgtgggccgtgatcgtgggttgccgagaggacctgagcgctgcggctctgctgaatggagccgggtccctcaggccgtggacgccctcgggaggggggtgactgtggcttgtgtctggacaggaatgtgtcatttcccacatcttctagagggctgccagctgggaagacagttatcagggcaagctgtgctctgagtttcgggttctgctcctacaaagaacgtgcggtgctgcgggcgagggccccggcacggacaagggccactgcagagtgtgtttctgctcgtcagctgccctgggcagcggatgggctgggcgatgcagctggatgcacatctcattctgtcatgaatgtccagtaaaaatctgaattggttgcaaccttcaaaaaaaaaaaaaaaaaa

SEQ ID NO: 6435 - DNA, 3349 bp, Homo Sapiens
  NM_152785
ctctaacactcctcccccagcctcttccttccctctgcagagacacccttctcctttctgctgtctctgcacgggtggccagagccacacagccctttctttaagtcaggagttgccctgtcagagcacaaggcaagaaggaagtggtaaagggacggaggggaagccctgagaggactgagaggatgggaaattctctgctgagagaaaacaggcggcagcagaacactcaagagatgccttggaatgtgagaatgcaaagccccaaacagagaacatccagatgctgggatcaccatatcgctgaagggtgtttctgccttccatggaaaaaaatactcatttttgaaaagaggcaagattcccaaaacgaaaatgaaagaatgtcatctactcccatccaggacaatgttgaccagacctactcagaggagctgtgctataccctcatcaatcatcgggttctctgtacaaggccatcagggaactctgctgaagagtactatgagaatgttccctgcaaagctgagagacccagagagtccttgggaggaactgagactgagtattcacttctacatatgccttctacagaccccaggcatgcccgatccccagaagatgaatatgaacttctcatgcctcacagaatctcctctcactttctgcaacagccacgtccacttatggccccttctgagactcagttttcccatttatagtgaagtggctggactagcatttgtttagcaccaacaaataaaaggtgggatgggggatctgcctgaagcagggatgggacacaaagtccctccagcttatctcccacaacaaccctttccctgcagagcatggtttgtataccacaagccctcttagcacgcaaaagccaaaatctaaagatcaaccatttatcctgaacaacaccatttgagaaagaggtaaccatctttggttctacatggtttggagagtatagtggtaggaggggctccctgattcccctaaagctatgcacaccacaaggggctctgctcttctgtctgggatcttcttataaagtgttcccatgatcattctctaaagtcacaaggaagctttactcatcatactaagtgtgcccaagggggagttcactcattactgtgaccttccagctcagtccccacccatgggagcctgtgttgctcctctcactccatgtgtctaagtcatgtcttttacatagtgtcctttgacctgttggcccccatggtctggttagttatgtgagttgaatcaagaggctctaggccagatgtttacataattttaacctatatgattttatttttaactttgtatttctccctagaaatcttaataagacaattatgccatcagacaatgttaagaagaacgatccttggagatcccgtaatcccactacccttctttggctcagagaggataatttgcctaatgatacattaaagttagtggcaaaacttaatttggagcctgatttcctactgacttccaatttagtgctcccccagtatgctaaatagaaagccctctgcaatatattaaatgtatactaaatgtatatatttaataatgtcatgtataaaatatgaataaaatgtccacataggaaattaacacatatataccttctctgataagcactcctctatgtgtcctgattatttactttctcttatcttttccttagtgttcctcaaattatatctatcctctaaaccagggatcagcaaactataacccccaggccaaatctagcccactccctgtttttatagataaagatttgttggaacacagccacactcatttgtttacctactatctatgattgttcaaccatgggagagttgagtaattgtgacatggaccataggccctaaagagccaaaataaatatactttggcactttttggaaaaaaagtttgcagacacctgccctaaatgattatagtttgagagaaacttaacagaaatgtgtttggttactgatgcataagagcaagcaccaataaaatggcataaaaatattaaatcacaaatggataagtgagaccaaggcaatttagcaaattctactatttctgtattcacacctgtgtcttccacttgctgttttatttaactcacggctactgtcctaattttagggatgctaaaatagtttgttttaaaagaggtttgtttaagaaagcagtaggtacattatgtttactagacaggcccttggaccagctaagcgacagggaacctggtacattatgtttagttactgttttcttctcaaagttaaccaaagctaaataactttcctatgtaaaatgtgctgactcccaaaagaggagaaatgcaatggcttgagcttgcatgtgtcacaggtttgtggagccttcagccaggtgatggtcttcagctaaagagccagctgcatcttggtatctcttcctctgctaacttcctacttttagcaaaattctttcacttggaactctagctgatccttggccaggatcagatcctcaaaaggaaatattcagttagcagtggatattgtacaagatgtaacatggcttagaggaaagagtgtagacccagcgacagatcatcagtcactcaaatcctggttctctctcttcctccatctgtgactttgaacatgctacttggaggctcagcttcttcaccatcaacaggaggattacatctaatgcaggcaatcatctattacagatgccgaataaatgatatcaaagagcatagagaaacaaaaatcttttatgatgtacggaaaaaaaccatgctgatacagctggctattcagggtcacccagcagtcctccagcaaggtagaaacaccaaatcaatgagtttatgctagaatttttcacatggccactggaccattgtggaagtagactggttgaaatattcttagtatgacatagtaagttatatttgtttgaaccttatcctgtgaaagcattatctgtcccaaacagtatatgccttttatcagggacacattaaatataaatgtttaaccaaagaaagttgttcttataatgtaattataacagggatttataagagggaattataagagggattatgaaagggaattacttttgagcaaggggagccatttgggagtgcttcaagatacccaatatgatatacacaattatgatttgtcagtcaaaaataatattaagaacaaaaaaagagttaaaaaattctgatatgagtgtaatatacttaatatgtaggatgtctcaaatttccagtaaataaattttaatgtcccaaaaaaaaaaaaaaaaa

SEQ ID NO: 6436 - DNA, 6798 bp, Homo Sapiens
  NM_152787
cccgacggaagccctgaagccagagcttgcttgccaagctctcgctcagaccggatctaggaaatacgaggcgggcctcggtgggagggacgcactgagggaggagggaggaaagggggcggcggcggcggcggcggctcacaccggatcccggccctgcacggcgcgtaccctgggggttcgggcggggaagcggcgccggcccggaccccccgcgggagtaggcgacgggcgtgagggcgaggcggcggcggcggcggccagagagcagcagccgcctggacactgtcttcagccttttcttcaagtttttgaccgtggattgtgttgtgtcaaactggatgaattatcttagttgaattttcaccagttgaaaaattggagatttctagactactgaaaagaagttgctttcagagctggagatgtgaataaaatttctgtgccagggttgataaaccatcttgaggattccatccaggaaaccccatcacagttggttgttatgtctccttagactcctcttggctgtgacagtttctcagacttttgttcttgaggagtactgatcagaaaatgactgtggtgctagaagatcattacttttggaaagccggttaacatccatttcctaagagaaacttggccaccatttgctctggcatggcgcaaagcagcccacagcttgatattcaggttctccatgatcttcgacaacgtttccctgaaattccagagggcgtggtgtctcagtgcatgttacagaataacaacaatcttgaagcctgttgccgagccctttcccaggagagtagcaaatacttatatatggaataccatagtccagatgacaataggatgaatagaaatcgccttttacatattaacctgggtatccattctcctagtagctatcacccaggagatggagcccaacttaatggtggtcgaacactggtacatagctcaagtgatggacatattgatcctcagcatgcagcaggtaaacagctgatatgtttagttcaagaaccacactcagctccagctgttgttgctgctactcccaactacaatccattttttatgaacgaacagaacagaagtgcagctactcctccttcacaaccacctcaacagccatcttccatgcaaacaggaatgaatccgtctgctatgcaagggccttcaccaccaccgccacctccttcatacatgcacatacctcggtatagtacaaatccaattactgttacagtatcccagaacctcccttctggacagactgtaccaagagctttacaaattcttccacaaattccaagcaatctctatgggtctcctggttctatttatattagacagacatctcagagttcatcaggaagacaaactcctcagagtacgccgtggcagtcctcaccacagggcccagtgcctcactatagccagcgtcctttacctgtttatccacaccaacagaactatcagccttctcagtattctcccaaacagcagcagatccctcagtctgcttaccattcaccacctccttctcaatgtccttcacccttcagctctccacagcatcaagtgcaaccttcccagttgggccacatctttatgccacctagtccttcaactactccaccccatccatatcaacaaggacctcctagctatcagaaacagggaagccattcagtagcctatcttccatacacagcatctagtttatccaaaggttccatgaagaagatagaaattacagttgaaccttctcaaagacctgggacagcaattaataggagtccttcacccatcagtaatcaaccatctccatggaatcaacactcactgtacacagccaccacgccaccttcaagttctccttcaagagggatatctagtcaaccaaaacctccatttagtgttaatcctgtgtatattacatatacacagccaactggaccttcttgtactccatcaccatctcctcgagtgataccaaacccaactacagtttttaaaattaccgtaggccgagcaacgactgaaaatcttttaaatttagtggaccaagaagagcgctctgcagcaccagaacctattcagcccatttcagtgataccaggctctgggggagaaaagggaagccataaatatcagagaagttctagttctggatcagatgactatgcctacacacaagccttgctgttacatcaacgagcaaggatggagaggttagcaaagcaactgaaacttgagaaagaggagctagagcggttgaagtctgaagttaatggtatggagcatgacctgatgcagagacggctcagaagagtcagctgcaccactgcgatccctacgcctgaggaaatgacaagattgagaagcatgaacagacaactccagataaatgttgactgtacactgaaagaagttgacctccttcaatctagaggaaactttgatccaaaagccatgaataatttttatgacaacatagaacctggcccagttgtaccacccaagccatctaaaaaagactcctcagacccctgcacaattgagagaaaagcccgaagaattagcgtgacctccaaagtacaggcagacatccatgacacccaggcagcagctgcagatgagcatcgaactggctccacacaaagtcctcggacacaacctcgagatgaagactacgaaggggctccatggaattgtgatagctgcacctttcttaaccacccagcactaaatcgctgtgagcagtgcgagatgccacggtacacctgaattcagaaaagtctgcgccaggttgaaagtgaaactttgagcactaccagaagaaaaggaaacctcgggactctattcatccacccagccttttcattttcgattgcacagcggggaggaggaatggctttgtggtcgtcgttgtgctcacgaaaggaaaaatggggaggtcttttttttctcctttcttaactcactacagagtgagagatagaaagggatacttgaaactgggaaaggattcactctgtgaaagaatgtacacacagaagtcaagagctcttctgtggtggaatcccaattgttaaagttactgctgagtggcccttattttttaaagtagtactttgaatcatagtatgaaatgctacagtttatgcaaactgtgaattcccagagcagacttacctggtcaccgctctctggaaaaccaaggctccccgtgcttcttcccattgcttcctactaaagaggacaacaggaaaaagcacctagaatatttggggggggggggcaaattaattaagggtatttgtaattgctgcttttttcaggggtaatttccaacacacatacatgcacacaaacaaaatgttttaaaatgtgatttgtagcagtcaggaactaggcatatcatgcctttgtttaaaagtacaatcagaggtggtaagatgcctttggcttgtacagtgtgattcatcgagctctatcaacactggtaactaagacctacttatgccacataagagatgcatttttttaagttactgcatgtttttattaaggccattggttttcaaaataacaagtccttacaaagtatgattttataaatgatattctcgtaaaactgcgctttgccagtagcacagtgaatgtatgccaaatgcaagtccattccaaaatccatttggaaatcttgagctcagctgtggttcttaaacttttgcagtccatagggccttttttttttccttccaattttgtgataaattcatgatgtttacagcacagataaaactttgtgccataatcctaatttagctgaaatcaatattaactgttcaataaaaacttacttgcatatgttaacaaaccagtgtgaggggaattacagttggccaacgacaaagttgcacactgcattatttaggaaaggagggattgtcaaaaattattaagagaaaggtgaatatagaggactttgaaacaacttttaaaatttaacataactgtatctagaggtcaattgagtctctacaggcagttcagatcattttaaagcactccttatttatgaaatagaacttcagggtgcggataagagatataaagtcatgtgactcactagggtgcatcgctggaaacttaatagcacatttcattaaggtctctgccattgttggagttccttcttagctcagaattggagttttggaatcttcccctcattttggtgagtataaacagcaataaagttagtaggttctcccatcctaaaggattttacctgaggatatcgtcttaggaatatccatagacgctcccatcaggtttctcccccaacccccctacaccgcccccccacttctaatttagcagtaatctctggcagacctggaaaaacaagctgctcttaatagcataatgaaaccaaaggcgtaataactcatcatagttttccatcagaatcatttcacactctgcctacagctttgaaaacattttttcatatgtgaaaaactccccaaaatatatccactagtctcccaaaggaagcatggtaattaacactgataaaaacatctctcacacaacaactgtggcaaaactgtgaaaataacggtgagaaagcagatgggcttaaaagcatggtccccaaaacaacgttcttcaaaggtttttgtaacactggtctctgtctccaataacagtctagccgtcctactgttctgtaatatgcctttgcctttgtatggtttcatatctctttagtgatggtcaaccccacttggttttaagttacaatttaggggaaatatatatatatatactgcttggtgtcctagctaaaaggtttaccagtattcatagtgatatgctgaagtggaggcaattaacttggcagttgtcagttgagaatgaaagtagcatgtctgaaaacagtctgatgctttataaaaccatgtagatgactttaaaactattgcatgaaaatacatcaaggttaataagctgttatacagtagatgcatggtttcaatcctttggtgatattatctagtcaatcattgttttcacctgccaggaaaagagagaaaacagtctattggataggtgtaaagggtggggtatgcggtatcagattgattttaaggaagttttgtacatgttaatttttaattgtgcacaagtttcatatgccaacataggctgtattcagttttaaaataggcaaaatgacttgacactgataaatctggtatgtttaactgtgtcccatatgtagactgctttttgcctatgaccagtttgaacaagaattcacccaactttcaagatgccttttcaaaaggatcttgtagtcagttggtatgtacagacaattggcatggaagtggtaggatataaatcggatgacgcctggctgctgaggtgccagctggatcagctggtgcacttcttgtttcttgtaagaggtttctttaaaatgactagtttgatgtatctggtaacatataggcctgactatacattttacattatttcgctattttgtaaactgggattttagaaagcacgtttgccattttgttaaagtacattgccccttaaattttggagtagtttttaaaagtttaaaatggtaatagaggagccagaaactttttaagcattgtaaaatgttttgaattgatattgactttgtttggaagagagtagaggcagggggctttaaagaaacaaagaaatgcattgtaaaaatgtagttttagagcaaattaataatgatggtggggaaagtgttgctaatttgtttatttccctggaagaaatgggaagtgtgataagcagtttaatttttaaggagctggtctcaattttagtactttttaattatgcaaataaatcaatgtttccttaaattttgtcattgctttgtcacagttgtctagggttcatatccaaccttctgtggcaattcaattttatatagtcttttaagaggtaattgtaatgtatttctgacagtataaacaaaaagaatataaggcatagaagaattgtcctctaaaaatatcaatgatgtatcctggaatgtgaagatgtccctttatagttaaaaattgaattattttaatattgtaccattgttagaccttgaatgagtccatgttaccgtgtgtgtctgtatatctatctgtagagaaagaaaaatgacaactgaaatgttacttttaaaaatcagaataaattgggcactgtctgtgttgcaccactactgtatcttttcgaaagaattaacagtatttgcctattgtaaaggttaattctgatgacgttttcacattcaccagactttttttcctgtattatttgcatccccaaatatttaatacaagtagattctgcatggcttgggcattcagagattaatagaatgatgactcaattttaattctaaagccatgaaaagttactttgagactgaacaattctgaattatttatgatacccaatgtccatgtttctttccctactgtaaaagaattgatcagtttcttcattaaagcagcaaaaacttattaaatcttgtaaataccatgtctcttttagatttctgtgtatgctgtgaatgaaatcattttgagatgaaattgtacaaaggcattttaaaaggctctgcatgcatcgtacctccaaacagtacatattcggaaagtcaaagattcctgcaaaataaataaactaaaagcaaacactaaaaaaaaaaaa

SEQ ID NO: 6437 - DNA, 2216 bp, Homo Sapiens
  NM_152792
gcagcagttgagtccatgtaagatgattgtgcacgtgtgtgtgtgtgtgtgtgtgtgtgtgtgtgtcctcactcacttaaaaaagaccatttctgtgcattctttatgctggaaccctcctctgcctccctctccaggaaatcccataggatcccatacctgctttagaatgtgtgtgagacacttcccagtgcctggcatgtggtaggagctcagtacatgtaaactgttttcctttgaccactcaaagtagtcacttgttggggaggccaatggcggcttccccggtctctgagctgatgggcgtctggtccctgcctccccttccttcactggctgatgacaaatacctgaatgtcatcacatcctccgtgtcctcatctgttattctggaacacaggccagggagggtacagggtagtcccccttcaacagaggctggcctttcttgggatgtgggctggctggtgttggtccaaggatggatgcagagggtgaggcacccatcctgctagtccggccggatgctggcaggagggcggggtgaggaggggcggagcttccagaacaaaggagaatggggagcccaggggccagcctaggcatcaaaaaggctctgcagagtgaacaggccacagcactgcctgcctctgccccagcagtcagccagccgaccgcgcctgctccctcctgcttgcccaaggccgggcaagtcatccccactctgcttcgagaggccccgttttccagcgtgattgcgccgacactgctctgtgggtttctcttcttggcgtgggttgctgctgaggttccagaggagagcagcaggatggccgggagcggagccaggagtgaggaaggccgccggcagcatgccttcgtcccggaaccttttgatggggccaatgtcgtcccaaacctctggctgcacagctttgaagtcatcaatgacctcaaccattgggaccatatcaccaagctaaggttcctgaaagagtccctcagaggagaggccctgggtgtctacaataggctcagtccccaggaccagggagactatgggactgtgaaagaggccctcctgaaggcctttggggtccctggggctgcccccagccacctgcccaaagagatcgtctttgccaacagcatgggtaagggctactatctcaaggggaagattggcaaagtgcccgtgaggttcctggtggactctggggcccaggtctctgtggtccacccaaacttgtgggaggaggtcactgatggcgatctggacaccctgcagccctttgagaatgtggtaaaggtggccaatggtgctgaaatgaagatcctgggtgtctgggatacagcggtgtccctaggcaagctgaagctgaaggcacagttcctagtggccaatgcgagtgccgaggaagccatcattggcactgatgtgctccaggaccacaatgctatcctggactttgagcaccgcacatgcaccctgaaagggaagaagtttcgccttctgcctgtgggagggtccctggaagatgagtttgacctggagctcatagaggaggacccctcctcagaagaagggcggcaggagctatcccactgagaagccaccttttctttaacctcctaaatattggtgggaagacccaccgctgtggggggggttgcatatcctcatgggggtcactgggcttggccagtctgcttatcaactcttgctcttctctcccctttgcctccctctgcaggggccttaatctgcccctggtaggggaggcttccactgaacaggcacaggtgagggagagcaggctggcttagagggacagggtccccatggtcatcaagctgctgttgatgacaaagactcaaaggctggaagagctcccaaggaagctagaaatgcttgtctttgaaagaactgtgggaccccttcagattccctgaggtatggcttggtcactctcaggtcctcaaagcctgtcttagttgggctgggtcctagctgcagggtctttgtgagggtcacagttgctctgggacacctccctgaagagcctttccacctgtacaatcgtattttctttctgtcatttgctttgaagcccattgtgccttatgccaataattcaattgctgcaaacaccaataaagattgattcatggaaaaaaaaaaaaaaaaaaaaaaaaaaaaaaaaaaaaaaaaaaaa

SEQ ID NO: 6438 - DNA, 1572 bp, Homo Sapiens
  NM_152828
gtccggccggaacctgtttgcgaccccgagtcccatgacaccgcttctcctcacaccccagtccgcagtgcccctccccagcctcggccgggcctcccgggagccgggcgtggcgttccagctagtgagccgtttctcccctgggctcggaggcggaagcttgaggggcgcggggaggagcttcgcgtgcggggtgaacgcccgctctacgtgctcgttctcttcgcgaccgctgcgcgcgagccccgtgtccccacggcgggcagcagcggcggcggcggcggctgaacgcggagggggcggagggagcccgcggcggcggcagcagctacagcgaaatggcggagaccgtggctgacacccggcggctgatcaccaagccgcagaacctgaatgacgcctacggaccccccagcaacttcctcgagatcgatgtgagcaacccgcaaacggtgggggtcggccggggccgcttcaccacttacgaaatcagggtcaagacaaatcttcctattttcaagctgaaagaatctactgttagaagaagatacagtgactttgaatggctgcgaagtgaattagaaagagagagcaagccctgcctcagaatgacatcagaggcaaggagtcatggaaggacgtggtgtgctcagaatgatgaaaagttattttgtgactagaaagtcgtagttcccccgctccctgggaaagcgtttttgcgtcagcttccttttagaggagatgatggaatatttgatgacaattttattgaggaaagaaaacaagggctggagcagtttataaacaaggtcgctggtcatcctctggcacagaacgaacgttgtcttcacatgtttttacaagatgaaataatagataaaagctatactccatctaaaataagacatgcctgaaatttggcaagaaggggcaaaaacgtgactattaatgattgataagcaccagtgaagaagttctaacttttagcatgctgcacagaaactggtataacatgccttcagtatactaacactcatatgctcagttttgttttgttttggcagttgacaagaagttaatttgctttagtaaaaatccctcattccagcctttctatataaatagctctttcttgctgttttaatgtggtgcacactatagcctcacaaacctgttattccagtgtaatctgcagtgtcgtaactaaagttactggcttggtcttatttgcacagtttttgcgtcttgtttgcttcttgcatctgattaactagaatatttctctttcccccttttaatttgtgatgtcacttgaccccatttatgtgtaggagcactacaccattggtttccaatactgcacacataagatacatacttgtgtgcagaaagtatcttcctccaggcttgtaatacccttcacatggaagattaatgagggaaatctttatattctgtataaaaacaaaagcaaatttatatactaaaatcatttgtctaaaaatttaagttgttttcaaataaaaattaaaatgcatttctgatatgcaaaaaaaaaaaaaaaaaaaaaaa

SEQ ID NO: 6439 - DNA, 2603 bp, Homo Sapiens
  NM_152829
gaggagtccttttctgagtagagtccacagaagaggtattctattgatgggcttaggtcacgagcaaggatttggagccccttgtttaaaatgcaaagaaaaatgtgaaggattcgaactgcacttctggagaaaaatatgtcgtaactgcaagtgtggccaagaagagcatgatgtcctcttgagcaatgaagaggatcgaaaagtgggaaaactttttgaagacaccaagtataccactctgattgcaaaactaaagtcagatggaattcccatgtataaacgcaatgttatgatattgacgaatccagttgctgccaagaagaatgtctccatcaatacagttacctatgagtgggctcctcctgtccagaatcaagcattggccaggcagtacatgcagatgctacccaaggaaaagcagccagtagcaggctcagagggggcacagtaccggaagaagcagctggcaaagcagctccctgcacatgaccaggacccttcaaagtgccatgagttgtctcccagagaggtgaaggagatggagcagtttgtgaagaaatataagagcgaagctctgggagtaggagatgtcaaacttccctgtgagatggatgcccaaggccccaaacaaatgaacattcctggaggggatagaagcaccccagcagcagtgggggccatggaggacaaatctgctgagcacaaaagaactcaatattcctgctattgctgcaaactgagtatgaaagaaggtgacccagccatctatgccgaaagggctggctatgataaactgtggcacccagcttgttttgtctgcagcacctgccatgaactcctggttgacatgatttatttttggaagaatgagaagctatactgtggcagacattactgtgacagcgagaaaccccgatgtgctggctgtgacgagctgatattcagcaatgagtatacccaggcagaaaaccagaattggcacctgaaacacttctgctgctttgactgtgatagcattctagctggggagatatacgtgatggtcaatgacaagcccgtgtgcaagccctgctatgtgaagaatcacgctgtggtgtgtcaaggatgccacaatgccatcgacccagaagtgcagcgggtgacctataacaatttcagctggcatgcatccacagagtgctttctgtgctcttgctgcagcaaatgcctcattgggcagaagttcatgccagtagaagggatggttttctgttcagtggaatgtaagaagaggatgtcttaggaggagggcacccagaagtatcgagccatagctatccaaagtggtctgcatttctactgtaaaatgcaatttgaaaaaaataaaacgcaaaaaaagaaactgtaaaggaaaccaagagattttgtttaatttttttggccattttttcttcatcaattttttttcggtctcaacttttaaacttggtttaagcatttgatttgtaaaacagtaaataattgtatctttccatagcttttcaaatgtgaaatcatttttggaagcttggatctcattaaacttcatgtctctattccatttgtgccacacacttaaaagttagtgtactgaatggaaagatgagcattcctagttctacacttcttttttccccctcatgtgtaaaatgaaaagaaaactaaatttgccctaataccaaggcgctacgtttattgcctcgtcttattcactgacctttgtaatgatacacagtgaattctttttgacaaagagaaatgcagtgtagtatgcagagctgctgttttaatgcctatgcatttactctttcctgatttaggcagaggtggcattttctttattgcatttctctatttttttaatgtaccctaccttcagtattctctttgtaagttggtgacttgcatctgtggccttgaatattttattatcacatgtggcataacagtatccacactttttagttctttatttttttttttttattttgagcaattctcctgcctcagcctcccaaatagctgggattacaggtgcatgccaccacacccagctaatttttgtatttttagtagagacaggttttcaccatgttagccaggctggtctcaaactcctgacctcagatgatccgcctgccttggcctcccaaagtgctgggattacaggtgtgggagccaccatgcctgacccacacactttttacttgtatagatgatttttggcttggacataaaagccaagccacccatttgcttttaatccaaagaacatgtatagtttttgtacccagagactatgatttatattgattgcacttgcctgccatgatttagataagattttttttgcatggtttttattctttcctaatggatcctgttttataatacttccaagcctgtccatggatatatcaaatgtcttcacttgtatattttcatggctaggtatttctaatgtttattcttccctgtgtacttctacacatagctatgcactatgaaaattaaatggaatgaatgatatgtatattactcaaaataaagtttctttcactttaaaaaaaaaaaaaaaaaaa

SEQ ID NO: 6440 - DNA, 2138 bp, Homo Sapiens
  NM_152834
ggcagatctcacgagagaggatttggcgccctcctctgtggattctggccaggccgggttcggcggttgctgtgagagcgggcttcccaacaccatgccgtccgccttctctgtcagctctttccccgtcagcatcccagccgtgctcacgcagacggactggactgagccctggctcatggggctggccaccttccacgcgctctgcgtgctcctcacctgcttgtcctcccgaagctacagactacagatcgggcactttctgtgtctagtcatcttagtctactgtgctgaatacatcaatgaggcggctgcgatgaactggagattattttcgaaataccagtatttcgactccagggggatgttcatttctatagtattttcagccccactgctggtgaatgccatgatcattgtggttatgtgggtatggaagactttgaatgtgatgactgacctgaagaatgcacaagagagaagaaaggaaaagaaaaggagaaggaaagaagactgaggggcagcagctgcttggagtttgcgtccttcccgtccacccagtgcagctcccagtgctgcagtgtgcgtggcgtgggcatccttccagctgactcatggtttgaaaaaccgttgttttatttaaatatccacagtggtagggcacacactgaagttggcttttcagccagcactgaatgtatccatcaggacatgcgtcttcaggtgcctgatctttgtagtcaggctgtgggaacggtctctgcagagcttcataactgggaatttgatttgaagaagtccatgtcatatgtgtaactagtactaattataaatataaaatacacaatataaaatatgaaactcaataataaacagtgccacctgtacatgggcaccatgccctcctcctcgtgctgtgttttctagtgcatgccacagttcgcagtagagggtgttttcaccttccaagacatggggcaaagtttggagacacctggttgtcactggagggggtggtgctcctggcttctcctgtggagcccggggtgatgcataaaatcctgtgtgcctgggtcagccgcatcacagacaatgacttgacatgaaatgtcagctgtgctggggcagagagaccttggaaggaagctcttggaaaatacgttgtatctcagtttgatgaaccaattcacaagaggctaggccctctctagcaaagttatgggctgctttactgaaaacagaatggaagccctgaagtcaacactccatggagaagcgtgtctttcctaatgtcctggtgttctgttgatttaggtgcttgggaacacaatgctcccagttctgttaggacaggcatactgttactttgcaatatccactttataaaatagctcctgcccagtggctcttggttcctgtcaaatgtggacctgtagtttaagaatgacaggtggttagagacccagatatttaaaaataggtgttcaataagggaatactgattgtgcattgtatctggatagcatgcctaattgtgcatttctgaaagttaccaattcaaaatgtaattggaacagttatctttgattagacaagcctgggaagagaatgttgaggtgcagagctcaccagccaagttcatgcccctctcgggcctttgtggctgagaagtgggacagaaagatgattaaggtaatgtgtcctccctgtagcattgtccagggccgttgtgtagatatttgacttcactgacagaaaagaaaccagggagtttgtagagactgtgcatttttagtataacattttcaccatctgatatggtttggctttgtgtccccacccaaattgcatctcaaattgtaatccccatgtgtcaagggagggacctgatgggaggtgatgggatcatgggggtggtttcccctatgttgttatcataatagagagggagttctcacaagatctgctggttttaaagacagcagtttcccctgctgtcactgtctctctcctgctgccttgtgaagaaggtgcttgtttctccctctgccatgattgtaagtttcccgaggcctccccggccatgtggaactgagtcaattaaacttcttgtttataaagtaaaaaaaaaaaaaaaa

SEQ ID NO: 6441 - DNA, 4170 bp, Homo Sapiens
  NM_152835
gtaagggggtgtgtccgcgcgcaccacgggggcgcgcgccggctgctgactggaggcggcggcagcggaggcgcgagctgcccgataatggcggcctgcagagcccatgagagggagaagcggcagcgtctaccctgagaaacctcgaccttgaagatggtgagtagccagccaaagtacgatctaatacgggaggtaggccgaggtagttacggtgttgtgtatgaagcagtcatcagaaagacctctgcacgggtggcagtgaagaaaattcgatgtcacgcacctgaaaatgttgaactagcccttcgtgagttctgggcactaagcagtatcaagagccaacatccaaatgtgattcacttggaggaatgcatcctacaaaaggatgggatggtgcaaaagatgtcccacggctctaattcttccctttatttacagcttgtagaaacttcattaaaaggagaaattgcctttgatcccagaagcgcctattatttgtggtttgtgatggatttttgtgacggaggagatatgaatgagtatctgttgtccaggaaacccaatcgtaaaactaacaccagcttcatgcttcagctgagcagtgccctggctttcttgcataaaaaccagatcatccaccgagatcttaagcctgataacatcctgatttctcaaaccaggttggataccagtgacttggaacctaccctcaaagtggctgattttggtctaagtaaagtttgttcagcctctgggcagaacccagaagaacctgtcagtgtaaacaagtgtttcctttccacagcatgtggaacagatttttacatggctcctgaagtttgggaaggacattacacagcaaaagctgacatctttgctctggggattatcatctgggcaatgctggaaaggatcacattcatagacacagagacaaagaaggaactcttggggagttatgtaaaacaaggaactgagattgtgcctgttggggaggcacttctggaaaatcccaaaatggaacttctcattcctgtgaagaaaaaatctatgaatgggcgaatgaaacaactgattaaggaaatgctggctgcaaaccctcaggatcgtccagatgcttttgaactagaactcagattagtacaaattgcatttaaagatagcagctgggaaacgtgacacatattatttgcaaataccatggatgatatgctgcttctgtttaacagtgatgcaacattatgtggctgaaaaagaatataaaaagctagactctaccctctaagggtttagattttttgtgggattttttttttcctcatttttcttaaatccaagttggccgttttattagtatgtttcaaatgtgtattaccaatgtgggtgtaaatttttaaaaaatgattattgatagaagtttggcaggaaaattctttaagagctaacaagagaagagagtccagttttctggaaatatgtctttaagtattttagacattcctcgtcagtattaggaatttccatgggaaaagaggtttgcatgctggtaatgcaacctttgaaactttgtaaaggaaacatatatgtatatatttatgtatatgtaagtatgtgaatgtgcgcattttgcattccatatgaaaaaaatgccacgtctgtttaaattatttgatgtaggtttgggtttttgagatttgctggtgaagtcagtgacgaaaaataaaccttcccttatcttcctactctgcccctccccctaatgaaatcatattaagttgtttttttttttttttgtaatatacagctttttttttaaggcatcattttcgagggtctaaaattatctggtaaaacaaatgaaattaagtgatccaaagctgctgaagtatgtttgaactctccagtgccctatagctgcaagagttgaattagtcatgcagtcatatggcagcaggttggtgattcagtccgaccttctttaggtaaccgagcatttatttaaccaactataccactgcattgggacgtctgcacttgagcttctacaatctgatataaatctgaatacaggattattctgtttgaaaactttgctatgtgtgaactgtaatacttgatacatttttggtttgaagactttgtctaagcctcattatactgaagttgaagaaaccaaatgagctccaccctcactttgcctgccctgatatgatcacttgttgagtcactggagttcctttcattttggcactgatgctgttttctcttgtctgatttgaaacagtactggtaataatatggttgttgaaaatgtgatcacctttatctaaagtgggagaagatacatacacagtatggcaaatggataaaatattgtggcatcaactacttttaaagtagaaaagctatccattttatacaatcactgatacagtctatgtcaaaaaaccaacagaccattattcctcttgaagttagtttgattttatctttgtatggttgtctacaatttgttttcctgtaaatgcagatagttaaaatctaaaggatagaatgctttcctaaaacagaacattagcctttaaggttaaatagactttacattgtatctaagttaatctttataaagcactagaatttttggtcaaaagtcaaaatagtattagaatattgaaattattgatagctttcataatctcagcttttttgaacttccacaatttttggaatatgtcataatttttttccctgtttcaaatgtgttcagaggaaatagaatgtaaaacatcacaaaaaaaattgcagtacataaaatttctggactatgttagttacttgatctggaagtttaaaatttggactaaaaggttttattgaaataaagcctcttaaaatgaaaaatcatatacttttaacatcacttttaagctaataaatataagaattcttttggaaattagaggtggaaacacactggaacctcatgataattgaccctctggatcaccagattagtttaatttaacagatatgtccaaggaagttgagctatagggagtaagaaaaagcatcatgataacgtctagtcaataacatggcacttcagcagagattcatagatgatggtatgcccatgcatcatttgctcttcaaatatctatgtgcttggagccacagtttcctaagcgcatagtttttggtcctgcctcatgtaaaatagttaatgattatcatttacttggaaagattttacctgtgaagtgaaattctttcattgggggtaagggtatgaggtgatcaggaagtttcttctggaattttatcaagtccttgtattctaaaatagccaagcaaaatgatagtaaattctttgtctttgttctttcagtcagaggtatttattaagtacctactgtgtgctcagcactaaaggtttgttgataaaatgacaattaaaaaatggcatttagccaaaggccttttcagccaggagtaagaaaagatggttagtgatatttggaaatacctggatatttgctagaggaaaaatgaaagcaaaacttcgtacacagtgccttgcccataataggtactcaataagcaattgttcctcatagagtcttttgccatgatttatggtgttttttgaaatttgtcttaattgaaaaaagaccaaatatttcaaatgagcttataggcagctgtggccagtgaaaatatggggttgtacagttagttcctagaatgttattttgcactagttgtcacttagaaagatggggttcctgtagattttttggtgctaagggatactttgtcattatgatgaagtaagtgttaagtgtcagataaatagcacacagaatagttctttctgctggtctgttttttctcttcgttgttgttgtttttaattgtaaattgttatcaatcaaactattgtagcagctacaaagtaattcaccagcatgacaaaatggtcaaaaaataagtcatcagcacttaagaaatgaaagcaacttttgaaattttctgttaaaattgtcaaatatattttatgaagaatttataaaaggggaaaatgattgtaatttattgttcatgacttttttttttaaataaagtgagtttcaacaaaaaaaaaaaaaaaaaaaaaaaaaaaaaaaa

SEQ ID NO: 6442 - DNA, 4069 bp, Homo Sapiens
  NM_152841
gcagatggtctaacggctggatagaggcatatttttagtttgaatttcctgcgcttacagaatggttttatctaatttgtagctactggggttctttattctctggggccacctgaaggctttcaaacacagtaataagccctcctcgggctgggaaacaggaagctgtgttttaaatgccgtgatcactggattaaaggaaacatggctccactctgttctcttgccaggtggaattatttttttctttatgatggttccaaggtaaaggaagaaggcgatccaacaagagctggcatttgttacttttatccttcccagaccctgctagaccaacaggagttgctttgtggacagattgctggagttgtccgctgtgtttctgacatttctgactctcctcctactcttgttcgtctgagaaaactgaagtttgccataaaagttgatggagattacctttgggtgctgggctgtgctgtggagctccctgatgtcagctgcaagcggtttctggatcagctagttggattctttaatttttacaatggacctgtttccctagcttatgagaactgttctcaggaagaactgagcacggagtgggacaccttcatcgagcaaattctgaaaaacaccagtgatctgcataagattttcaattccctctggaacttggaccaaactaaagtggagcccctgttgttgctgaaggcagcccgcattctgcagacctgccagcgctcgcctcacattctcgctggctgcatcctctataaaggactgattgtcagcacccaactcccgccctccctcaccgccaaggtcctgcttcaccgaacagcacctcaggagcagagactccctacgggagaggatgccccgcaggaacatggagcggcattgcccccgaatgtccagattatccctgtttttgtgaccaaagaggaagccattagtctccacgagttcccggtggaacagatgacaaggtctctagcatctccagcaggactccaggatggttcagcccagcaccatccaaagggtgggagcacatctgccctgaaagaaaacgccactggccatgtggaatccatggcctggaccaccccagatcccacatcccctgacgaagcttgtccagatggcaggaaggagaacggatgcttgtctggccatgatctggagagcatcaggcccgcaggactgcacaactctgccaggggtgaggttcttggcctcagctcctccctggggaaggaactagtctttctccaagaagaactcgacttgtctgaaatccacattccagaggctcaggaagtggaaatggcctcaggtcattttgccttcctacatgtgcctgttccagatggcagggctccttactgcaaggcatctctcagcgcctccagcagcctggaacccacgcctcctgaggacacagccatcagcagcttgcgccctccctctgctcctgagatgctgacccagcatggagcccaagagcagctcgaagaccatcctggccatagcagccaagcccccattcccagagcagaccctctccccagaaggacccgcaggcccttgttattgcctcgcttagatccaggacagagaggaaacaagcttcccacgggggaacaaggcctggatgaggatgttgatggggtctgtgaaagccacgcagcccctggtctggaatgcagttcaggctcagcaaactgtcagggtgctggcccctctgcagatggaatcagctccaggctgacaccagcagagtcctgcatggggctcgtgaggatgaatctctacactcactgcgtcaaagggctggtgctgtccctgctggctgaggagccgctgctgggagacagcgcagccatagaggaagtgtaccacagcagcctggcttcactgaatgggctggaagtccacctgaaagagacgctgcccagggatgaggcagcctccacgagcagcacctacaacttcacacattacgaccgcattcagagcttgctgatggcaaacctgccgcaggtggccaccccgcaggatcgccgcttcctccaggccgtcagcctgatgcatagcgaatttgcccagctgcccgcgctttatgaaatgactgtcagaaatgcctccacggctgtgtacgcctgttgcaaccccatccaggagacatatttccagcagctggcacctgcagcacggagctccggcttcccaaaccctcaggatggcgccttcagcctctccggcaaagcaaagcagaagctgctgaagcacggggtgaacttgctctgaactgcacccaggaggtgactgggaaggagaaaaccagcaaaggaagctctgccttttataattgaaaaggcccctctattttatttttcttgaaaacattcccttttttaggaaccaaatgatatttgagtttttgttattccttttgcagattgggatgtgttttgggggcaggggttagttcttcaggtcggcagacccagagcacttgataaagaactgtatttaatcggtagtgttggggccgggacgggcttggctccctctctgccatactgagcctgaggtatttcatatctcctgctgttccatcccagcttgaattggtgccacaagcttccaagttggcattttttctagaacctgatcgtccactagcccagagtgtgtgtgttcaacccccacaccaggtggtggtaggcggtgtgactgcacagcgaggtgccggatctgtgagcaggccgactccactcccacgccgcaggtaggtttctccagtgcgctcttgctgggaggtccggatcgttcctgcagggaagcggcagcacacggagaccacttggttgaattctgttggaactctactcaaatctaggggcgtcttctttggacccacaatgggggcaagccttaataatatggaagggagtttgggctttagagatccctttataaaagctctgggggctgagccctgagaattcagtgacaacaggaccaacctgcgctgcctttgactacaagtgggccgtgcagctggttcctctcgagcgagtgtccctaaataggagtttacaagatgtctgggggtaaaagcactgtgcttttcagtggtggctgcgtgaaagggagcgacactcagctgtgtgttcctgggcttgtgtggtacttagaacctcagttctattacgttatagtcagacatttttttgacagtatgagacagactgcaggatgaaaatatttgtcaaaatcttaactgaatgtttactggaagtacttgagattccatttgagagttgtattgttaataatttcatgtcagtgaactgatatctgatgtttatgatatggtgtctttttcttgaaacaagcttccaagggctagaaataaaatagccaaaaaatgctggagttctgagtaattaaatggcagcatttttttgtgacaaaggtaagggttaagacagtgtgtgtgtgtgtgtgtgtgtgtgtgtgtgtgtgtgtgcgcgcgcgcgcgcgcgcgtaacgtgggcgcatccctcttttccttccctgggttcagtgtggctgggtaaggaccgtctgtttgtagggctgccaggctgcagcctgctgctccagggagcaccagctgcagctgatccaatacaccaagcctgtgtctccctcttctatcacctctctccaggatctctgctgtctcttggatcccatctgcctagatggaagaggatcctatccgaagctaggataaatgttgtcttactcctctgctatgttctcccagaaaaaattgattacaagttctctgctgtggttgctgcagctccaggaagtccccgcaatgtctcacgttgtctttgaccagtggtccccagtaccaggccagcgaagacaactttataatgtcatttgtgttgtgaaaattcttccactgacccaaaatggaaccgtacaaagcctatccgtgtatatggaaaagtctcatgcacctggattaactcagaaaaagtaaagtcctgaaacttca

SEQ ID NO: 6443 - DNA, 2950 bp, Homo Sapiens
  NM_152843
acgtcatcgccgcgcgccggcttgccaggagctggagggggaggtaggcggggcggcgcgtgacctaaggcctctctgccgcgcgcgcagagccaaggcactgatgtttgaactggaaacttcaaaacgtttaataagagtcttcaggatgggtttgaactagacaagctagaaatttctttagaacaccagctctagcatgcatctcccacttttggctttcctggagaggagcttgaagaggtggttctgcagacagccacagtgatacttaggaaaccagaggaatggatttgacttttctgctaggattctctgttatagtttctccctgagttgtaagaggcatggaaatatacatgaaactgaagaacctgcaaggaagggaagtggaactttccatgctgagtgaaaactaaccaagtggcagttgtgactgaaaacactgaaacctaccacgtccagattcactggattgggggatagaggaacggtcacagctagggagaaagaagtgataccggaaaagaaaacctaaatgaagagaatgaggatgactgcacagtagatggccacctctacctccacagaggcaaagtcagcctcgtggtggaattatttttttctttatgatggttccaaggtaaaggaagaaggcgatccaacaagagctggcatttgttacttttatccttcccagaccctgctagaccaacaggagttgctttgtggacagattgctggagttgtccgctgtgtttctgacatttctgactctcctcctactcttgttcgtctgagaaaactgaagtttgccataaaagttgatggagattacctttgggtgctgggctgtgctgtggagctccctgatgtcagctgcaagcggtttctggatcagctagttggattctttaatttttacaatggacctgtttccctagcttatgagaactgttctcaggaagaactgagcacggagtgggacaccttcatcgagcaaattctgaaaaacaccagtgatctgcataagattttcaattccctctggaacttggaccaaactaaagtggagcccctgttgttgctgaaggcagcccgcattctgcagacctgccagcgctcgcctcacattctcgctggctgcatcctctataaaggactgattgtcagcacccaactcccgccctccctcaccgccaaggtcctgcttcaccgaacagcacctcaggagcagagactccctacgggagaggatgccccgcaggaacatggaaaatggatgttatggagcttcaagaatcgagttacccaccagaaccctaatggagcggcattgcccccgaatgtccagattatccctgtttttgtgaccaaagaggaagccattagtctccacgagttcccggtggaacagatgacaaggtctctagcatctccagcaggactccaggatggttcagcccagcaccatccaaagggtgggagcacatctgccctgaaagaaaacgccactggccatgtggaatccatggcctggaccaccccagatcccacatcccctgacgaagcttgtccagatggcaggaaggagaacggatgcttgtctggccatgatctggagagcatcaggcccgcaggactgcacaactctgccaggggtgaggttcttggcctcagctcctccctggggaaggaactagtctttctccaagaagaactcgacttgtctgaaatccacattccagaggctcaggaagtggaaatggcctcaggtcattttgccttcctacatgtgcctgttccagatggcagggctccttactgcaaggcatctctcagcgcctccagcagcctggaacccacgcctcctgaggacacagccatcagcagcttgcgccctccctctgctcctgagatgctgacccagcatggagcccaagagcagctcgaagaccatcctggccatagcagccaagcccccattcccagagcagaccctctccccaaaagcactgtgcttttcagtggtggctgcgtgaaagggagcgacactcagctgtgtgttcctgggcttgtgtggtacttagaacctcagttctattacgttatagtcagacatttttttgacagtatgagacagactgcaggatgaaaatatttgtcaaaatcttaactgaatgtttactggaagtacttgagattccatttgagagttgtattgttaataatttcatgtcagtgaactgatatctgatgtttatgatatggtgtctttttcttgaaacaagcttccaagggctagaaataaaatagccaaaaaatgctggagttctgagtaattaaatggcagcatttttttgtgacaaaggtaagggttaagacagtgtgtgtgtgtgtgtgtgtgtgtgtgtgtgtgtgtgtgcgcgcgcgcgcgcgcgcgtaacgtgggcgcatccctcttttccttccctgggttcagtgtggctgggtaaggaccgtctgtttgtagggctgccaggctgcagcctgctgctccagggagcaccagctgcagctgatccaatacaccaagcctgtgtctccctcttctatcacctctctccaggatctctgctgtctcttggatcccatctgcctagatggaagaggatcctatccgaagctaggataaatgttgtcttactcctctgctatgttctcccagaaaaaattgattacaagttctctgctgtggttgctgcagctccaggaagtccccgcaatgtctcacgttgtctttgaccagtggtccccagtaccaggccagcgaagacaactttataatgtcatttgtgttgtgaaaattcttccactgacccaaaatggaaccgtacaaagcctatccgtgtatatggaaaagtctcatgcacctggattaactcagaaaaagtaaagtcctgaaacttca

SEQ ID NO: 6444 - DNA, 2482 bp, Homo Sapiens
  NM_152850
cgcaggcgccgccgccgccgcacttccgggtgccattgcaggatgcagaaagcctcagtgttgctcttcctggcctgggtctgcttcctcttctacgctggcattgccctcttcaccagtggcttcctgctcacccgtttggagctcaccaaccatagcagctgccaagagcccccaggccctgggtccctgccatgggggagccaagggaaacctggggcctgctggatggcttcccgattttcgcgggttgtgttggtgctgatagatgctctgcgatttgacttcgcccagccccagcattcacacgtgcctagagagcctcctgtctccctacccttcctgggcaaactaagctccttgcagaggatcctggagattcagccccaccatgcccggctctaccgatctcaggttgaccctcctaccaccaccatgcagcgcctcaaggccctcaccactggctcactgcctacctttattgatgctggtagtaacttcgccagccacgccatagtggaagacaatctcattaagcagctcaccagtgcaggaaggcgtgtagtcttcatgggagatgatacctggaaagaccttttccctggtgctttctccaaagctttcttcttcccatccttcaatgtcagagacctagacacagtggacaatggcatcctggaacacctctaccccaccatggacagtggtgaatgggacgtgctgattgctcacttcctgggtgtggaccactgtggccacaagcatggccctcaccaccctgaaatggccaagaaacttagccagatggaccaggtgatccagggacttgtggagcgtctggagaatgacacactgctggtagtggctggggaccatgggatgaccacaaatggagaccatggaggggacagtgagctggaggtctcagctgctctctttctgtatagccccacagcagtcttccccagcaccccaccagaggagccagaggtgattcctcaagttagccttgtgcccacgctggccctgctgctgggcctgcccatcccatttgggaatatcggggaagtgatggctgagctattctcagggggtgaggactcccagccccactcctctgctttagcccaagcctcagctctccatctcaatgctcagcaggtgtcccgatttcttcatacctactcagctgctactcaggaccttcaagctaaggagcttcatcagctgcagaacctcttctccaaggcctctgctgactaccagtggcttctccagagccccaagggggctgaggcgacactgccgactgtgattgctgagctgcagcagttcctgcggggagctcgggccatgtgcatcgagtcttgggctcgtttctctctgagcttccttctcctacatctgcttgctgctgggatacccgtcaccacccctggtccttttactgtgccatggcaggcagtctcggcttgggccctcatggccacacagaccttctactccacaggccaccagcctgtctttccagccatccattggcatgcagccttcgtgggattcccagagggtcatggctcctgtacttggctgcctgctttgctagtgggagccaacacctttgcctcccacctcctctttgcagtaggttgcccactgctcctgctctggcctttcctgtgtgagagtcaagggctgcggaagagacagcagcccccagggaatgaagctgatgccagagtcagacccgaggaggaagaggagccactgatggagatgcggctccgggatgcgcctcagcacttctatgcagcactgctgcagctgggcctcaagtacctctttatccttggtattcagattctggcctgtgccttggcagcctccatccttcgcaggcatctcatggtctggaaagtgtttgcccctaagttcatatttgaggctgtgggcttcattgtgagcagcgtgggacttctcctgggcatagctttggtgatgagagtggatggtgctgtgagctcctggttcaggcagctatttctggcccagcagaggtagcctagtctgtgattactggcacttggctacagagagtgcttgagaacagtgtagcctggcctgtacaggtactggatgatctgcaagacaggctcagccatactcttactatcatgcagccaggggccgctgacatctaggacttcattattctataattcaggaccacagtggagtatgatccctaactcctgatttggatgcatctgagggacaaggggggcggtctccgaagtggaataaaataggccgggcgtggtgacttgcacctataatcccagcactttgggaggcagaggtgggaggattgcttggtcccaggagttcaagaccagcctgtggaacataacaagaccccgtctctactatttaaaaaaaagtgtaataaaatgataatataattaaaaaaaaaaaaaaaaaa

SEQ ID NO: 6445 - DNA, 1460 bp, Homo Sapiens
  NM_152851
ttttactgaagttgctagaagtttacagaaaaggaagtgcaggaacatttcacaaatctacaatctgtgagtatcacatcctgtatagctgtaaacactggaataaggaagggctgatgactttcagaagatgaaggtaagtagaaaccgttgatgggactgagaaaccagagttaaaacctctttggagcttctgaggactcagctggaaccaacgggcacagttggcaacaccatcatgacatcacaacctgttcccaatgagaccatcatagtgctcccatcaaatgtcatcaacttctcccaagcagagaaacccgaacccaccaaccaggggcaggatagcctgaagaaacatctacacgcagaaatcaaagttattgggactatccagatcttgtgtggcatgatggtattgagcttggggatcattttggcatctgcttccttctctccaaattttacccaagtgacttctacactgttgaactctgcttacccattcataggaccctttttttttatcatctctggctctctatcaatcgccacagagaaaaggttaaccaagcttttggtgcatagcagcctggttggaagcattctgagtgctctgtctgccctggtgggtttcattatcctgtctgtcaaacaggccaccttaaatcctgcctcactgcagtggaactctctctctgatgctgatttgcactctgctggaattctgcctagctgtgctcactgctgtgctgcggtggaaacaggcttactctgacttccctgggagtgtacttttcctgcctcacagttacattggtaattctggcatgtcctcaaaaatgactcatgactgtggatatgaagaactattgacttcttaagaaaaaagggagaaatattaatcagaaagttgattcttatgataatatggaaaagttaaccattatagaaaagcaaagcttgagtttcctaaatgtaagcttttaaagtaatgaacattaaaaaaaaccattatttcactgtcatttaagatatgtgttcattggggatctcttgatttgcctgacattgacttcagcaaaagcacggggctgtaaattaccatttactagattagccaaatagtctgaatttccagaaaacaaggcagaatgatcattcccagaaacatttcccagaaaatgtttcccagaaaactagacagcatgatcattcaatggatcacagtgaagcaaaggacacaactttttattgtaccccttaattgtcaacaggagttaactgatttgttgtggtgctcagacttttttatacaggtgctagtgttttatcctatgtattttaactcattagtgcataaaggcaagccccatataatgaagtctcagggtatatgaaagtagctggcttcaaaataaaatttttgagtgcaaaaaaaaaaaaaaaaaaaaaaaaaaaaa

SEQ ID NO: 6446 - DNA, 3190 bp, Homo Sapiens
  NM_152856
ggtggtcggagcgccgactcccttctcgtcgtcgccattttgagctggtgactgtggccggctgggagtaggcggcagtgagtttccctgggagggcagcgcgcttggcgcttctcccctccccccgatctgcctccagtctcggacttggttgttgcgcgctccggctccggctgagctgggagagttggaggaggtggcggcgggcagaggtgatgtctgggagcccttccttgacagcccgggccgagaagagtccctgcaggaagcatcacccaggctggcagatcatggtagcagcagcgggggtggctgggaagtgaaacggagccagcggctgaggaggggccccagcagcccccgaaggccctatcaggacatggagtatgaaagacgtggtggtcgtggtgacaggactggccgctatggagccactgaccgctcgcaggatgatggtggggagaaccgcagccgagaccacgactaccgggacatggactaccgttcatatcctcgcgagtatggcagccaggagggcaagcatgactatgacgactcatctgaggagcagagtgcggagatccgtggccagctgcagtcgcacggcgtgcaagcacgggaggttcggctgatgcggaacaaatcttcaggtcagagccggggcttcgccttcgtcgagtttagtcacttgcaggacgctacacgatggatggaagccaatcagcactccctcaacatcctgggccagaaggtgtcgatgcactacagtgaccccaagcccaagatcaatgaggactggctgtgcaataagtgtggcgtccagaacttcaaacgccgagagaagtgcttcaaatgtggcgtgcccaagtcagaggcagagcagaagctgcccctcggcacgaggctggatcagcagacactgccactgggtggccgggagctgagccagggcctgcttcccctgccgcagccctaccaggcccagggagtcctggcctcccaagccctgtcacagggctcggagccaagctcagagaacgccaatgacaccatcattttgcgcaacctgaacccacacagcaccatggattccatcctgggggccctggcaccctacgcggtgctgtcctcctccaacgtgcgcgtcataaaggacaagcagacccaactgaaccgcggctttgccttcatccagctctccaccatcgaggcagcccagctgctgcagatcctgcaggccctgcacccaccactcactatcgacggcaagaccatcaatgttgagtttgccaagggttctaagagggacatggcctccaatgaaggcagtcgcatcagtgctgcctctgtggccagcactgccattgctgcggcccagtgggccatctcacaggcctcccaaggtggggagggtacctgggccacctccgaggagccgccggtcgactacagctactaccaacaggatgagggctatggcaacagccagggcacagagtcttccctctatgcccatggctacctcaagggcaccaagggccctggcatcactggaaccaaaggggatcccactggagcaggtcccgaggcctccctagagcctggggccgactctgtgtcgatgcaggctttctctcgcgcccagcctggtgctgctcctggcatctaccaacaatcagccgaggcgagcagtagccagggcactgctgccaacagccagtcgtataccatcatgtcacccgctgtgctcaaatctgagctccagagccctacccatcctagttctgctctcccaccggctaccagccccactgcccaggaatcctacagccagtaccctgttcccgacgtctctacctaccagtacgatgagacctccggctactactatgacccccagaccggcctctactatgaccccaactcccagtattactacaatgctcagagccagcagtacctgtactgggatggggagaggcggacctatgttcccgccctggagcagtcggccgacggacataaggagacaggggcaccctcgaaggagggcaaagagaagaaggagaagcacaagaccaagacagctcaacagattgccaaggacatggaacgctgggcccgcagtctcaacaaacaaaaagaaaacttcaaaaatagcttccagcctatcagctccctgcgagatgacgagaggcgggagtcagccactgcagatgctggctatgccatcctcgagaagaagggagcactagccgagagacagcacaccagcatggatctcccgaaattggccagtgacgaccgcccaagccctccgcgaggactggtggcagcctacagcggggagagtgacagtgaggaggagcaggagcgtgggggccctgagcgggaggagaagctcaccgactggcagaagctggcctgtctgctctgccgacgccagttccccagcaaagaggcgctcatccggcaccagcagctctcagggctccacaagcaaaaccttgagattcaccggcgagcccacttgtcagaaaacgagctagaagcactagagaagaatgacatggagcaaatgaagtaccgggaccgtgcagctgaacgcagagaaaagtatggcatccccgagccgccagagcccaagaggaggaagtacggcggcatatccacagcctctgtagacttcgagcagcctactcgggacgggctgggcagtgacaacattggcagtcggatgctgcaggccatgggctggaaagagggcagcggcctgggccgcaagaagcagggcattgtaacgcctatcgaggcccaaacacgggtgcggggctccggcctgggtgcacggggcagctcctacggggtcacctcaaccgagtcctacaaggagacactgcacaagacaatggtgacccgcttcaacgaggcccagtgagcagcttcaagagcaacttctccacatgttgggtgtccatcctggggcagggaaggacagagtgttggatggctgggacggggccttgctcttgtcggccagcccactccccagccagagagggcttgaccaaatcaaattgaggtggtgacttttgttggaaaattgggctgggatcacgtcctgttttgtaataaaagctgaaaagtctgcaaaaaaaaaaaaaaaaaaaaaaaaaaaaaaaaaaaaaaa

SEQ ID NO: 6447 - DNA, 1742 bp, Homo Sapiens
  NM_152858
ttcccttactgagcttgctgagctccggggcccgcggagctcgcgccaggctcctgggaaaggacggggagtgttaccggggagcagctgctccattgtgcctcgaggccccgatcgggctaggccgacggcctccctcccttcacctttcctctcctggcggggttcggcggcgggcgagtgactgcggccacgcctgaaaggcgactctcctgattcaagatgaccaacgaagaacctcttcccaagaaggttcgattgagtgaaacagacttcaaagttatggcaagagatgagttaattctaagatggaaacaatatgaagcatatgtacaagctttggagggcaagtacacagatcttaactctaatgatgtaactggcctaagagagtctgaagaaaaactaaagcaacaacagcaggagtctgcacgcagggaaaacatccttgtaatgcgactagcaaccaaggaacaagagatgcaagagtgtactactcaaatccagtacctcaagcaagtccagcagccgagcgttgcccaactgagatcaacaatggtagacccagcgatcaacttgtttttcctaaaaatgaaaggtgaactggaacagactaaagacaaactggaacaagcccaaaatgaactgagtgcctggaagtttacgcctgataggtaaacaaatcatactccccagtcaagacttccctgacagtcccactacgagaaagctgtggtgggacagccaagtactcgtttccacaccaagactcagactttttgagccaaaaaaaagccacattcttacactgtccagcttgtaatggttaatgtaaaacttaccagatgaaccttgtgtttcagcttttttcttttccccttccccttgcttcagaggcctgatggcgtcggactattccgaagaagtggccacctccgaaaaattccccttctagaacatgtagacacttgagaaatgtttctgtttgaagaaaatagagggagaaacagaagtcttaagtctgtggcacactgtgtcttcagacagtttgaaggaatgaaaacctagagattttaaatcatgaattgaacatgtaaaattccagtaaaatgtaaaaacggaatatgcatcgctcttaaccttgagcatagtgacttagagacactgtgtatcagttttgccaataagactgtggacttcatgattgttgttgaacttctgggtcaaaactcaaatgaggtgaattttgcctttaaagggtttatttgctgagaaccaactttcaatagtcatgagagaatcaaataatagatgtccgtacaagtagcgcatatatttaaccatttagtttggggctctatattacttgcttgagccttaatcaatgtggttttattcaatggtttgttctttgaatggttgcaaaaactgtagataatcttactgaggactgtacaaacatgaaggtgtggtatcaaacttcaggttgaaactgtttgaagcattataaacattcatttcacaactagattgtataaggatattagctgtgatgagactcactgcattattttttttagtgaattttatgaaatccccgttccattcaacaggcacatgtttaaaagagctttgtcgttggtgttaatgggggaatgtgttccttcattgtatttgggccttttgtattgcactcttgatattaaattaaatgtgccttgaaataaaaaaaaaaaaaaaaa

SEQ ID NO: 6448 - DNA, 3594 bp, Homo Sapiens
  NM_152866
gtctatcagcgatttcatcttcaggcctggactacaccactcaccctcccagtgtgcttgagaaacaaactgcacccactgaactccgcagctagcatccaaatcagcccttgagatttgaggccttggagactcagatcctgaacaagagagaacaaaatctctactttgatggaacttccattctgtggggaagagactgacaataagcaattaaataaataagaactcagcagtaggccttgcctcagatccaaggtcactcggaagaggccatgtctaccctcaatgacactcatggaggaaatgctgagagaagcattcagatgcatgacacaaggtaagactgccaaaaatcttgttcttgctctcctcattttgttatttgttttatttttaggagttttgagagcaaaatgacaacacccagaaattcagtaaatgggactttcccggcagagccaatgaaaggccctattgctatgcaatctggtccaaaaccactcttcaggaggatgtcttcactggtgggccccacgcaaagcttcttcatgagggaatctaagactttgggggctgtccagattatgaatgggctcttccacattgccctggggggtcttctgatgatcccagcagggatctatgcacccatctgtgtgactgtgtggtaccctctctggggaggcattatgtatattatttccggatcactcctggcagcaacggagaaaaactccaggaagtgtttggtcaaaggaaaaatgataatgaattcattgagcctctttgctgccatttctggaatgattctttcaatcatggacatacttaatattaaaatttcccattttttaaaaatggagagtctgaattttattagagctcacacaccatatattaacatatacaactgtgaaccagctaatccctctgagaaaaactccccatctacccaatactgttacagcatacaatctctgttcttgggcattttgtcagtgatgctgatctttgccttcttccaggaacttgtaatagctggcatcgttgagaatgaatggaaaagaacgtgctccagacccaaatctaacatagttctcctgtcagcagaagaaaaaaaagaacagactattgaaataaaagaagaagtggttgggctaactgaaacatcttcccaaccaaagaatgaagaagacattgaaattattccaatccaagaagaggaagaagaagaaacagagacgaactttccagaacctccccaagatcaggaatcctcaccaatagaaaatgacagctctccttaagtgatttcttctgttttctgtttccttttttaaacattagtgttcatagcttccaagagacatgctgactttcatttcttgaggtactctgcacatacgcaccacatctctatctggcctttgcatggagtgaccatagctccttctctcttacattgaatgtagagaatgtagccattgtagcagcttgtgttgtcacgcttcttcttttgagcaactttcttacactgaagaaaggcagaatgagtgcttcagaatgtgatttcctactaacctgttccttggataggctttttagtatagtatttttttttgtcattttctccatcaacaaccagggagactgcacctgatggaaaagatatatgactgcttcatgacattcctaaactatcttttttttattccacatctacgtttttggtggagtcccttttgcatcattgttttaaggatgataaaaaaaaataacaactagggacaatacagaacccattccatttatctttctacagggctgacattgtggcacattcttagagttaccacaccccatgagggaagctctaaatagccaacacccatctgttttttgtaaaaacagcatagcttatacatggacatgtctctgccttaacttttcctaactcccactctaggctattgtttgcatgtctacctacttttagccattatgcgagaaaagaaaaaaatgaccatagaaaatgccaccatgaggtgcccaaatttcaaataataattaacatttagttatatttataatttccagatgacaaagtatttcatcaaataacttcatttgatgttccatgatcaagaaagaatccctatctctattttacaagtaattcaaagaggccaaataacttgtaaacaagaaaaggtaacttgtcaacagtcataactagtaattatgagagccttgtttcataaccaggtcttcttactcaaatcctgtgatgtttgaaataaccaaattgtctctccaatgtctgcataaactgtgagagccaagtcaacagcttttatcaagaatttactctctgaccagcaataaacaagcactgagagacacagagagccagattcagattttacccatggggataaaaagactcagactttcaccacatttggaaaactacttgcatcataaatatataataactggtagtttatatgaagcagacactaagtgctatagacactctcagaatatcatacttggaaacaatgtaattaaaatgccgaatctgagtcaacagctgccctacttttcaattcagatatactagtaccttacctagaaataatgttaacctagggtgaagtcactataatctgtagtctattatttgggcatttgctacatgatgagtgctgccagattgtggcaggtaaagagacaatgtaatttgcactccctatgatatttctacatttttagcgaccactagtggaagacattccccaaaattagaaaaaaaggagatagaagatttctgtctatgtaaagttctcaaaatttgttctaaattaataaaactatctttgtgttcttttctgcaacagatgattccaacatgggtgtttgtctattcttctttactcttgaaacattagaccatgggaggctcttacagccttgagttgatatttatacaacccaaatctaggtttgaacggtgaggtgtcaggtcatcaaatattcatgtctatatagtcttacacaggttctcaaaaaaaatgttcatgggataggtcattgataatggattccttattctgagaactccagacgactgaaatatatgagagaaggaaaaggacatagtaggagcaggcctgagaaaaaaatgaaagtcagaaatctttaaaaaaatacaagatcttatttctatcttattttttctcctcttctgaaatatatatgaggattcctctccaaacccatggtttctctaagaattttgagtcatttgtatgacctcaaataattagttttagctgacctcacataactccttataataggagacatctttaatgtctgctattaaagaaggatgaaaattcctatgaccttctccccgattatccctttggcaatatagagtcaaataataacattgaccaatagtaaacatgctttgccaagaagtagaagatatattctctagccttagtttttcctcccaatttgcatttttgtaaaaataatgttgtatccacaaaggaaataaactttaaaaacccaagtgca

SEQ ID NO: 6449 - DNA, 2730 bp, Homo Sapiens
  NM_152872
cctacccgcgcgcaggccaagttgctgaatcaatggagccctccccaacccgggcgttccccagcgaggcttccttcccatcctcctgaccaccggggcttttcgtgagctcgtctctgatctcgcgcaagagtgacacacaggtgttcaaagacgcttctggggagtgagggaagcggtttacgagtgacttggctggagcctcaggggcgggcactggcacggaacacaccctgaggccagccctggctgcccaggcggagctgcctcttctcccgcgggttggtggacccgctcagtacggagttggggaagctctttcacttcggaggattgctcaacaaccatgctgggcatctggaccctcctacctctggttcttacgtctgttgctagattatcgtccaaaagtgttaatgcccaagtgactgacatcaactccaagggattggaattgaggaagactgttactacagttgagactcagaacttggaaggcctgcatcatgatggccaattctgccataagccctgtcctccaggtgaaaggaaagctagggactgcacagtcaatggggatgaaccagactgcgtgccctgccaagaagggaaggagtacacagacaaagcccatttttcttccaaatgcagaagatgtagattgtgtgatgaaggacatggcttagaagtggaaataaactgcacccggacccagaataccaagtgcagatgtaaaccaaactttttttgtaactctactgtatgtgaacactgtgacccttgcaccaaatgtgaacatggaatcatcaaggaatgcacactcaccagcaacaccaagtgcaaagaggaaggatccagatctaacttggggtggctttgtcttcttcttttgccaattccactaattgtttgggtgaagagaaaggaagtacagaaaacatgcagaaagcacagaaaggaaaaccaaggttctcatgaatctccaaccttaaatcctatgttgacttgagtaaatatatcaccactattgctggagtcatgacactaagtcaagttaaaggctttgttcgaaagaatggtgtcaatgaagccaaaatagatgagatcaagaatgacaatgtccaagacacagcagaacagaaagttcaactgcttcgtaattggcatcaacttcatggaaagaaagaagcgtatgacacattgattaaagatctcaaaaaagccaatctttgtactcttgcagagaaaattcagactatcatcctcaaggacattactagtgactcagaaaattcaaacttcagaaatgaaatccaaagcttggtctagagtgaaaaacaacaaattcagttctgagtatatgcaattagtgtttgaaaagattcttaatagctggctgtaaatactgcttggttttttactgggtacattttatcatttattagcgctgaagagccaacatatttgtagatttttaatatctcatgattctgcctccaaggatgtttaaaatctagttgggaaaacaaacttcatcaagagtaaatgcagtggcatgctaagtacccaaataggagtgtatgcagaggatgaaagattaagattatgctctggcatctaacatatgattctgtagtatgaatgtaatcagtgtatgttagtacaaatgtctatccacaggctaaccccactctatgaatcaatagaagaagctatgaccttttgctgaaatatcagttactgaacaggcaggccactttgcctctaaattacctctgataattctagagattttaccatatttctaaactttgtttataactctgagaagatcatatttatgtaaagtatatgtatttgagtgcagaatttaaataaggctctacctcaaagacctttgcacagtttattggtgtcatattatacaatatttcaattgtgaattcacatagaaaacattaaattataatgtttgactattatatatgtgtatgcattttactggctcaaaactacctacttctttctcaggcatcaaaagcattttgagcaggagagtattactagagctttgccacctctccatttttgccttggtgctcatcttaatggcctaatgcacccccaaacatggaaatatcaccaaaaaatacttaatagtccaccaaaaggcaagactgcccttagaaattctagcctggtttggagatactaactgctctcagagaaagtagctttgtgacatgtcatgaacccatgtttgcaatcaaagatgataaaatagattcttatttttcccccacccccgaaaatgttcaataatgtcccatgtaaaacctgctacaaatggcagcttatacatagcaatggtaaaatcatcatctggatttaggaattgctcttgtcatacccccaagtttctaagatttaagattctccttactactatcctacgtttaaatatctttgaaagtttgtattaaatgtgaattttaagaaataatatttatatttctgtaaatgtaaactgtgaagatagttataaactgaagcagatacctggaaccacctaaagaacttccatttatggaggatttttttgccccttgtgtttggaattataaaatataggtaaaagtacgtaattaaataatgtttttggtaaaaaaaaaaaaaaaaaaaaaaaaaaaaaaaaaaaaaaaaaaaaaaaaaaaaaaaaaaaaaaaaaaa

SEQ ID NO: 6450 - DNA, 2508 bp, Homo Sapiens
  NM_152877
cctacccgcgcgcaggccaagttgctgaatcaatggagccctccccaacccgggcgttccccagcgaggcttccttcccatcctcctgaccaccggggcttttcgtgagctcgtctctgatctcgcgcaagagtgacacacaggtgttcaaagacgcttctggggagtgagggaagcggtttacgagtgacttggctggagcctcaggggcgggcactggcacggaacacaccctgaggccagccctggctgcccaggcggagctgcctcttctcccgcgggttggtggacccgctcagtacggagttggggaagctctttcacttcggaggattgctcaacaaccatgctgggcatctggaccctcctacctctggttcttacgtctgttgctagattatcgtccaaaagtgttaatgcccaagtgactgacatcaactccaagggattggaattgaggaagactgttactacagttgagactcagaacttggaaggcctgcatcatgatggccaattctgccataagccctgtcctccagatgtgaacatggaatcatcaaggaatgcacactcaccagcaacaccaagtgcaaagaggaaggatccagatctaacttggggtggctttgtcttcttcttttgccaattccactaattgtttgggtgaagagaaaggaagtacagaaaacatgcagaaagcacagaaaggaaaaccaaggttctcatgaatctccaaccttaaatcctgaaacagtggcaataaatttatctgatgttgacttgagtaaatatatcaccactattgctggagtcatgacactaagtcaagttaaaggctttgttcgaaagaatggtgtcaatgaagccaaaatagatgagatcaagaatgacaatgtccaagacacagcagaacagaaagttcaactgcttcgtaattggcatcaacttcatggaaagaaagaagcgtatgacacattgattaaagatctcaaaaaagccaatctttgtactcttgcagagaaaattcagactatcatcctcaaggacattactagtgactcagaaaattcaaacttcagaaatgaaatccaaagcttggtctagagtgaaaaacaacaaattcagttctgagtatatgcaattagtgtttgaaaagattcttaatagctggctgtaaatactgcttggttttttactgggtacattttatcatttattagcgctgaagagccaacatatttgtagatttttaatatctcatgattctgcctccaaggatgtttaaaatctagttgggaaaacaaacttcatcaagagtaaatgcagtggcatgctaagtacccaaataggagtgtatgcagaggatgaaagattaagattatgctctggcatctaacatatgattctgtagtatgaatgtaatcagtgtatgttagtacaaatgtctatccacaggctaaccccactctatgaatcaatagaagaagctatgaccttttgctgaaatatcagttactgaacaggcaggccactttgcctctaaattacctctgataattctagagattttaccatatttctaaactttgtttataactctgagaagatcatatttatgtaaagtatatgtatttgagtgcagaatttaaataaggctctacctcaaagacctttgcacagtttattggtgtcatattatacaatatttcaattgtgaattcacatagaaaacattaaattataatgtttgactattatatatgtgtatgcattttactggctcaaaactacctacttctttctcaggcatcaaaagcattttgagcaggagagtattactagagctttgccacctctccatttttgccttggtgctcatcttaatggcctaatgcacccccaaacatggaaatatcaccaaaaaatacttaatagtccaccaaaaggcaagactgcccttagaaattctagcctggtttggagatactaactgctctcagagaaagtagctttgtgacatgtcatgaacccatgtttgcaatcaaagatgataaaatagattcttatttttcccccacccccgaaaatgttcaataatgtcccatgtaaaacctgctacaaatggcagcttatacatagcaatggtaaaatcatcatctggatttaggaattgctcttgtcatacccccaagtttctaagatttaagattctccttactactatcctacgtttaaatatctttgaaagtttgtattaaatgtgaattttaagaaataatatttatatttctgtaaatgtaaactgtgaagatagttataaactgaagcagatacctggaaccacctaaagaacttccatttatggaggatttttttgccccttgtgtttggaattataaaatataggtaaaagtacgtaattaaataatgtttttggtaaaaaaaaaaaaaaaaaaaaaaaaaaaaaaaaaaaaaaaaaaaaaaaaaaaaaaaaaaaaaaaaaaa

SEQ ID NO: 6451 - DNA, 1694 bp, Homo Sapiens
  NM_152891
ggagctgaggacagacagaaggaccacggagggggtgacgggctggtgtgaggattggtgcccctgggccaggactctcctctcttctccctgctggctccagaccagagtccaagccctaggcagtgccacccttacccagcccagccttgaagacagaatgagaggggtttcctgtctccaggtcctgctccttctggtgctgggagctgctgggactcagggaaggaagtctgcagcctgcgggcagccccgcatgtccagtcggatcgttgggggccgggatggccgggacggagagtggccgtggcaggcgagcatccagcatcgtggggcacacgtgtgcggggggtcgctcatcgccccccagtgggtgctgacagcggcgcactgcttccccaggagggcactgccagctgagtaccgcgtgcgcctgggggcgctgcgtctgggctccacctcgccccgcacgctctcggtgcccgtgcgacgggtgctgctgcccccggactactccgaggacggggcccgcggcgacctggcactgctgcagctgcgtcgcccggtgcccctgagcgctcgcgtccaacccgtctgcctgcccgtgcccggcgcccgcccgccgcccggcacaccatgccgggtcaccggctggggcagcctccgcccaggagtgcccctcccagagtggcgaccgctacaaggagtaagggtgccgctgctggactcgcgcacctgcgacggcctctaccacgtgggcgcggacgtgccccaggctgagcgcattgtgctgcctgggagtctgtgtgccggctacccccagggccacaaggacgcctgccagggtgattctgggggacctctgacctgcctgcagtctgggagctgggtcctggtgggcgtggtgagctggggcaagggttgtgccctgcccaaccgtccaggggtctacaccagtgtggccacatatagcccctggattcaggctcgcgtcagcttctaatgctagccggtgaggctgacctggagccagctgctggggtccctcagcctcctggttcatccaggcacctgcctataccccacatcccttctgcctcgaggccaagatgcctaaaaaagctaaaggccaccccaccccccacccaccacctcctgcctcctctcctctttggggatcaccagctctgactccaccaaccctcatccaggaatctgccatgagtcccagggagtcacactccccactcccttcctggcttgtatttacttttcttggccctggccagggctgggcgcaaggcacgcagtgatgggcaaaccaattgctgcccatctggcctgtgtgcccatctttttctggagaaagtcagattcacagcatgacagagatttgacaccagggagatcctccatagctggctttgaggacacggggaccacagccatgagcggcctctaagagctgagagacagccggcagggaatcggaaccctcagacccacagccgcaaggcactggattctggcagcaccctgaaggagctgggaagtaagttcttccccagcctccagataagagccccgccggccaatcccttcatttcaacctaaagagaccctaagcagagaacctagctgagccactcctgacctacaaagttgtgacttaataaatgtgtgctttaagctgc

SEQ ID NO: 6452 - DNA, 2220 bp, Homo Sapiens
  NM_152892
gttaacgcccacgggctcgcgcggcgccgcctcctgggctcagttaccgcggacgccagtgccgggctccaggagacgcagggcgacgccacacgccggggtggccgactgggtcagcgcgggctgcgcctcctcgccatgggccccctctcggcgcggctgctaatgcagcgcgggcgccccaagagcgaccggctggggaagatccggagtctggacctgtcaggattggagctgctttccgagcacctggaccccaaactcctgtgccgcctgacgcagctgcaggagcttgacctgtctaacaaccacctggagacgctgccggacaacctgggcctgtcccacctgcgtgtcctccgctgcgccaacaaccagctgggggatgttactgccttgtgccagttccccaagctcgaggaactcagcctggagggcaaccccttcctgacggtcaatgacaacctgaaagtctcctttctcctgcccacgctccgtaaggtcaatggcaaggatgcgtcctcaacttactctcaggtggagaacctgaatcgggagctgaccagcagggtcacagctcactgggagaagttcatggccacactgggtcctgaagaggaggctgagaaggcccaggcggactttgtgaagtcggctgtcagggatgtccgctacgggcccgagtccctcagcgagttcacccagtggcgggtgcggatgatctctgaggagctggtggccgccagtaggacccaggtgcaaaaggctaacagcccagagaagcccccagaagctggagctgcccacaagcccagggccagactggcggccttgaaacggccagacgacgtcccactcagcctctctcccagcaagcgggcgtgtgcctccccgtcggcccaggtggagggcagccctgtggcaggctccgatggcagccagcctgctgtgaagctggagcccctgcacttcctgcagtgccacagcaagaacaacagcccccaggacctcgagacccagctgtgggcctgtgccttcgagccggcctgggaggagggggccacatcccagaccgtggccacgtgcggcggggaggctgtgtgcgtaattgattgccagacgggcatcgtgctccacaagtacaaggcacccggcgaggagttcttttctgtggcctggaccgctctgatggtggtcacacaggctggccacaagaagcgctggagtgtgctggcggctgcaggcctacggggcctggtccggctgctgcacgtgcgtgccggcttctgctgcggggtcatccgagcccacaagaaggccatcgccaccctgtgcttcagccccgcccacgagacccatctcttcacggcctcctatgacaagcggatcatcctctgggacatcggggtgcccaaccaggactacgaattccaggccagccagctgctcacactggacaccacctctatccccctgcgcctctgccctgtcgcctcctgcccggacgcccgcctgctggccggctgcgagggcggctgctgctgctgggacgtgcggctggaccagccccaaaagaggagggtgtgtgaagtggaattcgtcttctctgagggctccgaggcatctggacggagagtggatgggctggcatttgtgaatgaggacatcgtggcctccaaggggagcggcctgggcaccatctgcctgtggagctggaggcagacgtgggggggccggggcagccagtccacggtggcagtggtggtcctggcgcggctgcaatggtcgtccaccgagttggcctacttctcgctcagcgcctgccctgataaggggattgtgctctgtggggatgaggagggcaacgtgtggctctacgacgtcagcaacatcctgaagcagccacccctgctgccggcagccctgcaggcccccacacagatcctgaagtggccccagccctgggcccttggccaggtggtgaccaagaccatggtgaacacagtggtggccaatgcctccttcacctacctcaccgccctgacggactccaacatcgtagccatctgggggaggatgtagcctcacaccatcgcaaaggaccagggacacagctaactaacttattcagctttgggccgatgggggtgggggggggtctttcagtgaatatttttattaaactctactgtggacaaaaaaaaaaaaaaaaaaaaaaaa

SEQ ID NO: 6453 - DNA, 3621 bp, Homo Sapiens
  NM_152896
gcgagatccggcttggcgccgtgacctccatgtgggagctccagctctataagtaaacactctgcgcggcgcagacatggcctcttcctatctttgaggcggtgtctgcggcagcgcctcagagtggttccggtcgtctctcctcaagtcggctagtcgggcgcgcgcgctgagagtcgtcgccgcctgtcgggcccggcgtccggtcggtccggtgggcgcgctcgcccgcctgccgctgagggcccgagccgcagggaaagcggcgcgggccgggcggggcgcggcgcccagagctcagggggagacaaaggggaccggttcctctctaggcgccaagatgtggatacaggttcgcaccattgatggctccaagacgtgcaccattgaggacgtgtctcgcaaagccacgattgaggagctgcgcgagcgggtgtgggcgctgttcgacgtgcggcccgaatgccagcgcctcttctaccggggcaagcagttggaaaatggatataccttatttgattatgatgttggactgaatgatataattcagctgctagttcgcccagaccctgatcatcttcctggcacatctacacagattgaggctaaaccctgttctaatagtccacctaaagtaaagaaagctccgagggtaggaccttccaatcagccatctacatcagctcgtgcccgtcttattgatcctggctttggaatatataaggtaaatgaattggtggatgccagagatgtcggccttggtgcttggtttgaagcacacatacatagtgttactagagcttctgatggacagtcacgtggcaaaactccactgaagaatggcagttcttgtaaaaggactaatggaaatataaagcataaatccaaagagaacacaaataaattggacagtgtaccctctacgtctaattcagactgtgttgctgctgatgaagacgttatttaccatatccagtatgatgaatacccagaaagcggtactctagaaatgaatgtcaaggatcttagaccacgagctagaaccattttgaaatggaatgaactaaatgttggtgatgtggtaatggttaattataatgtagaaagtcctggacaaagaggattctggtttgatgcagaaattaccacattgaagacaatctcaaggaccaaaaaagaacttcgtgtgaaaattttcctggggggttctgaaggaacattaaatgactgcaagataatatctgtagatgaaatcttcaagattgagagacctggagcccatcccctttcatttgcagatggaaagtttttaaggcgaaatgaccctgaatgtgacctgtgtggtggagacccagaaaagaaatgtcattcttgctcctgtcgtgtatgtggtgggaaacatgaacccaacatgcagcttctgtgtgatgaatgtaatgtggcttatcatatttactgtctgaatccacctttggataaagtcccagaagaggaatactggtattgtccttcttgtaaaactgattccagtgaagttgtaaaggctggtgaaagactcaagatgagtaaaaagaaagcaaagatgccgtcagctagtactgaaagccgaagagactggggcaggggaatggcttgtgttggtcgtacgagagaatgtactattgtcccttctaatcattatggacccattcctggtattcctgttggatcaacttggagatttagagttcaggtgagcgaagcaggtgttcacagaccccatgttggtggaattcatggtcgaagtaatgatggggcttattctcttgtactggctggtggatttgcggatgaagtcgaccgaggtgatgagttcacatacactggaagcggtggtaaaaatcttgctggtaacaaaagaattggtgcaccttcagctgatcaaacattaacaaacatgaacagggcattggccctaaactgtgatgctccattggatgataaaattggagcagagtctcggaattggagagctggtaagccagtcagagtgatacgcagttttaaagggaggaagatcagcaaatatgctcctgaagaaggcaacagatatgatggcatttataaggtggtgaaatactggccagagatttcatcaagccatggattcttggtttggcgctatcttttaagaagagatgatgttgaacctgctccttggacctctgaaggaatagaacggtcaaggagattatgtctacgtttacagtatccagcaggttacccttcagataaagaagggaagaagcctaaaggacagtcaaagaagcagcccagtggaaccacaaaaaggccaatttcagatgatgactgtccaagtgcctccaaagtgtacaaagcatcagattcagcagaagcaattgaggcttttcaactaactcctcaacagcaacatctcatcagagaagattgtcaaaaccagaagctgtgggatgaagtgctttcacatcttgtggaaggaccaaattttctgaaaaaattggaacaatcttttatgtgcgtttgctgtcaggagctagtttaccagcctgtgacaactgagtgcttccacaatgtctgtaaagattgcctacagcgctcctttaaggcacaggttttctcctgccctgcttgccggcatgatcttggccagaattacatcatgattcccaatgagattctgcagactctacttgaccttttcttccctggctacagcaaaggacgatgatctgcctgctttcactgtgttgttcatggtggctttttggacaataaagaatctaaaatgggtggggagggtggaagaaatggtggactgtatctctcacgttctgaagcagctaatcctctttcccacatagccatcatcttgtgtgtgtagtaagaggcccatttctcaactgtcttttaaatatctaaaggtagttcctgtaacaactagttttaatgagtaaaaagtcaaagcctcagctctagttgatatccaagttatgatttattttgcaactacctcaggacagaaaagatttatggggattttaaaaatcattgaataactagttaaatgaaattttagctacacactgcctcccaaatattagttgtgcctggttcttgtaatttgattttacagaaaaggaaatgacacttgagatccttggaatgaacacagcttctaaagtgtgcatatacttttttaacgtctcttcttccattacaatgtgtgttttgcaaggacaggttcattttttttagcccactttgtgaactccattgtgcttttttctggtgttttatgcaagttgactactaatgactaatgagaacaataatgaatgcattgttgctgcattagtgtaatgtggtgtggttttgcacttaaaagaggtattcatatgctctagttgtaaatgttcatgaaaatccacttctctactagtcgaactgcttttagtgtctcaccagtggttttacatctgcagagttttgagggctgtgctgacctttgagaggatttgaaattgcttcatattgtgatcctaaattttatattcactatattccctaaagtataccttaataaatattttatgatcagaa

SEQ ID NO: 6454 - DNA, 3977 bp, Homo Sapiens
  NM_152905
gaagtttaacagtccaggcgggagccggaagcccagcgcggagccggccgcggccccctgttgtgttgctgcggagaggtacttggatgcattttacaggttagcctcacttgagctgttgtcctgcaagtaaagtgtatttttggtgattgaaagttggagaactttcatttcagctgagtggtgtagttgaattggttcctgtagccgctgtccctaaacccaggccgacgttaccgccttgtgtcctgactgctagctttcgacgggaccgtctttgagggactcatgtaaagtctctcccttaatgctcagttcttagaagaccgaggcgcagtcatgcaggaaaacctcagatttgcttcatcaggagatgatattaaaatatgggatgcttcatctatgacattggtggataaattcaacccacacacatcaccacatggaatcagctcaatatgttggagcagcaataataactttttagtaacagcatcttccagtggcgacaaaatagttgtctcaagttgcaaatgtaaacctgttccacttttagagcttgctgaagggcaaaagcagacatgtgtcaatttaaattctacatctatgtatttggtaagcggaggcctaaataacactgttaatatttgggatttaaaatcaaaaagagttcatcgatctcttaaggatcataaagatcaagtaacttgtgtaacatacaattggaatgattgctacattgcttctggatctcttagtggtgaaattattttacacagtgtaaccactaatttatctagtactccttttggccatggtagtaaccagtctgttcggcacttgaagtactccttgtttaagaaatcactactgggcagtgtttcggataatggaatagtaactctctgggatgtaaatagtcagagtccataccataactttgacagtgtacacaaagctccagcgtcaggcatctgtttttctcctgtcaatgaattgctctttgtaaccataggcttggataaaagaatcatcctctatgacacttcaagtaagaagctagtgaaaactttagtggctgacactcctctaactgcggtagatttcatgcctgatggagccactttggctattggatcttcccgggggaaaatatatcaatatgatttaagaatgttgaaatcaccagttaagaccatcagtgctcacaagacatctgtgcagtgtatagcatttcagtactccactgttcttactaagtcaagtttaaataaaggctgttcaaataagcccacaacagtgaacaaacgaagtgttaatgtgaatgctgctagtggaggagttcagaattccggaattgtcagagaagcacctgccacgtccattgccacagttctaccacaacctatgacatcagctatggggaaaggaacagttgctgttcaagaaaaagcaggtttgcctcgaagcataaacacagacactttatctaaggaaacagacagtggaaaaaatcaggatttctccagctttgatgatactgggaaaagtagtttaggtgacatgttctcacctatcagagatgatgctgtagttaacaagggaagtgatgagtccataggcaaaggagatggctttgactttctaccgcagttgaactcagtgtttcctccaagaaaaaatccagtaacttcaagtacttcagtattgcattctagtcctcttaatgtttttatgggatctccagggaaagaggaaaatgaaaaccgtgatctaacagctgagtctaagaaaatatatatgggaaaacaggaatctaaagactccttcaaacagttagcaaagttggtcacatctggtgctgaaagtggaaatctaaatacctctccatcatctaaccaaacaagaaattctgagaaatttgaaaagccagagaatgaaattgaagcccagttgatatgtgaacccccaatcaatggatcctcaactccaaatccaaagatagcatcttctgtcactgctggagttgccagttcactctcagaaaaaatagccgacagcattggaaataaccggcaaaatgcaccattgacttccattcaaattcgttttattcagaacatgatacaggaaacgttggatgactttagagaagcatgccatagggacattgtgaatttgcaagtggagatgattaaacagtttcatatgcaactgaatgaaatgcattctttgctggaaagatactcagtgaatgaaggtttagtggctgaaattgaaagactacgagaagaaaacaaaagattacgggcccacttttgaaatttcagtgaataccttaatgttctgtaatttgggaagtttctggcaacacagaactacatagaatcagtattgttttcatggcctccagggaaaaaatgtttttcaagtaagagtaaaaggatgatgggattttataccaacaactgtttcatcttaaaaatatgtatatttttatattaaaaattgtacagtatgtcatctacccaataggaaagtcaacaggatctttattttttgaaagctttagccatccactaagtgccctttttcataagagaagaaaattgtgcataaaaattggttatgtttgttttttagtcatcttttttaacatatatttttgattgacaaattgcctttcaaatttttggggctagttgagatttaaagagtttgatatgccttctatttttatggagaaagtaattttaaaatggcaattggtgtttctaagccattgactaataaaacatagggttggctagtaattattttgttaacttgatgaagtcaagtatgactattatttattgtacatttgataagacaatttttggaattttgaattgcacaaattacatgatatcttttgcatttatgttactatattgtacttctgacaaatctttattcctgggtggtatttttaagatatctttacctataaaaaatgtttaaggttcataggactcgacaagagctatctggtgattttctcattagtaacatgcaacgttgtactgcaaaatttcaatcaacatgacaacttataatgagtggagatttcatattaggtactaaatattatagtattatttctattttctttttccaaataagaagcttggattattttattttgtggtctttatcattaactttaattctttctgtactgtgtataatatttttatattattggccttaccataaaattatttagaaaggttgtcaaaataagttatacctctttggcaatagatagatgtatacatctacctactatgatctacaattttaggttaagtgaagcttgggggggctactgacttggttaccttcttgtctcttgtcccaaagatttaaactgtgtacctttgtatagctcttctgccccattttgacttctgagatgaaagtatttactaaaattaaaaaaaaaaaaacaaaaaacaaacctttagctcactaactttatgggtttctgaagtgatggaaatttttaaggatatatttaataagcataaacttactaataattacttccaaaaataaaaacaggaatattacttttacccagtgtggtttatagcatacatttgtactgaagcatatagggatgttaatgtgatcttttcctgacagattatgaaagcattatgacttgtaacaagtttccttgtatatcactaacaggtttagaagacataaatattagtgtgttttgcctacatggtgtatttaaatctattaatattttcctgttgcttttttaaaaaaataaatacacataatgtatattaaaagaggtgggatgaaataattttagtaattatgtgtacagatgaaacatttttgtcatggaatttaaaagctaagtaagtataaaaaataaaatgttatatgcaaaaaataaaaaaaaaaaaaaaaaa

SEQ ID NO: 6455 - DNA, 4529 bp, Homo Sapiens
  NM_152909
gggcgggacttccgccgtcctcctggtggtggtcgttttggttctgtgtggtgtttcaccaacttcggcctatggctctgtctgacgtcaccgaagtgacggaacggaaaagcgcgagaagcggctcggttcccaccacggagaggcgggagtgagtcaactgacaagcgctggggacagtggcgtccttgtcttgcctttgtcgctcccgccccgctcttccctggctgggctggcggaggccttgctgatgaacctgactgagggccgtgtggtctttgaggacgtggccatatatttctcccaggaggagtgggggcaccttgatgaggctcagagattgctgtaccgtgatgtgatgctggagaatttggcccttttgtcctcactaggttcttggcatggagctgaggatgaggaggcaccttcacagcaaggtttttctgtaggagtgtcagaggttacagcttcaaagccctgtctgtccagccagaaggtccaccctagtgagacatgtggcccacccttgaaagacattctgtgcctggttgagcacaatggaattcatcctgagcaacacatatatatttgtgaggcagagctttttcagcacccaaagcagcaaattggagaaaatctttccagaggggatgattggataccttcatttgggaagaaccacagagttcacatggcagaggagatcttcacatgcatggagggctggaaggacttaccagccacctcatgccttctccagcaccagggccctcaaagcgagtggaagccatacagggacacagaggacagagaagcctttcagactggacaaaatgattacaaatgtagtgaatgtgggaaaaccttcacctgcagctattcatttgttgagcaccagaaaatccacacaggagaaaggtcttatgaatgtaacaaatgtgggaaattctttaagtacagtgccaatttcatgaaacatcagacagttcacactagtgaaaggacttatgagtgcagagaatgtggaaaatcctttatgtacaactaccgactcatgagacataagcgagttcacactggagaaaggccttatgagtgcaacacatgtgggaaattctttcggtacagctccacatttgttagacatcagagagttcacaccggagaaaggccgtatgagtgcagggaatgtgggaaattctttatggacagctccacactcattaaacatcagagagttcacaccggagaaagaccttataagtgcaatgattgtgggaaattttttaggtatatctccacactcattagacatcagagaattcacactggagaaaggccttatgagtgcagtgtatgtggggaattgtttaggtacaactccagccttgttaaacattggagaaatcacactggagaaaggccttataaatgcagtgaatgtgggaaatcatttaggtaccactgcaggctcattagacaccagagagtccacacgggagaaaggccttatgagtgcagcgaatgcgggaaattctttcgttacaactccaacctcattaaacattggagaaatcacactggagaaaggccttacgagtgcagagagtgtgggaaagcctttagccacaagcatatacttgttgagcaccagaaaatccacagtggagaaagaccttatgagtgcagcgaatgccagaaggcctttattagaaagtctcacctggttcatcaccagaaaatccacagtgaagagaggcttgtgtgctccatgaatgtggggaattctttagctaaaactccaacctcattaaacatcagagatttcacaatggagaaagtttaccattgactattgtaattgggtagtaatgttatataaattccacatttttatgcaactaatctccagaacatttttcctcttaccaagaagtaaaatgctgtacccattaacaacaactcattccccttccctacttccccagaaatgtctcaactatatttctatactctatggtacttatatgaggtaccaatagatatctatgaatttgatatatatttgtacctcatataagtggattctacagtatttatcttttgagactggcttatttcacttaggataaggtcttcacggttcacccatgttgtataatgtgtcagaatatccttcctttttaggtgaaataatattctatggtatttatataccacatttatttatccattcatctgttagtggatacttgggctacttccaccttttgcctattgaaataatgctgctatgaagatgagtgtacaagtgtctattcaagattctactttcaattcttatagggtatatactcagaaatggtggtgctggatcatataggatttctattttttttttttgtttgtttttgagacagagtcttgctctgtcacccaggctggagtgcagtgctgtgatcttggctcactgcaagctccgcctcccaggttcatgccattctcctgcctcaccctcccgagtagctgggactacaggtgcctgccaccacgcctggctaatttttttgtatttttagtagagacggggtttcaccgtgttagccaggatggtcctgatctcctgaccttgtgatctgcctgccttggcctctcaaagtgctgggattacgggcgtgagccaccgcgcctggccaggatttctatttttaatatttttgggaaaatttttccatagtacctgtgccattttacattcccaccagcagtgcacaaggattgcaatctatatacatcctcaccaacattgttcattttctatttctgtttttggggttttttgtagtgccttttgttttggatagcagctatcttgttggatgtgaggtggaatctatagtgtctttcatttttattttgtgaatgattgatgatgttgaggatcttttcatgtgcttgttaggcatttgtgtatctggaaaaatattcaagtcttttttttccatttttaatgggactatttgctttttgttgttgagttgtagttctttatacattctggatattaactccttaccaaatatatgctttttacatattacctcccagtccataggttgctttttcgctctgttgattgtgtcctttgatgaaattttaagttttgatgtactgttgactctttctgtctgtgggttctgtattcatggatcgaagcaaccatggatcaaaagtatttggagcatccatggattgcagtgatcattaatcaaaaatatttggaaaacaaaaagggtagttgcatctgtactaaacatgaacagacattttttcttgtcattattccctaaactatatagtataataaatatttacatagcatttacattgtattagaagttataaataacctaatgataatctatataggaagatgtgtgtaggttatattcaaacactatgcctttttatgtgagggacctcttgagcatcagatgattttggtatccacaaggggtcctggaatcagtcccccacagacaccaagggatgactgtagtgcattttatctatttttacttctgttacctgggcttttgatgttatatattaaaaaaaattagtatcaaatccaatgccaagcattttccctatgctttattctaagaattttatatttgaaggtcttacatttaggtcttttttttttttttcttttggaggcagagtcttgctctgtcacccagcctggagtgcagtagtggaatctcagctcactacaacctccgcctcctgggttcgagccatcaccccacctcagcctcccaagtagcttggattacaagtgtacaccaccacacctggctaatttttgtatttttagtagagatggggttttgccatgttggccaggctggtcttaaacttctggccttaagtgatccccctgcctcggcctcccaaattgctgagattacaggcaggagttgtaatgcactgtgcctggctacatttagatctttaatctacttggggttcatttttgcatatggtttaaggcaaaagtccactttatgtggctatccagttttccaagcaccattttttgaaaagagcatctttcctctgttgagtagtcttggcacacttgtcaaaatcatttgtccatatatgccatggtttatatgtggattctctattttattggtcatatgtctgtctttatgtcagtaccacacattttaggtgtgtgtgtgtgagactcagtgttgaggacaaggctagtgggctttcacactccagactgctgtattccagcccaaattactcaaattagccaatccatggggaacatggaaaacgtagctaatgcaatccgcttgccttacctaagttgtcccctgcagcctcaggttgctgttactgtgtttcagatgcaaccctctgtgggaccctacccaagttctctcattcttagctataggtaataaattgttctgattttgtgtatccaaaaaaaaaaaaaaaaa

SEQ ID NO: 6456 - DNA, 1037 bp, Homo Sapiens
  NM_152912
gaagccccgcccactacggagagcgaaggggactcgccgcagatccgctgtacttgcgtccgctacagtatgtcaatcgcttgccccagcacagctgtcattcttctctacagaagagcttctcctcatcaactggggatgattacagttcttcctaaaaaaggatggctgctctttttctaaagaggttaacactacaaactgtaaagtctgaaaatagttgcattagatgttttggtaaacacatcctgcaaaagacagcaccagcacagttgtcccctattgcttctgccccaagactctccttcctaattcatgcaaaagcctttagtaccgctgaagacacccagaatgaaggaaaaaagacaaaaaagaataaaacagcttttagtaacgttggaagaaaaattagtcagcgagttattcacttatttgatgagaagggcaatgatttgggaaacatgcaccgagcaaatgtgattagacttatggatgagcgagacctgcgactggttcaaaggaacaccagcacagaacctgcagagtatcagctcatgacaggattgcagatcctccaggagcggcagaggctgagggagatggagaaggcgaaccccaaaactggaccaaccctgagaaaggaactgattttgtcttcaaatattggacaacatgatttggacacaaagactaaacagattcagcagtggattaagaaaaaacacctagtccagattaccataaagaaaggaaaaaatgtagacgtgtcagaaaatgaaatggaggagatatttcatcaaatactccagactatgcctggaatagctacattctcatctaggccacaagctgttcaaggaggaaaagctttaatgtgtgttcttcgtgctttcagcaaaaatgaggagaaggcatataaagaaactcaagagacccaggaaagagacactttgaacaaagaccatggaaatgataaggaatcaaatgttctgcatcagtaattttaataaagaaaagcatgctctgagagaaagctc

SEQ ID NO: 6457 - DNA, 4787 bp, Homo Sapiens
  NM_152914
agatggcgcactcggctgccgccgtgccgctgggcgcgctggagcagggctgccccatccgcgtggagcacgaccgccggcgccgccagttcactgtccggctcaacggatgtcatgaccgggccgtcctgctctatgagtacgtgggcaagcggatcgtggacctgcagcacaccgaggtcccagatgcctaccgtgggcgtggcatcgccaagcaccttgccaaggccgccctggacttcgtggtggaggaggacctgaaggcccatctcacctgctggtacatccagaagtacgtcaaggagaaccccctgccgcagtacctggagcgcctgcagccgtaaccctggcctgcaggcgggagcgctccctgccggactcttccacgtggcctttgcctggccccacgtgctctcaggaacctggtcccactgggaacagactcagagttatttttgtaaggacactcatctgtgccccacgtccagatccctggaggcagctgaccaatgatgggcggtgacccggtaaccgaggcggcaaggaggccaggtagtcccggcacctctcactctgcagagaccagcggcttcgtgggaggcctgtgggtcacacgtaggggctagagccagcctgcatcctgcccaccgggctccacttggagatcagcaggagggccagtgtgggacccctgctgccacctctcctgggcctgtgtcctttctggaaattaagaaggtgtgctccagagccaagaggagcaataagaaacctcgtgtgccagcttctgagggtggcagtgccagaccccacctgccagcggtgctgcccctttctcagacccccatgcccagtgcaggcagggccctggaaagggtcagctctccctgacagagaccagcagagtgaaggactgagcactggccaggctcaaccgtacgtgcggttcacacatgtgaacacacaggatgcagtctacaggcgggctggtggtgggtgccgggggtgttttcctctccttggtacccccatcttttttttggcctctcgtgtaggttctgcaggaaaccaaggccccatccccatgggctgctatcccctatacccctgtctgccaggaggagatccaagggggcctgagcagctgcaggcccgccccttgctggccttggccacctgcctgagccttctccgaggagatgccttggggctggggtgggagtgaagctgactattctccaaaaaccaccctcagcatccaagaggaagaaacatcagccacaggggtttctgtgctgctgccagacatcagtgtcctcttttgtggctggctacagccggatacactttgctgcccatctggccctgggctcctccccaacccagccttcctgggtgcagcctgggagacacactagcatgctttggtgggaccagcctttccagggcatgctggcttcccctggggctgactcaggtcccgccctcttgtgtcagtgctaacaaggatcagattcgtccctgcccttctgtagagctggagggtgacctggagccaggggccctttagggctgagacatttgttagtcggagtgatgcatccctacccggcttcggggggagtcaggctgggctctgggcagtacagggagaggttcaccaggacccccatgccttcctcccccggtgcaggggcagtggtcaccatgctgactcctccctttgactccatgcacgggcgctggctggcctgtggttgcatttcccactcacctccttgctatccccagtcttggcaccgagaccccccacattccttctccagcaacagcagcccaggggccttcctgcctggacgcaggaccacggagacctgcatgtgcagggaggcctggcagcctgccgatgggggtccccgagccccggagtctcctcgaaacccctgctgtgggtcacagcatggaccaggaggggtcaccatcctgagtacccccgacatccctgccccttgacctgtggcagatgctcctgccctggcctccaggaagtcagctcttttgcaaagggcttgtgtgagaggtcggagaaagccctgggcctccagggagatgcagctggcaggaggtgggctgagctgctccggggctaggggtggcccattgctggcagaatttaaggaaagagcaggttgtaggcacagaggatgggcagccaggcctgggccttccccttactgtcccagggcagcagagctagggtcctcttttaccctccctaaggtcacccccttcccatctacacgtccctccccaagttcaagcacatagtcaatcatgaccactcaggagctcagtgagctggggccatgtccctgtggcctccagcccatccgcaggagggtcccttgcagtgacagcacaaagagtcccccacaggaagcccctgagggccagcatggaccttgagagccaggagggaatgggcctggtgccactctgttcccactcccacctaagattcctacccctgtgttctagcaggtgactcttgatctggccagcccacaacaaatacttgaactaggcagcatggggtggtggaggcctgcagaggccccgggcccaggaactgagactagggctttctcatgaggcctcatcaagctcccgcaggtatgacctggcctcctcgcctcgggctgccttaaagcaccgctaacccacgccaaggggctaggcagggcttcgcggggcctggcccaaggtctccagcagagcaataacatcttcccaggttgggttgccacagacaccgtgccctggagcccccagcccatcccatctggtgctaccctgtctgcctggcagcctagcctcacccctcctgtccggtcacctgggggtccttggtaaggatgccgccacatggggccggtttatgcacctgggcgagaacctgactggggcaggggatgctcaggggcctgcaggtctcccacagagctgcttttctgcccgcctcaccctgtgggtttgtatttcttgccgggtcaaaataggcagtgactcgtgccttccctcctcagggccggcggcagggtgtggacccagctggccgctggaccgtccccttcctcattctccaagctcatcaacaggtctcagaggaacatttccataaaaggtgtggcctggcatgcagtgctgtctgcacgctgtcgcttcccccacagcaacctgccggtcagccttaactggtgtggaggtcgaggtggggagggggaggcgggcttccctccctggtgtctggcctctttttgctcagccctcagcacagccttcagcgtggagagcgagaccctgcgtgtcactggggcttggctgaggtctccctgcaggataacagtgacttcaggaacccagaccccagtctgggcggctctaccttcccggctggcccagcccccacaccacagttccctgccacctccaggcacaaaagcctctgaggccacagcccagctatgaagctgagtggctttgtgcggtctcctagggaaggggcagtgatgccatgcatgagatccgctgtgccataagaagttgcttcctttagaatttctggtccaatgcagggaggtgaggcccagcctcatgataacacatgcccatcaaggaaaagctgtggctaatgcttccaaaacaagtgaaaatcttgcaccaggcccagggccatatctcattccgccccagctactgagggaggggacagactgctggaggacaatttctcctagttaccactaggggttacatggctactcagaatgaaagataaattgccaggcctgttgcaatcttttttttgagatgggagtcttgctctgtcgcccaggctggagtgcagaggtgcgatctcagctcactgcaacctccacctcccgggtcaagcaattctcctgcctcagcttcccgagtagctggaattacaggtgcccaccaccatgcctggctaatttttgtatttttagtagagacggggtttcaccatgttggccaggctggtcttgaacacctgacctcaaatgatccgcccacctcggcctcccaaagtgttgggattacaggcgtgagccacctcaccaggccccgttgcaatcttactccacttcgttttcacagcagtcccgggacatgcccattattaggcctatttgatagatgatactgaggctgagtcgggggtcacaagccaaagccacaccgctagaagggctcaggacccagcccagctcccgtcctcttggtggcatcaagcttgtgtgatatgaggtcttatgtctgctcatgacagccttaaaagcaataaacagatacaacttccagcaacttcccactcagctgcaaggctgcgggggggtcctgcctcgagccataaggtgagcagctagccagtgccgggccagtgtggagaaggctgaattgcctgtgaagctggggttgcaggcaggaatattcatggagcccctgaccatgtactcacactgctcttcctcagttcagggttcttggatttgctcaagtccacccaaatatccctttacgattctcagggtcccactccttccagatccaatgccctaaactttacataagagttccggcaaggctgtgacttcaacttgtgttgtaactgcaacctgcagaatcaaatttagggttatgttttcagttgtatcagtcttacggctacaagatattaaagagattcttttctggttatcaaa

SEQ ID NO: 6458 - DNA, 6624 bp, Homo Sapiens
  NM_152916
ggggggtctgctctgtgcggtgaagcttctcttcttggcacctgcctggcatcggaagagggccccttctccctccctgggcttttatgtggacactgtaatgcctcagttttctttctttctttttgtttttgacacagggtctcactctatcacccaagctggagtgcagtggcaccatcttagctcaccgcagcctcaaactccccagctcgggtgattcttcctgcctcagcctcctgagtagtagcagctgggaccacagacgtctgccaccaagcccagctgcaccgccagttccggggagggccctgggccagcggctgtccgccccccctcctttataaagtcctggcctcgggacagcccgcacagctgcccagcctgcggagacgggacagccctgtcccactcactctttcccctgctgctcctgccggcagctcagctggaaccatgggaggccgcgtctttctcgtctttctcgcattctgtgtctggctgactctgccgggagctgaaacccaggactccaggggctgtgcccggtggtgccctcaggactcctcgtgtgtcaatgccaccgcctgtcgctgcaatccagggttcagctctttttctgagatcatcaccacccccatggagacttgtgacgacatcaacgagtgtgcaacactgtcgaaagtgtcatgcggaaaattctcggactgctggaacacagaggggagctacgactgcgtgtgcagcccaggatatgagcctgtttctggggcaaaaacattcaagaatgagagcgagaacacgtgtcaagatgtggacgaatgtcagcagaacccaaggctctgtaaaagctacggcacctgcgtcaacaccctcggcagctacacgtgccagtgcctgcctggcttcaagctcaaacctgaggacccgaagctctgcacagatgtggacgagtgcagctccgggcagcatcagtgtgacagctccaccgtctgcttcaacaccgtgggttcatacagctgccgctgccgcccaggctggaagcccagacacggaatcccgaataaccaaaaggacactgtctgtgaagatatgactttctccacctggaccccgccccctggagtccacagccagacgctttcccgattcttcgacaaagtccaggacctgggcagagactacaagccaggcttggccaataacaccatccagagcatcttacaggcgctggatgagctgctggaggcccctggggacctggagaccctgccccgcttacagcagcactgtgtggccagtcacctgctggatggcctagaggatgtcctcagaggcctgagcaagaacctttccaatgggctgttgaacttcagttatcctgcaggcacagaattgtccctggaggtgcagaagcaagtagacaggagtgtcaccttgagacagaatcaggcagtgatgcagctcgactggaatcaggcacagaaatctggtgacccaggcccttctgtggtgggccttgtctccattccagggatgggcaagttgctggctgaggcccctctggtcctggaacctgagaagcagatgcttctgcatgagacacaccagggcttgctgcaggacggctcccccatcctgctctcagatgtgatctctgcctttctgagcaacaacgacacccaaaacctcagctccccagttaccttcaccttctcccaccgttcagtgatcccgagacagaaggtgctctgtgtcttctgggagcatggccagaatggatgtggtcactgggccaccacaggctgcagcacaataggcaccagagacaccagcaccatctgccgttgcacccacctgagcagctttgccgtcctcatggcccactacgatgtgcaggaggaggatcccgtgctgactgtcatcacctacatggggctgagcgtctctctgctgtgcctcctcctggcggccctcacttttctcctgtgtaaagccatccagaacaccagcacctcactgcatctgcagctctcgctctgcctcttcctggcccacctcctcttcctcgtggcaattgatcaaaccggacacaaggtgctgtgctccatcatcgccggtaccttgcactatctctacctggccaccttgacctggatgctgctggaggccctgtacctcttcctcactgcacggaacctgacggtggtcaactactcaagcatcaacagattcatgaagaagctcatgttccctgtgggctacggagtcccagctgtgacagtggccatttctgcagcctccaggcctcacctttatggaacaccttcccgctgctggctccaaccagaaaagggatttatatggggcttccttggacctgtctgcgccatcttctctgtgaatttagttctctttctggtgactctctggattttgaaaaacagactctcctccctcaatagtgaagtgtccaccctccggaacacaaggatgctggcatttaaagcgacagctcagctgttcatcctgggctgcacgtggtgtctgggcatcttgcaggtgggtccggctgcccgggtcatggcctacctcttcaccatcatcaacagcctgcagggtgtcttcatcttcctggtgtactgcctcctcagccagcaggtccgggagcaatatgggaaatggtccaaagggatcaggaaattgaaaactgagtctgagatgcacacactctccagcagtgctaaggctgacacctccaaacccagcacggttaactagaaaaatcttctgaataagatcttccctctttgcccgtggaaaatctgaacaatctttgagccatctagaggggaaagaaaagactttgttctgtgtgtttcaagaaattcaccatgtcagcaatatgaaggatgttatggaaggcgtgctaggcattcaattcctgcagaaaccggaaatcttccatgccctgcaatgtgctcatcaaactctcagcatatggacggccagctgtggcccatatcttggtcactctgaagcacaatatttatgaagctatagaacgttaagacctctttcacagcctctccttcctacaaagactcctccaaatcttaaaatgaagcaggaaaacgagcctaagaggactttcataccgacaacatctgaaaggactagaatgttcacaccacgatctggatttcttaattttttgtttttgtttttgttgttctctagttctacgggtttgattatttagtcatgtgaaaaatattgattactcacacatagatcaagagagacacggctcctgccttcatggagcttttaggggaaaatgaagtggctcttgcagctagagttgactcagaagccgaaattcctagaaatcaggtttctactgctaggcaattgaagtataaactattttataaacactgtcttctttcgtcttcacaccaacatgcagaaaagtttctaatctcagatcggggatgtgcaacaaattccatttcaaaggaatgacctgcaaaactcctaaatattccaagcaaatgcccttaaccctgtctgttatctgctttccttgaacagaaattctacatgaccataaaacctcgaagatgggtatggcacagttcatgccctgtaatcctagcactttgggagggtgaggcaggaggatggctcaagcccaggagtttgagaccagtgtgggcaacagagtgagaaccatctctacccaaaaaaaaaattaaaaattagccaagcatggtgatgatataggagttaaggagaaatcatttaggcaaatagcaagggtaggaagtcctcagtaaggttttccatttaatgaaaagcagcccccaaaatcattttcttttctaacaaagaacagcctgtaaaatcgagctgcagacatagacaagcaagctggaagcttccacgggtgaatgccggcagctgtgccaataggaaaaagctacctagactaggcatgtccaaaatggcggctccaagttcccttctctttgccagccatgtgtacagtaaaaagcaggcaacatagtgtcagccaaagctcatttgcataataagattagggtggggtggccagctcacataggggtaggccctaggtaaatcagacaccgccttctcaagcctgtctataaaatctggtacactatgacgagggtcagatttcccattcagacgcccctctcccatgcaagagaaagagctgttctcctttctctttcttttgcctattaaacctctgctcctggccaggcacagtggctcacgcctataatcccagcactttgggaggctgaggtggtcagatcacctaaggtcaggagttcaagaccagcctggtcaacatggtgaaatcttgtctctagtaaaaatacaaaaatatatgaaatctcacatagatgataatattaagttccaaaagcaactcaacctggtagattctaattttttttgaggcagggtcttgctttgtcacccatgctggagtacaatggcacaaacactgctcactgcagcctcgacctcccaaggcctaagcaatcctcctgcctcagtccccctccaggtatttgaaactacaggtgtgtaccaccacaccgggctaatttttgtattttttgtagagacgtgggtctcactatgctgcccaggctcaggtcttaatctcctgagctcaggcaatccgcaggcctcagcctccctaagtgcggggattacaggcttgagccactgcacctagcctctatttgttttacaaaagagaaattgagatcctgaatgttaagtgacttgcctgaggccatcccactaacaggagccagggttaggattcaaaccccatccaactggtcccagagctggagcttcttgcactgccctacactacctaccatctccatcctctgggcacctttttataagaaccaaaacattacagagcattgctttgtcaactcagctgggaacatttcccagtgcaactcacatttttcactgctctgtgcctgtccgtataagctcaatgagtattgatttaggggctttggagaactttgaatgctaccccccaagtaaccattgttggcaacctggtacctctacttttagccatttctccttctctataaatagtgcagaagtaacccacttggtaacaggcatccttgccaagcctccaccactaggtcagtgtaagaattaaagaaagaggaaagaaacacaaaaagtggcttgatggttaagacaggtttattttagagaaaacacacctgagaggggctgctggctgaattaggttagagtcttttctacagactaagagtgtttaaggatttagggtgggagagtttcttagaggcttggactgcttctgtgttttttttgttgtgcttatatgggagggagagtggtgtgtttgcttttatacatttttctgcagctgtaggcataccccccaagtctgcttttagcttccctattttagtgcacctggagggaaaggaatgtgcttattaaggcccactgttttactggggcccattgtatgagggtgaagtttggcagttacccaagagacttttcctccaccttcctctgtgcccgagctgttttatctgcattttactgtctgctttttttggctgcttatagtttttaaaaaagtaatttccttaaatccagaaggctaaaaatgaagctgaaacttaaagtggcggtgtttgtccaaaataacggggctcctgctctgccagtcagtaccctcaagtcactcctgatcctcaacctccatgcctaaggctggttcaagagaccacataatatctgccttttattacatacatgatgggtgcatgggattctgcgtgccctttgcttgatatagactgctaaggtgagatggggaatatcagagtcagctgctgcttgaggaagcagaacacacagctggaggcttggaacatgtgggtccctatgagtgtagagcccatatccccatagagtctacctagagcaggggtcgccaaatgttttcttaaagagcctgatagtgtatatgttaggctttgtgagccaggtatttacagcaactcaattctaccactgtggtatgaaaacagctatagacaatcataaatgaatgatcatggctatgttttaataaaactttacagacactgaacttgaacttccattgtgatatgaaaacagctatagacaatcataaatgaatgatcatggctatgttttaataaaactttatggacactgagcttgaacttcatatatcagtcatgtgacacaaaatatcattcttctttttatttgttttcacccatttgaaaaatgtaaaaactattcttagctgtacagaaacagatggtgggtcagatttgactcactgcccatagtttccagaccatgatgttcaggttcatggaagcacttcactctacactaatttattcatccattcatcacatatgtgatgagcacatacagacacacctcagagatattgcaggctccactccagatcaccacaataatgtgaatattgcaataaagcaagtcatacacatt

SEQ ID NO: 6459 - DNA, 8761 bp, Homo Sapiens
  NM_152924
agccctcctcccctttccccgcccactccgggctggccttatccagtagcgtctgggtccctggactaaagccgtcaaatgtaaccaattgctgaggagctctcccctaagaatcccgcctccactctgaggaacagcttcgctgatcaatggatcccctcctagacgcaatgagcgcgcggggcaagtggagaagcggctgaactgcccaatgaacaagcggtttccgtggttaggggcgtggcagaagcggtcgtcaggggcgtggcggcagttacttgggcggggccggtagcggcgggagctgcactggccaggggttccggctgtatatccatgagcgccgctggcagccggggagctgcaggaaccagactgggggcgagctgagcacctgtagtcaatcacacgcagcttttaggtttgtttgaataagagatctgacctgaccggcccaactgtacaactcttcaaggaaaattcgtatttgcagtgggaagaataagtaacattgatcaagatgaatgccatgctggagactcccgaactcccagccgtgtttgatggagtgaagctggctgcagtggctgctgtgctgtacgtgatcgtccggtgtttgaacctgaagagccccacagccccacctgacctctacttccaggactcggggctctcacgctttctgctcaagtcctgtcctcttctgaccaaagaatacattccaccgttgatctgggggaaaagtggacacatccagacagccttgtatgggaagatgggaagggtgaggtcgccacatccttatgggcaccggaagttcatcactatgtctgatggagccacttctacattcgacctcttcgagcccttggctgagcactgtgttggagatgatatcaccatggtcatctgccctggaattgccaatcacagcgagaagcaatacatccgcactttcgttgactacgcccagaaaaatggctatcggtgcgccgtgctgaaccacctgggtgccctgcccaacattgaattgacctcgccacgcatgttcacctatggctgcacgtgggaatttggagccatggtgaactacatcaagaagacatatcccctgacccagctggtcgtcgtgggcttcagcctgggtggtaacattgtgtgcaaatacttgggggagactcaggcaaaccaagagaaggtcctgtgctgcgtcagcgtgtgccaggggtacagtgcactgagggcccaggaaaccttcatgcaatgggatcagtgccggcggttctacaacttcctcatggctgacaacatgaagaagatcatcctctcgcacaggcaagctctttttggagaccatgttaagaaaccccagagcctggaagacacggacttgagccggctctacacagcaacatccctgatgcagattgatgacaatgtgatgaggaagtttcacggctataactccctgaaggaatactatgaggaagaaagttgcatgcggtacctgcacaggatttatgttcctctcatgctggttaatgcagctgacgatccgttggtgcatgaaagtcttctaaccattccaaaatctctttcagagaaacgagagaacgtcatgtttgtgctgcctctgcatgggggccacttgggcttctttgagggctctgtgctgttccccgagcccctgacatggatggataagctggtggtggagtacgccaacgccatttgccaatgggagcgtaacaagttgcagtgctctgacacggagcaggtggaggccgacctggagtgaggcctccggactctggcacgctccagcagccctcctctggaagctgcgtcccctcaccccctgtttcaggtctcccatctccctcagtgacctggatctgacctcacaccatcagcagggggcacccaccatgcacacctgtctcggagtaggcagctcttcctgggagctccaggctatttttgtgcttagttactggttttctccattgcattgttaggcatggtgacaagtgacagagttcttgccctctgtccagtttcagcatctggttgcttttaagccaagtacatctagtttccctattaaaaatgtgtctgaatagcgattttgctttgccaccaaaaggcttttccctgagaacagtgaaggatgtatgtcattttgtggtggttgtatgtgtccttacatagaccttaaaaagagctcacccttccaggccaatgctgaagacacagctccgcttgggagcctgagaacccaggcttcccaggccagagtgtggcttcttaaacggcaaaggaaattcctttgagtcacaagccaagttttcgccctgtctcctgagaccatttccctacgctttgctgctgctgagagttacgtgaggcacttgttaaaaattcagcctcccaggtccctcccctcggagaggctgattcactgggtctgggaaggagcctggggattttaatttttcacaagtgccccagatgattctcatcaccaagcaaattttggaaatgctgttcaacagcgcccttaaattggaaacatctttgcagctcgttttattgaaattcataatcaggggtgtcctctagctcccacggtctccagagcagcaaggccggctatggagctgccgtcgtgtgaccacagtgtgatgtctcagaagggctctgggtgggctgagcatctgggctgtgccctggctctgcttttcaccctggacaaagtcgctgtggacttcaatttcttcacctctaaaatgggggacttggaccaggtagattgctgagctcactaccaggttcaaagttcaatgacaaactcagtttactgaggtttgagagaacatccctccaggggagcctgggagctgctctcccagtctaagcatgtagatatcatcgtttgccttttgtgtgtgtgtgtcccttatttgataaaaagatgttttgagttgttttttttttaagcactcacttgtaattttagtttttaaacccaagtccctctaactttgcctttgataccaaacaattcaaaagttggatctgagtttggagaaagatatttccaacctaagtgggtattattttgaaaccagatttttaatttaatagcctatatttgtagtctgttggataggtgtttccaaagtgtgtcttctcaagtgaaaacgcaactctaggtttcaagtactccttttctccgatcctgtggtacttgaatatccaaaaaccctgcactttgaacaatcagctgttgctatctggaactaaacagaactatgagtaaaattgcctggatactttaaaaagatatttttcctccttcatctcctttgactccaggacagactggaatataagtagtgggtctgcatggatgtttcagggatcaaaggagccacctgggcgcctgagtgccaaccctcagggccacaggtgggtgtggtttgggcacgggtccaagtgactgtgacgggacccgtgggcatgggtccaggtctgtaacctgaagaagttgttttctgacaatcaccaaatcatccgaatgacatcaaaagcagcccttatctcagagactgagatttctgtggtctcaacttcgctttggtataatttctggcactcaccagcctctatcattatgactttccccccagtgtattatttctctaataggtttccttttcacgttcttttagcacagactggcactttaccctctcagtttggaagttagcccctctcctctgttacttttcccttcacccaactacagctgtgatctagaacattcatagtcatatttctgctactactaccttcatttatcaagactttttatgagaataggtaaaccaagcaataacttcctaggactgaatcaccaccccagaagagcgagaggctcctttcatatgcctgaggccacaccccttaacctgttctgacaaaatagtggctggcccatgtaccagctccattcagaaattcaggaagagaaaagacagccctgttgtcacacaaaccggtgtgggggagggtggagcctggtctgcacggcagtcctggtggcccctgtggaggacaggcagggctggcagcatagcctttgttgccacacaaccggaatttgctcccccaggactgtgggagccagtgtcccagctgaaatctttttagtgtgtggctctgaatggcactcacattccattttggctcacatgaaactaactgaagccctttgttcaagcttcaggctcttaggcatggaaatgagaatgtgactgtggctgtcttacaggaaaattcttgtttgtccctgaatgagagcacagaggcattgaattcacagagctgcaaacttgcctgataaatgagggagtggcagtttatagataggtcatcttttttccttcctccaggtgtccttgcctttcttcccaaagtcattcatttctgatgagtatatgaatccccctcttgctagtaaggttctatttgggctaaaacaaggctgaatttttaaagagtatttgaatatattttagaatcaaattgaggctataaattgcatcaatctggacaattccattgcaggaataatatgttaaaaaccaatggggagaagcacccacatctctcctgtagcactccgtgtctcataagcaatttgaagacacttacaagtaactgattccagtcaaattaggattaactgactcaaaaaatggtgtcaagtttctttaatgtttttatgttagaagtgagtttaacagacttgaagaaaactgttatcttttcctgctgtgagtttacacaaatgattccagagcagaatgaaagcagaaagctgttggttacaatattcttttaacctctctgcagcattttacacttactgggaaccttatgattcaccgtaagagtggaaatatacctgagttcgtgtcctaatggtctctaattcacattggatcgtgggcaaatcacctcacctctctgagcctgttccctcctcttagaccatctctaagaccacttcatctatttacacatcatttgcttgaacattgctgaacatctgcgtgaacttggcctctccagcccttgcaggtggaaacagctgtgtcaaggctcaaggctcacgctgaggggacttggagggagggggcttctgcattaagctttcctggtgaagacccttgatcttgtccaaagccctgtgtctttgactggcttctcttcagagtccccgttgtcatcgtaagacccttgctgtttggagggtggtcttgtgactgtggcagctgctggccgctggaatgaggagcctatctccatcctccagtgtgactcaggcagagcattgagaattcccagggcagaaatccttcctgctcaggctttcattctaaaactacagtcttcattaaagctgaactttctgggtagctgagcttatatgcccggcatctgaatgagagctctctttgtaactgtgtgacttgagatctagtttgccagctcctgggaaacaatacatgtgttcttgtttgtgtttgctcagcaagcagatgtctgagatgtaagaagcttttcttttcctgtggcattgattctgacttagagctgaagtaaaagatcactgaaacatcacgtcaagttgaagtcactcataggtctttgtcctttaggcaggacaggagagtcattaagaagcatttcactgtagcattctatcacaatatcatctggaattgttttctttgcccagaaagccttaacttgcctctagagaatccctggtattacaacgatattgcggcattagaattccaactcttctgctgtggaagtttgaagcgaagctgcagcaaaaccagagaatttcctcaagtggcctgtaggctccttgttatcttatgcccccacccctccctcaacaatatgagtgatccagaactggcccaaacacctcagctctggtccctttttgcccttcttggccttactctgttgttcaaagccactttggattgcttggatgcttcgaacagccatgaaaagtagcctgcctgtggcatttagaggccaagcaattgacagaaagggtttcttctacctctgttatctaagcagagggaagtaaacctctcaccgccccccacccctcactgcccccgattaccctagaattgctttcgccaaattgtagttgaagctaaggaaggggaatctggcccctgctgggagagggaactggaatgccacacaaggcaaggcctgcttccttccttcccctctgctgctgctgcctcggaacgctgcagcccaggcttcctcccacagtggcccttggaagcaggccgcagagtagacagctgctccttttggaagagtcagtcccctgtgttttctgaactgtttttcctagcatgtatgtgggtagagctttcatgcatctctagtaataataagctgaaattagttttttttttaattctccaatttaaaacttttaattaaaaagtaaattttaatgtcgaaaatgcaaacttggggagggcagaaagatcacacacaaggctgtcacttcatacttgcaggattgcacagcagccgggcagaggcgctcctcacttcccagatggggcggcgggcagcagagacgcacctcacttcctagacagtgcggcagccaggcacaggcacacctcacttcccagacagttgggcggccaggcaagcgctcctcacttcccagatggggcggctcccgggaagcggggctcctcacttcccagacagggtggccaggcagaggtgctcctcacttcccagaacaattctttatgaatttgataaaggactgaagtgcaactgaaagctgctagtgatgatctggtaatatacaatttgtccagtagccagtttgtttttattgtgttttctaaccataagagatcattaaaggcaaagcctgtatgacgctgtacacacacaaaaaaatggtcaccgcaggccatactaccaatgaaatggtaggtaaacaaatcttctggtcaagagaaaaaaaaaagaaatagcactctgcatgctttgctctacaagacgaatttccctagaaagaatccaatgaaggccgggcatagtggctcactcctgtaatcccagcactttggaggccgaggcgggtagatcacctgaggttaggagttcaagaccagcctggccaacatggtgaaaccccttctctactaaaaatgcaaaaattagctgggtgtggtggcgggcgcctgtaatcccagctactcgggaggctgaggtgggagaattgcttgaacccaggagacggaggttgcagtgagccgagatcacgcctctgcactccagcctgggcaacaagagtgagactccgtctccaaaaaaagaaaaggaatccagtgaaaatggctgcaattacaacaagaagtgaaggaagaagactggtgacatctctgaaggatgcagttgaggttgatccaggtttatccgaatatgctacctttctgagccttaaaccttcatctctcaggtgttgatttgcttctgatagcttcatcatttctccctgaagtcttttacactcttctgttagtttccttgtttcagtatcatgaagtgaagcactgtgtggttgtggcgtgggcccgtcttgcttagatgcattcagtgggacagctttgctgggttccatgtcattcaatttatcattttcattggggatctccatttggaatccattaattcatgaggttttgcctcattccacacagcttccatatctgaagtgtttagtggagcaaaaattgtaccataaacttgtgtttactcttttcattcggatcatagtcaaagggctgtagcattactgaaacagtcacagttgaccctgggtcaataattccactgttgggcctcacacagtaccggtgaggcacggtagtcttcactttgaaacacacttttctatccgatggatttcgcaatttaagatttgtagtgactacatctgtgaaggggcctttgaatttgaggtctatgggcgggtcgaggaccaggatctgctcgtgcttcgccgtggccccggaggcagacgccattggagagacagcgcagagcagggggcggcttgctcgctgggggcgggggacgatggcgagaggggagggggagcgagttcgcatctctccttttcctggttagactctgttcaaccacattcttatgttggcagatctgcttccagattgatttttagagcaccatcactttcacattcctgattctgattttgttttgttttgtttgggttttctgaaacttaaaatgctgccccgaaaatactatatttttgagtttgtgttctgaaagcctccgtgctgctggatctttggggggaaatacaggatccttcagcactgaggtgtttaagatttgcaactagcaatgcaattttttctaaatatggggatatttacctttattaagaaattatactaaacattgatgtccttgatcattttatgttctcatattacttttgattctactatgattgtgtggtggtgaacaaagatcattacaaacaaaaactgtaattttgttatatttgattcaatggaatttacctaaaaaataaagactaaaaatgtggtgtgaaaaaaaaaaaaaaaaaaaaaaaaaa

SEQ ID NO: 6460 - DNA, 2361 bp, Homo Sapiens
  NM_152942
cttgtgtggttgcagcaaggcaaagagtgtggggcgtctctgtgttccagggccagtgctcttctgggtgatcctggtgttggttgtggtggtcggctccagcgccttcctcctgtgccaccggagggcctgcaggaagcgaattcggcagaagctccacctgtgctacccggtccagacctcccagcccaagctagagcttgtggattccagacccaggaggagctcaacgcagctgaggagtggtgcgtcggtgacagaacccgtcgcggaagagcgagggttaatgagccagccactgatggagacctgccacagcgtgggggcagcctacctggagagcctgccgctgcaggatgccagcccggccgggggcccctcgtcccccagggaccttcctgagccccgggtgtccacggagcacaccaataacaagattgagaaaatctacatcatgaaggctgacaccgtgatcgtggggaccgtgaaggctgagctgccggagggccggggcctggcggggccagcagagcccgagttggaggaggagctggaggcggaccataccccccactaccccgagcaggagacagaaccgcctctgggcagctgcagcgatgtcatgctctcagtggaagaggaagggaaagaagaccccttgcccacagctgcctctggaaagtgaggcctgggctgggctggggctaggagggcagcagggtggcctctgggaggccaggatggcactgttggcaccgaggttgggggcagaggcccatctggcctgaactgaggctccagcatctagtggtggaccggccggtcactgcaggggtctggtggtctctgcttgcatccccaacttagctgtcccctgacccagagcctaggggatccggggcttgtacagaagagacagtccaaggggactggatcccagcagtgatgttggttgaggcagcaaacagatggcaggatgggcactgccgagaacagcattggtcccagagccctgggcatcagaccttaaccaccaggcccacagcccagcgagggagaggtcgtgaggccagctcccggggcccctgtaaccctactctcctctctccctggacctcagaggtgacacccattgggcccttccggcatgcccccagttactgtaaatgtggcccccagtgggcatggagccagtgcctgtggttgtttctccagagtcaaaagggaagtcgagggatggggcgtcgtcagctggcactgtctctgctgcagcggccacactgtactctgcactggtgtgagggcccctgcctggactgtgggaccctcctggtgctgcccaccttccctgtcctgtagccccctcggtgggcccagggcctagggcccaggatcaagtcactcatctcagaatgtccccaccaatccccgccacagcaggcgcctcgggtcccagatgtctgcagccctcagcagctgcagaccgcccctcaccaacccagagaacctgctttactttgcccagggacttcctccccatgtgaacatggggaacttcgggccctgcctggagtccttgaccgctctctgtgggccccacccactctgtcctgggaaatgaagaagcatcttccttaggtctgccctgcttgcaaatccactagcaccgaccccaccacctggttccggctctgcacgctttggggtgtggatgtcgagaggcaccacggcctcacccaggcatctgctttactctggaccataggaaacaagaccgtttggaggtttcatcaggattttgggtttttcacatttcacgctaaggagtagtggccctgacttccggtcggctggccagctgactccctagggccttcagacgtgtatgcaaatgagtgatggataaggatgagtcttggagttgcgggcagcctggagactcgtggacttaccgcctggaggcaggcccgggaaggctgctgtttactcatcgggcagccacgtgctctctggaggaagtgatagtttctgaaaccgctcagatgttttggggaaagttggagaagccgtggccttgcgagaggtggttacaccagaacctggacattggccagaagaagcttaagtgggcagacactgtttgcccagtgtttgtgcaaggatggagtgggtgtctctgcatcacccacagccgcagctgtaaggcacgctggaaggcacacgcctgccaggcagggcagtctggcgcccatgatgggagggattgacatgtttcaacaaaataatgcacttccttacctagtggcccttcacacaacttttgaatctctaaaaatccataaaatccttaaagaactgtaa

SEQ ID NO: 6461 - DNA, 1860 bp, Homo Sapiens
  NM_152945
cgagccggcaaaggcttgggtgtgagacagcagcggtggcagacaccgcagaagcaaagagcagtgaggctcctgcattcgggtggagcaccatggacgaagctggcagctctgcgagcggcgggggcttccgcccgggcgtggacagcctggacgaaccgcccaacagccgcatcttccttgtgatcagcaagtacacacctgagtcggtgctgagggagcgcttctcgccttttggcgacatccaggacatctgggtggtgcgggacaagcacaccaaggagtccaagggcattgctttcgtcaagttcgcccgcagctcacaggcctgcagggccatggaggagatgcatggccagtgcctcggccccaacgacaccaagcccatcaaggttttcattgctcagtcccgatcatctggaagtcaccgagatgttgaagatgaagaacttacaagaatctttgttatgataccaaagtcctacacagaagaagatctgcgggaaaaatttaaggtgtatggagatatcgagtattgcagcattattaagaataaagtgactggagaaagtaaaggtttgggctacgtacgatacttaaaaccatcacaagctgcccaagcaatagaaaactgtgatcgaagttttagagcaatcttggctgaacctaaaaataaagcatctgaatcctctgaacaagattattatagtaatatgaggcaagaagctttgggacatgaacctagagtaaatatgtttccatttgaacaacaatctgaattttcaagttttgacaagaatgatagccgaggccaggaagcaatctccaaacgcttgtcagttgtatcaagagttcctttcactgaagaacagcttttcagcatttttgatatagtaccaggattggaatattgtgaagttcaacgagatccttattcaaattatggtcatggagtggttcagtattttaatgtagcatcagctatttatgcaaaatacaaattacatggatttcagtaccctcctgggaaccgaataggtgtttccttcattgatgatggaagtaatgcaacagatctccttagaaaaatggcaacacagatggtagctgcacagcttgcatcaatggtgtggaataacccaagtcagcaacaatttatgcaatttggaggaagctctggatcacagttgcctcaaatccagacagatgttgtacttccatcatgcaaaaaaaaagctcctgctgaaactcctgtgaaagaaagactttttattgtgtttaatcctcatcctttacctttagacgtattagaagatatattctgtcgttttggtaacctgatcgaagtttaccttgtgtcaggaaaaaatgtggggtatgccaagtatgccgatagaataagtgctaatgatgccattgccactctacatggaaagattctgaatggggtgagacttaaagttatgctggcagattcgccaagagaagaatctaacaaacggcaaagaacttactgattcttgagaacaaagactaaataatgacataatcctcagctgactgactgaaaatgtgactggacgcattccctgtggacagttgacagctttttttttttccatatacctgatagtctgtgtacagcattgttttgtctgggaagcagggattgctgacatgtatttttgaatccatacattaatgctaaaacgaatatagtagttgttccttagagcaatatgttgttacgtgtagcagaaataaagttttctttgcttaactaaaaaaaaaaaaaaaaaaaaaaaaaaaaaaaaaaaaaaaaaaaaaaaaaaaaaaaaaaaaaaaaaaaaaaaaaaaaaa

SEQ ID NO: 6462 - DNA, 3148 bp, Homo Sapiens
  NM_152994
ccaccttcctcccaccccgggaacccggaagtggaggaggaggcgcggcggcggcggcggcggcggctgcggtggccaagcaggcagatactgcctgacccgttcccgggagcgtgtctgggtttgggggcgggagacaggctgagccgcctgggcggcctggcctgtacggggcgggggaggccatggcctcggctgagttgcaggggaagtaccagaagctggctcaggagtactcgaagcttcgggctcagaatcaggttctgaaaaaaggtgttgtggatgaacaagcaaattctgcagctttaaaggagcaactgaaaatgaaggatcagtcattgagaaaactacaacaggaaatggacagtttgacatttcgaaatctgcagcttgccaagagggtagaactacttcaagatgaactagctctaagtgaaccacgaggcaagaaaaacaagaaaagtggagaatcttcttctcagttgagtcaagagcagaagagtgtctttgatgaagatctgcaaaagaagatagaagagaatgaacggttgcatatacaattttttgaagctgatgagcagcacaagcatgtggaagcagagctgaggagtcgactggccactctggagacagaagcagcccagcaccaagctgtggttgacggtctcacccggaagtacatggaaaccattgagaagctgcagaacgacaaggctaaactagaagtgaaatctcagactctagaaaaggaagccaaggaatgtcgacttcgaacggaagaatgtcaattacagttaaagactcttcatgaagatttgtcaggtagattagaggaatccttatcaatcatcaatgaaaaagtaccttttaatgatacaaaatatagtcagtacaacgctctgaacgttccactccacaataggagacaccagctgaagatgcgagatattgctgggcaggccctggcttttgttcaggatcttgtgacggctcttctaaactttcatacctacacagaacagaggattcaaatttttcctgttgattctgccattgacactatatctccattgaatcagaagttctcacaataccttcatgaaaatgcgtcctatgtccgccctcttgaggaaggaatgcttcatttatttgaaagtatcactgaggatactgtgactgtcttggagacaactgtgaaattgaaaactttttcagaacacttaacctcctacatatgttttcttaggaagattcttccctatcagttaaaaagtttagaagaagaatgtgaatcctctctttgcacatctgcgttaagagccaggaatctagagctgtcccaggacatgaaaaaaatgacagctgtgtttgagaagctgcagacttacatagctcttcttgccttgccaagtacagagccagatggactccttcggacaaactacagttctgtgttaacaaatgttggtgctgctctgcatggatttcatgacgttatgaaagatatttccaaacattatagtcaaaaagctgcaatagagcatgaacttccaacagcaacacagaagctgataacaactaatgactgtatcctgtcatcagtagtggcattaacaaatggagcaggaaagattgcatccttcttcagcaacaatttggactacttcattgcttcactgagctatggacctaaggcagcgagtggattcattagtcctctttcagctgaatgcatgctacagtataagaaaaaagctgctgcctatatgaagtctttgagaaagcccctcttggagtctgtgccttatgaagaagcactggcaaaccgccgcatccttctcagctctactgaaagtcgagaaggccttgcacagcaagttcaacagagtttggaaaagatttctaaactggagcaggaaaaagaacattggatgttggaagcacaattagccaaaatcaagctagagaaagaaaaccagcgaattgcagataagctgaagaatacaggtagtgcccagctggttgggctggcccaggaaaatgctgctgtgtcaaatactgctggccaggatgaagccacagctaaggctgtgttggagcccattcagagcaccagtctagttccagatgtggaatctcgtgaagacttaattaaaaatcactacatggcaaggatagtggaacttacgtctcagttgcagctggctgacagtaagtcagtgcatttttatgccgagtgccgagcactgtctaaaagactggccttggctgaaaagtctaaggaagcattgacagaagaaatgaaacttgccagtcagaacatcagcagacttcaggatgagctgacaactaccaagaggagttacgaggatcagttaagtatgatgagtgaccacctgtgcagcatgaatgagacattatctaaacagagagaagagattgacacactaaagatgtccagtaaggggaattctaaaaagaacaagagtcgatagttttgaaatagctggttggcgactgttctttccagacctgctcctgctgcacagagccgcagggctgagaccacgtccatgctggctgccttcaggaagctaaagtattgttggacctagtaaactagtcagtgttggaaacggccttgaaatatttaaaacatatttgtaaccagtgaggcaaatacagaagttgatgtcggcagtaaatggaaaacaatacgtatgtcatggatattgtaggtttccttatgctgtttttactgtgcactttttaaaattaggttttaatttcagtatgtaagaacaaatattttgtatactttcaaactcaattatatggtaatcgatttggtatctatggaatagatatatgtttctggaaaaaaatgcttaaattgtcaaactgtcattacttcttattatagttgaaggcattctccagattctttttaaaagatttgttcatatttctctctctctctctctctctctctctctcttctttctctctgagggagagggagccctccaaacttcagatcctgtgggtttagtatcattatcttcagctctttgataccctgtgttagagtaatagctaaaggaagttcatgtcaataaattcatacttatatcacactttcaaaaaa

SEQ ID NO: 6463 - DNA, 3259 bp, Homo Sapiens
  NM_152996
ggggtctgtggcggcgcagcttacaccgcggtccccttatttggatctgcgggaatgtgggctggagaggtcctgccgtggtaccagcctccagcctgcccccaggactgcccctgacccaggcgcgcccgctgctcggtggcaggagggccggcggagcgccatggcctgcatcctgaagagaaagtctgtgattgctgtgagcttcatagcagcgttccttttcctgctggttgtgcgtcttgtaaatgaagtgaatttcccattgctactaaactgctttggacaacctggtacaaagtggataccattctcctacacatacaggcggccccttcgaactcactatggatacataaatgtgaagacacaagagcctttgcaactggactgtgacctttgtgccatagtgtcaaactcaggtcagatggttggccagaaggtgggaaatgagatagatcgatcctcctgcatttggagaatgaacaatgcccccaccaaaggttatgaagaagatgtcggccgcatgaccatgattcgagttgtgtcccataccagcgttcctcttttgctaaaaaaccctgattattttttcaaggaagcgaatactactatttatgttatttggggacctttccgcaatatgaggaaagatggcaatggcatcgtttacaacatgttgaaaaagacagttggtatctatccgaatgcccaaatatacgtgaccacagagaagcgcatgagttactgtgatggagtttttaagaaggaaactgggaaggacagagtccagtctggctcatatctcagcacagggtggtttaccttccttctggccatggacgcctgttatggcattcacgtctacgggatgataaatgacacctactgcaagacagaagggtatagaaaagtcccctaccattattatgaacaaggaagagatgagtgtgatgaatattttcttcatgaacatgccccatatgggggtcataggtttatcactgaaaagaaagtgtttgctaaatgggccaagaagcacaggataatatttacacatccaaactggacattgtcttgataatggttttcctgatcttgccgcatcacttaatgtgatccccatactgcaactgtgatgctgatgatgctaatggagatgatggtaatgataaagacaacaacaatgattatcaagttcctgtacactctcagatgtggatggtgactctgctagtaatttaaacttggcatttcatggaggatggttgtgctcatgatgttctttctggaggttcaacactacgtaccgcactttataatttaactggaattgagatgaaggccagtgacatgacaactgtgacctaagaaatgggaagattatctttcaagatagctgcctagaattgttcaacagtgagtaacttccagaagccaaaagagtttggcttcatgaggcaaggtgattgactcaatggcttgttgaatctcagcagttccgccatcttgaagaatgattgattgtcaaacactgacccaagaactgctatcagggtgcaagtatcttactacttagcctaaggatgggaaaatatctcttcctaatataccatctttctacagtatttcctacagctaaagcctcaggccattgcctaattaacaatgaagatttcatggacatcctacacttcaggattacttgactatctcaaacacataaatcaaaatgggccaagtagcaaatcttgatgaatttccactcttaccatccattcttactaccaacagtataactgaacatgtgattagaatgatctatattaatgtttagttatttttggttgagtgctaaatatttcagaaggctacttaacatgtaagataccaacttcaacactgtaataacatatactgtgaaaacattcctaaaaagtaaccaaagggtttgctaactctgcttcaacatccaacaacacaaaactatatgatttttaaaatcatgaaatagagacagcaaagcatatttttacatcaatttgtatcctatcatacttcataatatatatttgtatattcaaatttctattttataggcccaaggtgtgtttctccaaacattacattctcattgccaagtgccagctgttacacatggagaggaaatgattccttatattaaacctgaccagagctttttgccttctagggatttatttttcccatagtgtatcagttgttatgccacaataacaacaataataatgttcttaatgtccaaagtgctttgtcatttagagtcctttaacatctgttataccatgtgatgcccttgaacaccccattgggctattgtctgtgtattctgctctctttagcagatgatctgtaatttggtcattgttctgttatattccagattgctctacttgctaatatttgtatagaatagaatttatgtaaactagtaaccagttgatctctgtgccaaatacattatatcaggattacacaaaaagtatcacaaaggatggtcttggccatatgctagggcccctgtgaaaataagtagttttgagaagtttttctatatacgtatatatacacgtgtggttctatttaggtggggaaaaaatgaaaaagcagggacaacaggaggaaatgaaggcagagaaatatagtttcctttcctaggattgagacaattctatttttcatatactcgttgctcattaaatagtaaagggttgatttgctgcaagagtagctgagaattcaaaaacatccttgcagaatgattcaaaagacaaaagccaggctcaacttatagaatgttttggaaactggaagtaatgatacatttcacttcagaagcacttgtaggtctttactagtgctaagtattatggtgagctatcattaaagtgtgccatcttggataaaggccttttgcctactctcttctgcaattttgacacctcaatattcacacccataaacattactaagccccagttctatcgttggaaggagttgttattcttttgttgttcccttatgcaatttttaattctatgaatgttaagtttttttgagctaatgatagatagaaatgcccactcaaagaaaaataaacagagacaaatgttaaaattgccatacagactgtttttccccctgttgtttcactttaaaataaaaagaaatccttgattaatcagaatggcttgggacatgaacttaatttatttagttt

SEQ ID NO: 6464 - DNA, 5011 bp, Homo Sapiens
  NM_153018
aagtggccgatgcccgtcgccagtgacaccgggacaacagctgcgggctctgtgcgagcggcccagcagcgcggagcctcagcggagtgagcgagcgcggggcagtagcggcctgcgattgtgagatggggactgagaacaaggaggtgattcccaaggaagaaatttctgaagaatctgagccacatgggtcattattagaaaaatttccaaaagtggtttaccaaggtcatgagtttggagcaggatgtgaagaagacatgttggagggacattcgagagagtccatggaagaggttatagagcagatgtctcctcaggagagagactttccatcagggttgatgatctttaagaaatcaccctcaagtgagaaagaccgggagaataatgagagtgagagaggctgcagtcccagcccaaatctggttacacatcagggagatacaacagagggagttagtgcatttgctacctctggccaaaacttcctagagattttagaatctaacaaaacacagagaagttctgtgggagaaaagcctcatacatgtaaagaatgtgggaaagcctttaatcagaactcacatctcatccagcatatgagagttcatagtggagaaaaaccctttgaatgtaaagaatgtggaaagacatttggaactaattcaagccttcgacggcacctgagaattcatgctggagaaaaaccctttgcttgtaatgaatgtggaaaggccttcattcagagttcacaccttattcaccatcatagaattcatactggagagagaccctataaatgtgaagaatgtggtaaagccttcagtcaaaattcagcccttattctacaccagagaatccatactggagagaaaccatatgaatgtaatgaatgtgggaagacctttagggttagttcacagcttattcagcatcagagaattcatactgaagaaagataccatgaatgcaatgagtgtggcaaagccttcaagcatagctcaggccttattagacaccagaaaattcatactggagaaaaaccatatctgtgtaatgaatgtgggaagggcttcgggcagagttctgagcttatccggcatcagagaattcatacaggggacaaaccctatgaatgtaatgaatgtgggaaaacttttggccagaactcagagattattagacatattagaattcatactggtgagaagccctatgtatgtaaggaatgtgggaaggccttcagggggaactcagaacttcttagacatgagagaattcacactggagagaaaccctatgaatgctttgagtgtggaaaggctttcaggcggacctctcaccttattgtccaccagagaattcatactggagagaaaccccatcaatgtaatgagtgtgcaagaaccttttgggataattctgagctgcttctccaccagaaaattcatattggagagaaaccttatgaatgtagcgagtgtgagaaaacatttagccagcattcccaacttatcatacatcagagaattcacactggagagaagccttatgagtgccaagaatgtcagaagacttttagtcggagctctcacctcctccgacatcaaagtgttcactgtatggagtaatctgcaaaataggaaagcttttagtggaaaagctaaagtccaacttattcatttgttcataatatgcaaatatgcaccccaagtattcaaatccaatgaatggacagaacctcctctgtcctcccactgattttaaatagttggttgaagaagatgaggcacttttttttttttttttttaagcattggggtcttgctctgttgcccaggatgggatgcagtggcacagtcgtaactcactgcttccttgaactcctgggctcaaacagtcctcctgcctcagccttccaaatagctaggactgcaggcactaatgaggcacttttatgaattattcattgagaggtttcagtgtgctaagttaaatcataaaagctctttcaggccttaatttcccctctgtccttccttccccttctcctcccccagtggatcacataacaaacattaagggtctgtaccagccatctttcctaaattactcttcagcaaaattgtgggaacaggattccaccacctcctaagaatgagagttgactcattgactgttaccccctgaaatattagaaagtcataatttagaagacacacctcattctcctgtccactgtttagcattggaataatttagtaagctgttattagcttcaaagtcgtccagccctgctatgaagttactttagaagatggcagcattaatgaagaagcaggctcatttcacatctgtcaggcttccttattcatctgaagaggctgccatgatggaggaactgacaggcaatttacaacgggattataagtgaaggccttagaatccagaggggccgattaggcaacaccaggggataaacaattgaggtcacactgctcggcatgggcagaagcagctcttcaggagctgtccacacttcaggggtgctcagactgactgctcctaagaattctgctgcatatatttttagccccatctcctgccactgctgacagatattgtgacagtaagtagcagacaggactgtggcttcacctcctccgggcacctggctacagtgatgagtcagttcacctgatgacaaaccagggtctggccttgccaaagcacttaagttctcatgacctggaccgcactggaggccctggctaagtcaggatgtcgtagcctcttcttggttttgccccttggccttgaaattcttttttcttgaataactttaaaaaaatagagataaagtcttgctatgttgcccaggctggtcttgaatgcctgggctccagcaatctttttgcctcaacttcccaaagtattgagattacaggtgtgagctaccatgcccggccttgaaattctttcttcgctatgtctgcatgttttttgtgttctgtatttatttcttctccaaggaaacagcctacattttccatgtgtccatgtttctgaggccgtgggtgacagtgggaattgcactaatgggggcccaacaggcctgggggctggtcttagcgctagaccttgaacaaggcacttcacctgctggtctccaattttctcctctgtaaaatgaaagagttgaactaagtgatctcaaaagtttcaaccagcccgataattccttaattctttaaaaatttaactttatatatctttattattctttaacctcatctttgttacactaatattagtcactaatatttattgagtgtttactacctgacaggcagagtgccagtttacattttaattttcacatcatttctatgatgtgggtactcatttttttaaagctttatgaaggtataatttacgtactataaaattcacctgttttaagtgttcagttgaatgatttttaatttacatagtggtgcaaccatcaatgatgtgggtattcttaccccaatttaaaagataagaaggggcagtgttaagtaattgacccatgattccacagctagtaagagcgacagccaagactccaaacctggttgatgctcttaaccactgtgctatgccgcaggtaggcagattcattactgccttatctgaaaccctttgcacagtttctattactgatttctatgtagatttgaatataacaaatttaaatcatgtccttggtaacagaactgatcacagccaaaaaaaattcaccaaatgggtttattctgtactccaatataggtgtcttcccaggtttatatccttggcttgagaaaagggttgtacaaatagatgattgcagagtttccacatccttccagatacctctgcctctagcagtcacactcttagtaagggaagttgtttgatttacttcttcccttaggttgattacaagtgaagtgcgccgtcttattcctttttcattgctggagcacaaattgaattgtgcccagaccgtatctttctcacatgaaacctggatctcacctatcccttccatgcctgattcccgtgtttgcatattttatttccacatttacctcttgtcagccctgacagagaatttggcaccccttcaagcttctcctaaacaatctatgcacacaaacacccctgagcaatatggacttcactgaagatagtgtgtaagcaaaggagaagagttcacattgtgcatcctattagacattttgttctcagaagtaccttactggccaaaccaatgaaggttttcctcttgtcctcccctctcaaggctcagtcacctcaacttctttttgcctactagatatccaatccatcacctcgcctcccctggccctagctcaattaccctcttaaacccattcctgctcagcaaaacttcctctagttcaccattcattcatttgaacattaggaggcaatttagtgacctgttgtacctgaccatgttcttaagggggaggtctcacgtctcattcccagaaaagtctaccatatatagatacatattccccgccccgccccagatttctggtgaatgaaatcacttgtatcttattaggtacatatacgcaaatccttaacctcaattctctgtcctcttcatgtcttacccagatatctcaggaagatttctcttttccttctgtttgcctccctcttcgacttacttgggagtcagcatctgaccacagtcgtgactggtaatgatgatttgtgcaaatactatcaaggaaaggacatgaattgtcttaattttagacccattaaaaaaccgcacaggcctcaatcttaaaagtcctatctaaatacccagaaatacccttcagaatttttgaagctatgcccatgtacaaaattttcttccttccctaattttaatggtatactaacaccttaggtaaataaaatatttctttactattttattgaaaaaaaaaaaaaaaaa

SEQ ID NO: 6465 - DNA, 5148 bp, Homo Sapiens
  NM_153021
ggagcagctcttccagaggcccgagtcacctggagcattctggcatggggctgcggccaggcattttcctcctggagctgctgctgcttctggggcaagggacccctcagatccatacctctcctagaaagagtacattggaagggcagctatggccagagaccctgaagaattctccattcccatgcaacccaaataaattaggagtgaatatgccttctaaatcagttcactctctgaagccttctgatattaaatttgtggcagccattggcaatctggaaattcctccagacccagggacgggcgatctggagaagcaagactggactgaaaggccacagcaggtgtgcatgggagtgatgacagtcctttcagacatcatcagatatttcagtccttctgttccaatgcctgtgtgccacactggaaagagagtcataccccacgatggtgctgaagacttgtggattcaggctcaagaactggtgagaaacatgaaagagaacctgcaacttgactttcaatttgactggaagctcatcaatgtgttcttcagtaatgcaagccagtgttacctgtgcccctctgctcaacagaatgggcttgcggcgggcggcgtggatgagctgatgggggtgctggactacctgcagcaggaggtccccagagcatttgtaaacctggtggacctctctgaggttgcagaggtctctcgtcagtatcacggcacttggctcagccctgcaccagagccctgtaattgctcagaggagaccacccggctggccaaggtggtgatgcagtggtcttatcaggaagcctggaacagcctcctggcctccagcaggtacagtgagcaggagtccttcaccgtggttttccagcctttcttctatgagaccaccccatctctacactcggaggacccccgactccaggattctaccacgctggcctggcatctctggaataggatgatggagccagcaggagagaaagatgagccattgagtgtaaaacacgggaggccaatgaagtgtccctctcaggagagcccctatctgttcagctacagaaacagcaactacctgaccagactgcagaaaccccaagacaagcttgaggtaagagaaggagcggaaatcagatgtcctgacaaagacccctccgatacggttcccacctcagttcataggctgaagccggctgacatcaacgtaattggagccctgggtgactctctcacggcaggcaatggggccgggtccacacctgggaacgtcttggacgtcttgactcagtaccgaggcctgtcctggagcgtcggcggagatgagaacatcggcaccgttaccaccctggcgaacatcctccgggaattcaacccttccctgaagggcttctctgttggcactgggaaagaaaccagtcctaatgccttcttaaaccaggctgtggcaggaggccgagctgaggatctacctgtccaggccaggaggctggtggacctgatgaagaatgacacgaggatacactttcaggaagactggaagataataaccctgtttataggcggcaatgacctctgtgatttctgcaatgatctggtccactattctccccagaacttcacagacaacattggaaaggccctggacatcctccatgctgaggttcctcgggcatttgtgaacctggtgacggtgcttgagatcgtcaacctgagggagctgtaccaggagaaaaaagtctactgcccaaggatgatcctcaggtctctgtgtccctgtgtcctgaagtttgatgataactcaacagaacttgctaccctcatcgaattcaacaagaagtttcaggagaagacccaccaactgattgagagtgggcgatatgacacaagggaagattttactgtggttgtgcagccgttctttgaaaacgtggacatgccaaagacctcggaaggattgcctgacaactctttcttcgctcctgactgtttccacttcagcagcaagtctcactcccgagcagccagtgctctctggaacaatatgctggagcctgttggccagaagacgactcgtcataagtttgaaaacaagatcaatatcacatgtccgaaccaggtccagccgtttctgaggacctacaagaacagcatgcagggtcatgggacctggctgccatgcagggacagagccccttctgccttgcaccctacctcagtgcatgccctgagacctgcagacatccaagttgtggctgctctgggggattctctgaccgctggcaatggaattggctccaaaccagacgacctccccgatgtcaccacacagtatcggggactgtcatacagtgcaggaggggacggctccctggagaatgtgaccaccttacctaatatccttcgggagtttaacagaaacctcacaggctacgccgtgggcacgggtgatgccaatgacacgaatgcattcctcaatcaagctgttcccggagcaaaggctgaggatcttatgagccaagtccaaactctgatgcagaagatgaaagatgatcatagagtaaatttccatgaagactggaaggtcatcacagtgctgatcggaggcagcgatttatgtgactactgcacagattcgaatctgtattctgcagccaactttgttcaccatctccgcaatgccttggacgtcctgcatagagaggtgcccagagtcctggtcaacctcgtggacttcctgaaccccactatcatgcggcaggtgttcctgggaaacccagacaagtgcccagtgcagcaggccagcgttttgtgtaactgcgttctgaccctgcgggagaactcccaagagctagccaggctggaggccttcagccgagcctaccggagcagcatgcgcgagctggtggggtcaggccgctatgacacgcaggaggacttctctgtggtgctgcagcccttcttccagaacatccagctccctgtcctggcggatgggctcccagatacgtccttctttgccccagactgcatccacccaaatcagaaattccactcccagctggccagagccctttggaccaatatgcttgaaccacttggaagcaaaacagagaccctggacctgagagcagagatgcccatcacctgtcccactcagaatgagcccttcctgagaacccctcggaatagtaactacacgtaccccatcaagccagccattgagaactggggcagtgacttcctgtgtacagagtggaaggcttccaatagtgttccaacctctgtccaccagctccgaccagcagacatcaaagtggtggccgccctgggtgactctctgactacagcagtgggagctcgaccaaacaactccagtgacctacccacatcttggaggggactctcttggagcattggaggggatgggaacttggagactcacaccacactgcccaacattctgaagaagttcaacccttacctccttggcttctctaccagcacctgggaggggacagcaggactaaatgtggcagcggaaggggccagagctagggacatgccagcccaggcctgggacctggtagagcgaatgaaaaacagccccgacatcaacctggagaaagactggaagctggtcacactcttcattggggtcaacgacttgtgtcattactgtgagaatccggaggcccacttggccacggaatatgttcagcacatccaacaggccctggacatcctctctgaggagctcccaagggctttcgtcaacgtggtggaggtcatggagctggctagcctgtaccagggccaaggcgggaaatgtgccatgctggcagctcagaacaactgcacttgcctcagacactcgcaaagctccctggagaagcaagaactgaagaaagtgaactggaacctccagcatggcatctccagtttctcctactggcaccaatacacacagcgtgaggactttgcggttgtggtgcagcctttcttccaaaacacactcaccccactgaacgagagaggggacactgacctcaccttcttctccgaggactgttttcacttctcagaccgcgggcatgccgagatggccatcgcactctggaacaacatgctggaaccagtgggccgcaagactacctccaacaacttcacccacagccgagccaaactcaagtgcccctctcctgagagcccttacctctacaccctgcggaacagccgattgctcccagaccaggctgaagaagcccccgaggtgctctactgggctgtcccagtggcagcgggagtcggccttgtggtgggcatcatcgggacagtggtctggaggtgcaggagaggtggccggagggaagatcctccaatgagcctgcgcactgtggccctctaggcccgggggtgggtcctcaccctaaactccctatagccactctcttcaccgccctctgccccagccactcccggccaccaggacatgcttcaatgcctggtgccataggaagcccaggggacagtcacaacttcttggggcctgggcttcttccaggcctatgctcctggaatggatacatttaaataaagtccaaagctattttattcctgggtttgcctgcgtgaagcactcaccttccatctcttgtgcagcccaggtgtgggagctgccactttttgtggcctgcctccagcagggctgcccaagccacgaccaaccagagcccaaactgcctgccaccacgagcatatcctcaagtcaccaaacccactatttcaaaggcagaaaaaatgctggtcaccaggtggtggctggaattttggagctggctggttgccattcagtccaatccaacacatacctattaagcaactgttttgtatccaggacaatgcgaagcactgaggtgcctcctaggctgtgcatgtcgcagcctggcagagaggtcaaactccttcaataaccaagaagccacgtgatgatgtgtaactactagggcatcagtaggtaaatgtgtctgattgttttaaagaatagaaagggttcttcggggaaagtttcttgggggagagcaaccttcacatgtcattttgggaaaaggaataaaaaatgattgggacacaaa

SEQ ID NO: 6466 - DNA, 4321 bp, Homo Sapiens
  NM_153026
agcgcgcggctccggagcccgagcgcactccgcctgcagcccagctgccagcgccgtctcccgcggccgccgccgcccgacagcgcgcccggaacatgccagcctcgcgcagcctgcgctgacttccccgagacgcgccgcggtcggcacggagactttctgggctctggatggttcgtgcgctgctcaccctcgcccacccctgacgccgcggaccgcagctcctcagccccgcagccccgcagcccagcagccccgcagcggcgccgaggacagtgcagccgagttgcgtctccctcgcgcgagcagccattgtttgatgtcctgtgactgagaaaccaggctttaaactttatgcctttggagatggagcccaagatgagcaaactggcctttggctgtcagagaagttccacatcagatgatgactctggctgtgcattggaggagtacgcctgggtccccccgggcctgagaccagagcagatccagctctattttgcttgcttaccagaggaaaaagttccttacgttaacagccccggagagaagcatcggattaaacagcttttgtaccagttaccaccacatgataatgaggtacggtattgccagtctttgagtgaagaggagaaaaaagagttgcaggtgttcagtgctcagcggaagaaagaagcactgggaagaggaacaattaagcttctgtccagagcagtcatgcatgctgtgtgtgagcagtgtggtttgaagataaatggaggtgaagttgcagtgttcgcctcccgtgcgggccctggtgtgtgctggcacccatcctgttttgtctgtttcacgtgtaatgagctgctggtcgacctcatctatttttatcaggatggaaaaattcactgtggcaggcaccatgcagaactgctcaaaccacggtgctcagcatgtgacgagataatttttgctgatgagtgcacagaagctgagggtcgccattggcacatgaaacacttctgctgccttgagtgtgaaacggtcctgggaggacagaggtatatcatgaaggacggccgccccttctgctgtggctgttttgagtctctctatgcggagtactgtgaaacctgtggggaacatattggtgtggaccatgcacagatgacctatgacgggcagcactggcacgccacggaagcctgcttttcttgtgcccagtgtaaagcctctttgttgggatgtcccttccttcccaaacagggtcagatttactgctcaaaaacgtgcagtcttggtgaagacgtccatgcctctgattcttccgactctgcatttcagtcagctcgatcaagagactcccgaagaagtgtccgaatgggcaagagcagccggtcagcagatcagtgtagacagtctctcctcttatcgcctgctctgaactacaagtttcctggcctctcaggcaatgctgatgacaccctttctcgaaaattggatgatctgagtctctccagacaaggaacaagttttgccagtgaagaattttggaaaggcagagtagagcaggaaactccagaagaccctgaagaatgggctgatcatgaagattatatgacgcagctcctcctcaagtttggtgataaaagcctctttcagccacagcccaatgagatggatattcgagccagtgagcactggatatctgataacatggttaaaagtaagaccgagttaaagcaaaataaccagagccttgcaagtaaaaaataccagtctgatatgtactgggcacagtcacaagatggactgggcgattctgcttatggcagccacccaggccctgcaagcagtagaaggcttcaggaattggaactggaccatggggcttcagggtataatcatgatgaaacacagtggtatgaagattccctggagtgtctgtcagacctgaaaccagagcaaagtgttcgggattcgatggattctttggcattgtccaatatcacaggggcttcggtggatggagaaaacaagccaaggccatcattgtattctctgcaaaattttgaggagatggaaacagaagattgtgagaagatgagcaatatgggaactttgaactcttccatgctgcacaggagtgcagagtccttaaagagtctaagttcagagttgtgtccagagaaaatcctgcctgaagagaagccagtacatctgccagtgctcagaaggtccaagtctcaatccagaccccagcaggtcaagttttctgatgatgtcattgacaatgggaactatgacattgaaatccggcagcctccgatgagtgaaaggactcggagacgcgtctacaattttgaagagaggggatccaggtctcatcaccaccgccgccggagaagtagaaagtcccgctccgacaatgccctgaatcttgttacagaaagaaaatactctcccaaggacagactgcggctgtacacccccgataactatgagaaatttatacagaataaaagtgcccgggagatccaagcatacatccagaatgctgatctctacggacagtacgcccatgccacttccgattatggcctgcagaacccaggaatgaatcggtttctgggactctacggcgaggatgatgattcctggtgttcttcctcctcctcctcttccgactcggaagaagaaggatattttcttggacaaccaatccctcaaccccggccacagagatttgcctactatacagatgacctttctagtccaccatctgcacttcccacccctcagtttggtcagaggacaacaaaatccaagaagaaaaagggacacaagggcaaaaattgtattatttcttaaccaagtagtgatgcagagcatttgtttaaaacttagccattaaccgtctgaatcgtttccttttcttccgtaggaaagttgtgaaaatagtttaaagtgctttctttgcccatgtaaatgagaactcaactgctgtttacagtgtcagattaacatttgaaaggtgtgatttctccaatttaccctctttggatggtgccaggtggacgtgacatctcgtgcctgtccggtgcgggtgcgttacagatggacgtagctgctttggttttccagtcctcaagggaatactgaagatgctgactgaaggggattggatgttgattttagaagatggagaactccagccacctttgtaaagcactagtgtttgtcatttatgtaagtcaggtcggctcaggtcttgatagtccgtcttggtgtgaggcatgcctgtcacgatgacctagctaacactgtgcatcttattgtgaggccagcttgtcccctcgaaccctctttggccaggtaaacattgtattgtatcagcgccagctacagattgaaaaaaaaaaacaaaaaacattgctatttataacttagtatttcatagacttaagtgtattcctaatttaacggtgcaaatattaatgtatatactgtacagttcagattttaaagctgatatttttatatccctgaattgtaagccgtttgttacgctgcagtgctagatttgccagggaaccagaatttatggatgaactgattgcttatattttagtcagggtttataaatgtagatggtcaaatttacattgcctagtgatggaaaattcaactttttttgatttttttttccaatattaaaaaaggctctgtatgcatggtggggctatgtaagtactctttaaaactatggccctattaatcttacaagtgttacttatgggtcaagcaatgtaaactgtataaatgtaaaaacaacccctccacacacataacccctggaatatatggtaaaaacaagtagaagctgtttcagcgagtgggttttttccccctgcctgcggggggtgcctttctcattttcagcaaggtgatgattatctcatgggaaatgacaaagatctgcttttgtggcagaggactttgtagatttgttattttaagagaggttattcctttttattccttccctcccactaatttgttggcctttaacagcaattttgaaaactgggtcttctggttatgtttttgttttaaaatctttaaattagaggatgctgtgccattgagtactgtaagttaatatgaggttctggttcaaggaaaacttacgttggatctgaaccaatgagcagatattttgatatgtgccactcttgcatatacatctcagtcctaactaaaggttctagtggcatccaggacctttagggaggcatttaataaacacttaataaataacaaaactacctttctgaatata

SEQ ID NO: 6467 - DNA, 2141 bp, Homo Sapiens
  NM_153028
gcgccttagccagagggcgggcctgcgccaccctcggaaagcgtcacttccacttccggccggcgctctggctctgtacctggacagggctgcggtaggccagcggtgggctggcggttgcgctcctcagatcggcggcctttcgggcggtggcttgcgtttgagcctcagaaagcgaggagcggcctccacggaagccaagctggccgaggttgcagtccatgagctgggaaaggaggcagtgctcttgggagaaacagcagaggcctcaagtttcgggctgaagccaacagagtcccaaccagtgggcgtatcccaagatgaagaattttggaatacatacgagggtctgcaagaacagctcagcaggaatactcataaagagactgagcctgtgtatgagagggctgtgcctactcaacagattctagcttttcctgagcaaacaaacaccaaagactggacagtgacacctgagcacgtcttgcctgagtcccagagcttgttgacatttgaagaagtggccatgtatttttcccaggaagaatgggagttattggatcccactcagaaggccctctacaatgatgtaatgcaggaaaactatgagactgtcatctctctagcattgtttgtgctccccaaacctaaagtgatctcctgtctagagcaaggggaagagccatgggttcaagtatccccggagtttaaggatagtgccggaaaatctcctacagggttaaagctcaaaaacgacactgaaaatcatcagcctgtgtctctttctgacttagaaatacaagcatcagcaggcgtcatatcaaaaaaggccaaagtaaaagttccccagaaaacagcaggcaaagaaaatcattttgatatgcacagagtgggaaaatggcaccaagattttccagtgaagaaaagaaagaaactttcaacctggaaacaagagctgctcaaacttatggatcgtcacaagaaagattgtgcaagagagaagccttttaaatgtcaggaatgtgggaaaaccttcagagttagctctgaccttattaagcaccaaagaattcacactgaagagaaaccctataaatgtcaacagtgtgataagaggtttagatggagttcagatcttaataagcacttaacaacacaccaaggaataaaaccatataaatgttcatggtgtgggaaaagcttcagtcaaaatacaaatttacatacacaccaaagaactcatacaggagaaaagcccttcacatgtcatgaatgtggaaaaaaattcagtcagaactcccaccttattaaacaccggagaacccacacaggtgagcagccatatacttgtagcatatgcaggagaaacttcagcaggcggtcaagccttcttagacaccagaaactccacctgtgaagagaagcttgtccagtgtcctcattctgaagacattcaccaaatggagcttggcactaaaatttatgtaaaagaaaaatcacaaaccttgaaaaattttacatcagaaaatgggataaacatacatttcacagaaaataatcaagacttgctctgcagccactcagtagtcttctgtggtcacagaagtaaacattgttggctttgtattgatctctccagtcatttttgaacacatccaatagaaacattggcagcatggtcttccaaaacaaaaagcagtaacatgcatgtttaattgcataccattctcttcacagtagcaggcttaccaatttccatagtctcatgaggccgaaatgaattacaatgtaaagtgttccaggaaccaaattggattttctttcttttgtcattggacacggtttgcaaagttggacatcacttgagttccttcttaaacttttcggcaacttctcttggatcctgttatcacagttttttactgtgatgaaatcttgttaaccaccactagggaatctccagatgaactattaatgcactgtcttatgcctctcattggtgatgtttggaaaatagaagacatctctaatggaatcatgggggaaacgggttggaatttgtagccatggaatatatattagatgtaaagaattttctgcaataaaagaaactagacttgttaaaaaaaaaaaaaaaaaaa

SEQ ID NO: 6468 - DNA, 1929 bp, Homo Sapiens
  NM_153044
ataacgggcgttaataaccataccctgttagactaagcatggtccacccgcgaatcctctacagagatggccaagcgctggggtcgtggctgcgtcctctaggccagccttgtgcaaaggaccttctcaccacagatcagccagaccatcttcctccttccaagtcatcaaagagttccaagctggtcacctgtcccttgatgttcccaggaaaccaggaaagaggacccctgcattttatcttcccatccagagtggcaggatctctgcctgggaaacaggcttcattcagcacagctgtggtagcattaacaaagcaaagtgggcacatgtagaagttgaagctaaaacattcaagaactccagtctgtttctgtggatgttaagggggtgaagataaaacaatggaggtgatgaggaggaataacttgaagacagtttaaagccacagtgatacaaagaatgaagagaaggaaggtgctggattttactaagaaaacagactgagttcaggagtctcaccagtagaactttatagtattgcgtttcgattacatgtgtgtgaattttaaaaactgattaccctccagtaaaaatgtggaaccaatttgcatttggattaaaacattaggtttggggacaaaagtggaccccatgctgcctgagatgaagagagagagcaggatggcagaggaatcaccagctcaagaaaccccaagacttggacagtcttccagcagaagaggccagggtctctcagtgtactactccaaacaggcctctcctagagatgtagtctgggaaggtccaaaacccaccagacaggcacatccagtggggaaaagacttcccattccagtgtggcctgcatccctcacctctgcttcccagtcttctgctgacctcagaggagcagggtggccattgctgatctgggttagggagatgccagaaacacacccaggtttgaaccacaggttagtggtacaaagtcacagtccttgtgccttcagaaaacccagaggccccaaatacgagtgggaagagagttgggaaaaactgaaccagactcttccaatggccattaaagagaaaattcagcaacgcttgcctttgtctttgaccctgagaagttaagggacacagattgtggcgccgtgatggaacatggagggaaggcatggtgtgcttcctgcagagatgcctctggagtccctgtggccacgggatctcactggccccctcttcaggcaccttgatggggctcagtggggccaggccaaagggtggaagtagaaaagcatcaacaggctgtccagatcaattggcaccatccaaggccctgctgcacccacacatggaggtcaccagctcagccccaggggttctttcacacacaagctccttccctaaggagtcctgtggggttccacactcagtgtgctgcccaagtcagagatttaccacagatctgtctccccctcaacctggactcaagttactgtggtgagaaacctcactgtccatggttaactgaagaaatccctccttcagaaagaacttgagtagtagatgaggtggttagacaggatctttttccctcaagctgtttggacgccacagccaggaccaactctgacagctgcgagagagagagcccctccaatgtggaacctcctacacagccccccttttgggtccctggatatgagcccccagcaggaccaccactctagggggaagtctccctcccatccctcagatccccacattgttcctcctgtaggagaaaagtcagccctgcccctggagcttctccaagatggcactggactcgccgttatcttgaggagccaggagctgaaatggctccggcttagcaacccagtatggccaaagtggaaaggttctctgtcctttgcagtcacc

SEQ ID NO: 6469 - DNA, 4413 bp, Homo Sapiens
  NM_153045
gtgaaggcggcgcagcgcggcgcgggaggcgtgctgggcgcggggctgcggtgcccagaggctgcggcattaggggctcggcgcccccgaccttccgcgtcccggggtggcggcggcggcggcggcggcggcgcgggcggcatatgatgctgagctggctgctccagaatgaaccacagctctgagaaggggaagtagaaacagctggcgccctgccatggcctgtgaaccacaggtggacccgggggccactggcccattgcccccctcctcccctggctggagtgccctgcctggagggagccctcctggctgggggcaagagctccacaatggccaggtcctcactgttctccggattgacaatacctgtgcacccatctccttcgacctgggagccgcagaagagcaactgcaaacttggggcatccaggtcccggctgaccagtacaggagcttggctgagagtgccctcttggagccccaagtgagaagatatatcatctacaactcgaggcctatgcggctggcctttgctgtggttttctatgtggtggtgtgggccaatatctactctaccagtcagatgtttgccttggggaaccactgggctggcatgctgctcgtgaccctggccgcggtgagcctgaccttgactcttgtgctggtctttgaaagacaccagaagaaggccaacaccaacacggacctgaggctggcagctgccaatggagccctcctgagacaccgggtgctgctgggggtgacagacacagtggaaggatgccagagtgtgattcagctttggtttgtctacttcgacctggagaactgtgtgcagtttttgtctgatcatgttcaagaaatgaagactagccaagagtccttgctgagaagcagattgagccagttgtgtgttgtcatggagactggggtgagccctgcaacagcggaggggcctgagaacttggaggatgctcctctcctgcccggcaattcttgtcctaacgagaggccactcatgcagactgagcttcatcagcttgttcctgaggctgagccggaggaaatggcccgccagctgctggcagtgtttggcggctactacatccggcttctagtgacctcccagctccctcaggcaatggggacacgacacacgaactctccgagaattccatgcccctgccagctcatagaagcctacatcctaggcacagggtgctgcccgttcctggcgaggtgacctagggatgaaggtactcatcttccttcaagactgagcagtcaggaaggcttcaggagcccaagatggccaatggggagccccaggtgaggagagaagcatctgggggcactccaaaaggggcctgtgatgtcagccactggggtgttgtgctcacttcagggcccagcacaaaaatccttgtttgacatctcatgctgaccccctggcctttgcagaagctgatggttacagagctagtcccaccaaagctactctctctgctgcttagaactgtggacacgtatggaaagactggacccccattgctttcattgttcagagaacccaggagacatgaagatgaccagactgggcaaattatgtgtccaaaacttggcctcagatgatgtttccatctccaaccccttcatgccagatggggaaactgaggctcagagaggatactgctctatgtggcattgccttgaacccctaaaattatcagacttcctttttccaatataaagaaaaaaagtaagttttcagaattctctcaatttttaagtttttctcccccatattttgtgaaaagcagtggtatgtgtacgtgttgtctaccagtacacaggctgcagaagacagagacagaagaaagagatcaagggcagataactgttgataggaatatttgagaaagattgatcctgtttgacttgaggacttattttgttcacaggcatgcacgcttgtggttgtggttttatattacagatgtagaacaatggttatgtttcccgacatgaacattgtcctggaatgaagtgtgatcagccacttgtggaattctttgaagagctcagaggcttccaagtgatctgctcctgaacaagtttgaagacctattgtttcatagacccaagaccaaacgcatctaaaggatccccagcccccaagacctagcctttgtctgcgattttggcttcatctcccacaaaacccctttatgagttcacgctctttcctggactgacatacctattcctttccatttgttggactcctattcatgcttcaaagtccagctttcttaagcccttctttaggaagccttcccacacagccaaccctgctgctctctgcctcctttaaattcttgatacagctgctgcttgttctgatgttttatggtattgattctgttttcctgtgtatatgccagtttttctagctagactgtaaactccttaaggacagagactacaccttgtactttttgtgcatgacctggacctgctaaggaaaaaaaaatcttgtggattgattgctttgccatccccacagcagcttttgcaaattgctttccaaactcacttgaatgatgacattgctgtggacctgggttctggacctgatctgccacttcaagctgtgtaatttttggcaagttgctttctttgcctggtcctcagtttgcccatcaatataatgggtggattggatgatttttttttttttaattgagatggagtcttgcactgtcacccaggctggagtgcagtggcgcgatcttggctcactgcaacccccgccacctaggttcaagtgattctcatgcctcagcctcccaagtagctgggactacaggtgtgcaccactactcctggatatttttttgtgtttttagtagagatggggtttcgccatgttggccaagctggtcttgaactcctgacctcaggtgatccacccgcctcgggctcccaaagtgctgggattacagacgtgaggcaccacaaccagcctggatgattcttaagggcccttctaggaccaaagttctgggaatttctagcttattctgccccctcatagcccttggcctatctatctttatccacatgcagaaacatctggcaaccccacatggctgagatgacctggtcctaggacacccttggacagaagactggcctacctagcagacctggatttttcttcctgatctgctgcttccaagttgtgtgaccttggctaagtcacttaacctttctgattgtcatttcgctttttaataaagtgggtctggtgaacaagaaatgtaataaacacgtggcttgccattcaagagatgagtctgaccattcactttctgtgtgccagagaagagagatcatgggtatagaccagcccctggaaaggctgctttggtcaaggctgagagcagctttgctcaaggaaattattcacgaaggtgaccactgtctttctgacctggcacagaggaaatgttggctgtgaatgtgaccaatagaaagaagcccgtatttctcagtcagtcctagaaccccggtaagtaattaacagagaataaaaatgtgtttgttaaatgacaaagcagcagtttttcaattgtaaggtctgcttgagagcctttgatgtgtgtttcttttcctgacttttcctttctttagaatttttgatggtctcacctggtgggtggggctttcagggtatgcccacaatgtacatttctcggcatctgtgcctcagtttcctcatttataaaatccctatgatctctgtctcacctactttacagggttgctgtgaagatcgcatactacacacaggaatgctcatcagtttttaaattttatttaatttttatttatttttttttaaatgtaattttttcagagagataaggtcttgctatgttacccagcctagtcttgaactcctggcctcaagtgatcctcctgccttggcctcccatgctgctgggattacaggtgtgaactaccatgcccagccagctcctaagtcttaaggctctgtgttagtgatagatgtggccatggtgtaggcagtgcaatgtcttcgagtgagagtgaaggtggtaactcattgcatggattctagagttctgtttattctaatccaagttcttccacttaaaaacaatgttcttcctctcattgagtctcattcctcatctataggatgggaataagagcatgtacctggcaggttgttgtaaggattaaatggtgtaaaaaaatgtcaagtgcttgcaactttgaataccaaacttgagtgaaagctcaataaattgttacttaaaaaataaaaaaaaaaaaaaaaaaaaaaaaaaaaaaaaaaaaaaaaaaaaaaaaaaaaaaaaa

SEQ ID NO: 6470 - DNA, 4782 bp, Homo Sapiens
  NM_153046
ttgggggatgccgacgcctgggccttgaggatgctgcggaagctcaccatcgagcagatcaacgactggttcaccatcggcaagacggtgaccaatgtggagctgctgggcgcgccgcccgccttcccggcaggggcggccagggaggaggtgcagcgccaggacgtggcccccggcgctggtcccgcggcccaggctccggctctggcccaagctccggcccggccggccgctgcgttcgaaaggtcactcagccaaaggagctcagaagtagagtatattaacaaatacagacagctcgaagcacaagagcttgatgtgtgtcgcagtgtccaaccaaccagtgggccaggtccaaggccatctttggctaaattaagcagtgtgacgtgcatcccagggacaacttataaatatcctgatttgcctataagtcgatacaaggaagaggttgtgtctttgatagaaagtaattccgtggtgattatccatggggccacgggaagcggtaaaagcactcagctcccgcagtatatcttggaccactacgttcagcgctccgcctactgcagcattgtggtcacccagccccggaagataggggcaagcagcatcgccaggtggatcagtaaagagcgtgcctggaccctgggaggtgtggtgggctaccaggtagggctagagaaaatagcaacagaggacaccaggctaatttatatgacaactggagtcctgcttcagaaaatagttagtgccaagagtttgatggaattcacacatatcatcattgatgaagtacacgaacgaacagaagaaatggatttcctgctattggtagtccgcaaactcttaagaacaaattcacgttttgtgaaggtggtcctgatgtcggctaccatcagctgtaaagagtttgcagactactttgctgttcctgttcaaaacaagatgaatcctgcatatatttttgaagtggaaggcaagccccattcagttgaagagtattatcttaatgatttggagcacattcatcatagcaagctctctcctcatctcctggaggaaccggtgataactaaggatatatatgaagttgctgtctctctcattcagatgtttgatgacttggatatgaaggagagtgggaacaaggcttggtcgggggcccagtttgtgttggagcgaagcagtgtgttggtgtttttgccaggtctgggtgaaataaattatatgcatgaacttctcacaagcctggttcataaaaggttgcaggtctatccactccattcaagtgtggctttagaagaacagaataatgtctttttaagtccagtccctgggtacagaaagattattctgtccaccaatattgcagagagttctgtcacagttccagatgtcaaatatgttatagatttttgtttgactagaactttggtctgtgatgaagatacaaattatcagagtctgcgattgagttgggcttctaaaaccagctgtaatcagagaaaaggccgtgctggacgagtgtctagagggtactgttaccggctggtacacaaggatttctgggacaactccatccctgatcatgttgttcctgagatgttgcgttgtccattaggaagcacgatcttgaaagtgaaattacttgacatgggtgagccgagagctctgctggccactgccctttccccgcctggtctgagtgacattgagcgcaccatccttctactaaaggaggttggagcacttgcagtgagtgggcagagagaagatgaaaacccccatgatggtgaattgaccttcttaggaagagttttagcccaacttcctgtaaatcagcaacttggtaaactcatagtccttggacatgtatttggatgtctagatgaatgtcttattatagcggcagctctttctttgaagaatttttttgcaatgcctttccggcagcatctcgatggatataggaacaaagtgaatttctctggcagtagcaagagtgactgtattgcacttgttgaggcatttaaaacatggaaggcttgcagacagacaggggagctgcggtacccgaaggatgaacttaattggggacggttaaattacattcaaatcaagagaattagagaggtggctgaattatatgaagaattgaagactagaatctcacagttcaacatgcatgttgattctcggcgacctgtcatggaccaagagtatatatataagcagcgattcatcctacaggttgtattggcaggtgctttctatccaaattactttacttttggacagccggatgaggagatggcggtgagggagctggctggcaaggaccccaagacaactgtcgtgttgaaacacattcctccctatggatttctttactataaacaactacagtctctctttagacagtgtggtcaagtcaaatccattgtatttgatggtgcaaaagcctttgtggaattctcacgaaatccaacagagagatttaaaacccttcctgcagtatatatggcaattaagatgtctcaactaaaagtttcacttgaactcagcgttcattctgcagaggaaattgaagggaaggtgcaaggcatgaacgtctcaaagctcaggaacacaagggtgaatgtggacttccagaagcagacggtagatcctatgcaagtctcctttaacacatcagacaggtcccagacagttacagatctccttctaactattgatgtcacagaggtggttgaagtgggacacttttggggatacaggattgatgaaaacaactcagagattctgaaaaagcttactgctgaaatcaaccaactgacgctggtgcccttgcccactcacccacatccagacttggtctgtctggcaccttttgctgattttgataaacaacgctactttagagctcaagtcctttatgtttctggaaattctgctgaggtattctttgtagattatggcaataagtctcatgtagatctacatcttttgatggagattccctgtcaatttcttgaacttcctttccaggctttggaatttaagatttgcaaaatgagaccatcagcaaagtctcttgtttgtggcaagcactggagtgacggggccagccagtggttcgcctctctggtgagcggctgcaccctccttgtgaaggtcttctctgtggtgcacagcgtcctgcacgtggatgtgtaccagtactcaggggtccaggatgccatcaacataagagacgtcctcatccagcagggctatgccgagctcacggaggagtcctacgagtccaagcaaagccatgaagttctcaagggcctcttttccaagtcagtagaaaacatgacagatggctctgtgccctttcccatgaaagacgacgagaaatatctcatccggattttgttagagagcttttctaccaataaactgggtactccaaactgtaaggcagaacttcacgggccttttaacccttatgaactaaagtgccatagtttgaccagaatatccaaattcaggtgtgtttggattgagaaggagagcatcaactctgtcattatcagtgacgcccctgaagaccttcaccagagaatgctggttgcagcttccctttccatcaatgcgactggatctacgatgctgctgagagaaacctctctgatgcctcatatccctggcctcccggctctcctcagcatgttattcgcaccggtgatagagttaaggattgatcagaatggcaagtactatactggagtcctttgtggtttggggtggaatccagctacaggggcttccatactgcccgagcacgacatggagcttgcgtttgacgttcaattcagcgtggaggatgtcgtcgaggttaatattctcagggctgctattaacaagctagtctgtgatggaccaaatggatgcaagtgtcttgggccagagagagttgcgcagcttcaagacattgcccgtcagaagcttttaggtttgttctgtcagtcaaaaccaagggagaagattgttcccaagtggcatgaaaagccctacgagtggaatcaggttgatccaaagctggtcatggagcaggccgaccgtgagagcagcagagggaagaacacctttctctaccagctccacaaactggttgtgctcggcacctgagcatgtccacaggtggcctccagcacacccctcaggaagctgtggaggctggattccaggctccctccgcagactgactttcctctgtgtctgggtgttacagtctgtgcccactgcatcctaaaggccttttctttcttcttttctctttgggtgatagtcagagagtggtgtttttgttcaggtgggaaggattggaaactctagtcttttctagaaacagaaaatcactgtattaaatattttggaaagattgttctgaaagaagtctgtttggataaagagctgtattttgctttaaatttattaaggtaaatataagtagttaatcttagatgtaaggttccagaatgtgcttacatattctgttctgttacagtgatttaaaccagtagtataggaaaaaacttaaaaaacaaaaaaaccatgtagtattttctgatttttttttccatgagggaaaatatctaatttttataagactaagttgagttatacttcttggttcacattttggaaatcagagattacagattacatggccatagcttatctgtgttaaaacaataaaagcattaaatgaaaaaaaaaaaaaaaaaaaaa

SEQ ID NO: 6471 - DNA, 2073 bp, Homo Sapiens
  NM_153047
gaatttagataatgggctgtgtgcaatgtaaggataaagaagcaacaaaactgacggaggagagggacggcagcctgaaccagagctctgggtaccgctatggcacagaccccacccctcagcactaccccagcttcggtgtgacctccatccccaactacaacaacttccacgcagccgggggccaaggactcaccgtctttggaggtgtgaactcttcgtctcatacggggaccttgcgtacgagaggaggaacaggagtgacactctttgtggccctttatgactatgaagcacggacagaagatgacctgagttttcacaaaggagaaaaatttcaaatattgaacagctcggaaggagattggtgggaagcccgctccttgacaactggagagacaggttacattcccagcaattatgtggctccagttgactctatccaggcagaagagtggtactttggaaaacttggccgaaaagatgctgagcgacagctattgtcctttggaaacccaagaggtacctttcttatccgcgagagtgaaaccaccaaaggtgcctattcactttctatccgtgattgggatgatatgaaaggagaccatgtcaaacattataaaattcgcaaacttgacaatggtggatactacattaccacccgggcccagtttgaaacacttcagcagcttgtacaacattactcagagaaagctgatggtttgtgttttaacttaactgtgattgcatcgagttgtaccccacaaacttctggattggctaaagatgcttgggaagttgcacgtcgttcgttgtgtctggagaagaagctgggtcaggggtgtttcgctgaagtgtggcttggtacctggaatggaaacacaaaagtagccataaagactcttaaaccaggcacaatgtcccccgaatcattccttgaggaagcgcagatcatgaagaagctgaagcacgacaagctggtccagctctatgcagtggtgtctgaggagcccatctacatcgtcaccgagtatatgaacaaaggaagtttactggatttcttaaaagatggagaaggaagagctctgaaattaccaaatcttgtggacatggcagcacaggtggctgcaggaatggcttacatcgagcgcatgaattatatccatagagatctgcgatcagcaaacattctagtggggaatggactcatatgcaagattgctgacttcggattggcccgattgatagaagacaatgagtacacagcaagacaaggtgcaaagttccccatcaagtggacggcccccgaggcagccctgtacgggaggttcacaatcaagtctgacgtgtggtcttttggaatcttactcacagagctggtcaccaaaggaagagtgccatacccaggcatgaacaaccgggaggtgctggagcaggtggagcgaggctacaggatgccctgcccgcaggactgccccatctctctgcatgagctcatgatccactgctggaaaaaggaccctgaagaacgccccacttttgagtacttgcagagcttcctggaagactactttaccgcgacagagccccagtaccaacctggtgaaaacctgtaaggcccgggtctgcggagagaggccttgtcccagaggctgccccacccctccccattagctttcaattccgtagccagctgctccccagcagcggaaccgcccaggatcagattgcatgtgactctgaagctgacgaacttccatggccctcattaatgacacttgtccccaaatccgaacctcctctgtgaagcattcgagacagaaccttgttatttctcagactttggaaaatgcattgtatcgatgttatgtaaaaggccaaacctctgttcagtgtaaatagttactccagtgccaacaatcctagtgctttccttttttaaaaatgcaaatcctatgtgattttaactctgtcttcacctgattcaactaaaaaaaaaaaagtattattttccaaaagtggcctctttgtctaaaacaataaaattttttttcatgttttaacaaaaaccaa

SEQ ID NO: 6472 - DNA, 2000 bp, Homo Sapiens
  NM_153048
cagcgcaggtctgaggagctgagaagggaggcttacgtgaagggaatttagataatgggctgtgtgcaatgtaaggataaagaagcaacaaaactgacggaggagagggacggcagcctgaaccagagctctgggtaccgctatggcacagaccccacccctcagcactaccccagcttcggtgtgacctccatccccaactacaacaacttccacgcagccgggggccaaggactcaccgtctttggaggtgtgaactcttcgtctcatacggggaccttgcgtacgagaggaggaacaggagtgacactctttgtggccctttatgactatgaagcacggacagaagatgacctgagttttcacaaaggagaaaaatttcaaatattgaacagctcggaaggagattggtgggaagcccgctccttgacaactggagagacaggttacattcccagcaattatgtggctccagttgactctatccaggcagaagagtggtactttggaaaacttggccgaaaagatgctgagcgacagctattgtcctttggaaacccaagaggtacctttcttatccgcgagagtgaaaccaccaaaggtgcctattcactttctatccgtgattgggatgatatgaaaggagaccatgtcaaacattataaaattcgcaaacttgacaatggtggatactacattaccacccgggcccagtttgaaacacttcagcagcttgtacaacattactcaggtacctggaatggaaacacaaaagtagccataaagactcttaaaccaggcacaatgtcccccgaatcattccttgaggaagcgcagatcatgaagaagctgaagcacgacaagctggtccagctctatgcagtggtgtctgaggagcccatctacatcgtcaccgagtatatgaacaaaggaagtttactggatttcttaaaagatggagaaggaagagctctgaaattaccaaatcttgtggacatggcagcacaggtggctgcaggaatggcttacatcgagcgcatgaattatatccatagagatctgcgatcagcaaacattctagtggggaatggactcatatgcaagattgctgacttcggattggcccgattgatagaagacaatgagtacacagcaagacaaggtgcaaagttccccatcaagtggacggcccccgaggcagccctgtacgggaggttcacaatcaagtctgacgtgtggtcttttggaatcttactcacagagctggtcaccaaaggaagagtgccatacccaggcatgaacaaccgggaggtgctggagcaggtggagcgaggctacaggatgccctgcccgcaggactgccccatctctctgcatgagctcatgatccactgctggaaaaaggaccctgaagaacgccccacttttgagtacttgcagagcttcctggaagactactttaccgcgacagagccccagtaccaacctggtgaaaacctgtaaggcccgggtctgcggagagaggccttgtcccagaggctgccccacccctccccattagctttcaattccgtagccagctgctccccagcagcggaaccgcccaggatcagattgcatgtgactctgaagctgacgaacttccatggccctcattaatgacacttgtccccaaatccgaacctcctctgtgaagcattcgagacagaaccttgttatttctcagactttggaaaatgcattgtatcgatgttatgtaaaaggccaaacctctgttcagtgtaaatagttactccagtgccaacaatcctagtgctttccttttttaaaaatgcaaatcctatgtgattttaactctgtcttcacctgattcaactaaaaaaaaaaaagtattattttccaaaagtggcctctttgtctaaaacaataaaattttttttcatgttttaacaaaaaccaaaaaaaaaaaaaaaaaaaaaaaaaaaaaaaaaaaaaaaaaa

SEQ ID NO: 6473 - DNA, 8924 bp, Homo Sapiens
  NM_153050
agcgcgctctgtgtggccgctgccgccatgttgttgtggttgtgagaaggcggcggcggcggcggagtagcagccggacgagacgtcccagcggctcaggcgctgcccagcgccggccctggcagggagcctggtggggtggcggagggggagactgtgccgtggagggcctcgccatgtcctgctgcccgacttccttgtgaaacctcctagtagaaaaagttcttgggacaaacttcatttgacttcaccataagggaaagaagagagccttgttggacactgaagaagggacggggatttctcctcctaatctgggcctcttgtcatggatgaagagactcggcacagccttgagtgcatccaggccaatcagatctttcccaggaagcagctgatccgggaggatgagaatcttcaggttcctttccttgaacttcatggagagagcacagagtttgtgggccgtgccgaggatgccatcattgccctttccaattacagacttcacatcaagttcaaggagtctcttgttaatgttccattacagcttatagaaagtgttgaatgccgagatatatttcagcttcatttgacttgcaaagactgcaaagttatcaggtgtcagttttcaacctttgagcagtgtcaagagtggctgaagagactgaacaacgcaatccgaccacctgctaaaatagaagatctcttctcatttgcataccatgcttggtgcatggaggtctatgccagtgaaaaagagcaacatggagacctgtgcagaccaggggagcatgtaacttcaaggtttaaaaacgaggtggagaggatgggttttgatatgaacaacgcctggaggatttccaacatcaatgagaagtacaaattatgtggtagctatcctcaagagctcatagtgcctgcctggatcactgacaaagaactggaaagtgtatcaagtttcaggtcctggaagcgcatccctgccgtcatctacaggcaccagagcaatggagctgtcattgcccgctgtggacagccagaggttagctggtggggctggcgaaatgcagatgatgagcatctggtacagtcagtagccaaagcttgtgcctctgactcccgatcgagtggcagcaagctgtcaactaggaacacttctcgagactttcccaatgggggagacctttctgacgtggagttcgattcttctctgtcaaatgcttcaggagcagagagtttagccatccaaccgcagaagcttttgatcttggatgcacgctcctatgcagctgctgtggcaaaccgagccaaaggaggaggctgcgaatgcccagagtattacccaaactgtgaagttgtgtttatggggatggcaaacattcattctattcggaggagttttcagtctctgcggttgctgtgcactcagatgccagatccgggaaattggctatcagctcttgaaagcacaaaatggctccatcacttgtctgtgcttctgaaatcagcgcttctggtagtgcatgctgtggatcaggatcagcggccggtgctagtacactgctcagatggctgggaccgcaccccccagattgtggcattggctaagctcttgctggacccttattaccgaaccatagagggtttccaggtcctcgtggaaatggagtggctggattttggccataaatttgctgaccggtgtggtcatggggagaactcggatgatctgaatgaacgttgcccagtgtttctgcagtggcttgactgtgttcatcagcttcagaggcaatttccttgctcttttgagttcaatgaagcattccttgtgaaactggtgcagcatacctattcctgcctgtttggaacattcctgtgcaacaacgccaaggagagaggggaaaagcatactcaggaacggacatgttccgtgtggtcacttcttcgggcaggcaacaaggctttcaaaaacctactgtattcctctcagtcagaagccgtgctgtaccctgtgtgccatgtgcgtaacctgatgctgtggagtgcagtgtacctgccctgcccatccccaaccacccctgtggacgacagctgtgcaccatacccagccccaggcaccagccctgatgatccccccctgagccggctaccaaagactagatcatacgacaatctgaccacagcctgtgacaacacagtgcctctggccagccggcgctgcagcgaccccagcctgaacgagaagtggcaggagcaccggcgctcactagagctgagcagcctggctggccctggagaggatcccctttctgccgacagcctagggaagcccaccagagtgccggggggtgccgagctttctgttgcagccggagtagctgaggggcagatggagaacatcttgcaggaggccaccaaagaggagagtggagtagaggaacctgcccacagggcaggcattgagatacaggagggtaaagaggaccctctcttagaaaaggagagcaggaggaagacacctgaggcctcagccattggacttcaccaagacccagaactgggtgatgctgctctgaggagccatctggatatgagctggcctctgttctcacagggcatttctgaacagcagagtgggctcagtgttctcctcagttctctccaggtcccccccaggggagaggattccctggaggtccctgtggagcagtttcgaatagaagagattgcagagggtagggaggaagcagttcttccaatcccagtagatgcaaaagttggctatggtacctcacagtcatgttctctgctaccttcccaagtcccttttgagaccagaggaccaaacgtggacagttctacagacatgttagtggaagataaggtgaagtcagtaagtgggccccaaggtcatcatagatcttgccttgtaaatagtggcaaggacaggcttcctcagaccatggaacccagcccttcagagacaagcctggtcgagaggccccaagtggggtctgtggtgcataggacttcccttggcagcactctcagcctgacacgttccccttgtgccttgcctttagccgaatgtaaagaggggcttgtgtgcaatggtgccccagagactgaaaacagggcctcagagcagcccccaggtcttagcaccctccagatgtaccccacacccaatgggcattgcgccaatggggaggctggtaggagcaaggactcactgagccgtcagctgtctgctatgagctgcagctctgcccacttacactcaaggaacttgcaccacaagtggctgcatagccactcaggaaggccatctgcaaccagcagccccgaccagccttcccgcagccacctggacgatgatggcatgtcagtgtacacagacacgatccaacagcgcctgcgtcagattgagtcaggccaccagcaggaagtagaaactttgaagaaacaagtccaggagctgaagagtcgcctggagagccagtacctgaccagctccctacactttaatggagactttggggatgaggtgatgacccgttggcttcctgaccacctggccgcccactgctatgcgtgcgacagtgccttctggcttgccagcaggaagcaccactgcagggacactgaccgtgttgatcaaacgtggaattgtgggaacgtattctgctccagttgttgtaaccagaaggttccagttcccagccagcagctctttgaacccagtcgagtatgcaagtcttgctatagcagcctacatcccacaagctccagcattgaccttgaactggataagcccattgctgccacttccaactgaagctcagtgacctgggtgggcagtggccaagctgctgttcctatgacaggcccactcaacctgggcagaccgagaggcccgtgcactttggaatgggagcgtggaaccacctgtacagagtgacagatttgggatgcaccactggattgtagattgatttttctttcctgtccccctactccctccctaccttttccatcctcctcctctgccttcaaaaaaggaaactttcccttggttgtcttaattttttttttttttgatggaagaccaagggttgccaggcccactgtaactgccgagctgcctgctgtcacgtgacactgagggatggcttgtttcttccgggtgggaggatggtggtcagagccaggagtatggagatctgagaccgtgagcagggaagaaagccagtgctaacatgcaaccattcctcacgccaccgccacatcagagctggttgggaaccctttgctgctggggaggctggaagcatattccccaagagcactgccctgggcatcatctccctcctgcgaggagctgagccagtcccctcacagatggataaatgaggctgatgtttggagggagaggcacacggtaaatggcatccccttaggcgcctctttgggaaaggaaagtggatgctcctttgaggcaggcgaggggctgggagtgggtagccgtcatgttgtcccccgtgggatcccatttttaacttgacccagattgtcttgggctccttttactttcagggggctgctttcctgggccaggctgtgtagcacttcccaccctcaggcatgagtacagactggtcaaaatgtttatgcagtcaaggccaaagcctgccctgagcccagacacacctgggtccccattctggggcctggtcccctaaacaatctcttcctcagccagcacagggaaatccagactcagggttccagaaatcccccgttcccaaaccaaaccaatcatggatcttccctttaaggggtagaatcagcctttagagttacaagcccctggaaaagggagcaggtcccatacaatcagcctttctcctcttctcttcttgggacaggaataactgctgagcagtccccctttgccactcctggctgtctgagtgggcacttgtctggctgctggccagcagtgaagggccacttggtgacttcgtagggttccttagagaagtgacatggccttgaggagattcagggcacctttcctcagtgagctttgatatggtccaaaaacagccttaaatcaagaatatttgtggaggtaggtgtggggaaggttggagaagagttaggtttgtgctttgtaatcttggcatccatgttttgtgcctgccctccctcttggggaggccatgcttgactctgctgaaagctgctaactggtgacagggtggatcatggtgaggactaggggtaaggtcagggaatgcttaagctctggccctgccctgtattcctcttccccttggtagcagttccctgaccaagggcaaggtgtgtctcaggaaggtggttctgtgcatgcctgggtgtggttaaggcgtggcccagaaggcttccctggtgctctcagtccaggcaaagcccagagcatctgagcacgtctctgacttccagtggcaacacagtttgaacgtggtgaaacagggtgtagttcttttccacattctgtgtcatctagtcgtgcaggtagggaaaaagttggtctaattgaagattgtgcatttcctagtgacaggtgccaagaggttatgatacgggtttcttgggtctgatgtacagtgtgaataaatgcttgcagctcttagctcttttttgatcgatgaagcacttttttattaatattttcctttgttaaaggaggaaccgtaactctccatagctgtacatataacccttttctcctaaagaggagtcagtcagtgctcctatatttttcattttttgtcaaagcaagaagtaaatactttagaattgttaaatatataaataaagcaaataaagttgagtgttccacatggtagcatttgctaacacttcctaattctttgccctgtggtttatcccctcttcgtcccttttccctctcacacagaagtgtttgagggcctgctgggaaactgacctttggcaaaggaaagctacagatagccttccgactctagaccttggcaaggagcctcaccatgatgttcaagcactgaacgcatttcctcagtgattttgctcctaaaatctcccaggctaaaagagggcaaagcagtcagggatctgacctggcagctattcctccttctctgaagagttcccatcagtagtcattacaactacctctcgcctcaaggctccatttttagctgctgctctgatttcagggcagccagtactctggccccttcagtcggggagtggaaggagatgtggggtgggggtgagaaaatgcttctgcctgttgttcttgaaggatagactatgggtgggcagagagaactgggggcagaaatggaattagatgtgattgggttatgcagtcaactagaggtctccttcccgccctctctccacacagagaggaacctctgctccttagctcttacagcaggactgtggcatctagtcacttcaatactagttcttgctcttcacagaggtagatttttctttaccctacagcactgttgggcatccctcccatcacatgggtctgtgggtgagatatgttatgctgttcctccctcgggaaggttggtattgaggggtgccttgctccagaggcgccagcccagcatctgtggtgagttggctaagatccagagtgacctgctcagagctccccagaggccttcactctttggggcagtctctctagggtcactttctgaatgtaccttctacctaaagtatacaaacacaaagagccagctgagctggttctagtgtgaaagccgtaagtgccacccagcaggcgtttgaaaacaagaaatcattcttctgtggaaggagaatgtgccatctcagctaccctcagtccgccaggcagcccagtctgtgtattcatatgaagttgtgaaaaccatgagtgtgtgccatggccatcgtgtctacacacagccactattgttcctgtgggctagtctccagcaaattaaaacactggcatggcctaggaagggcgttgcgagctcctaaatggaaagcttctctgggggtagggagatgaagagccaagatgctggtgaagcaggtgcagtgaggatccaaggcaaggaattgccctgagggaggtggctgcatatggagaaaggcagttctctgtgggcaaggccagcttgcttcaggctgtagagggaatttggtctgaagcaacagggcatgaactgtgactttgagctgccaggttgtcttcatctcagaactttcctatcctggcactctcgttacctttcttctataccttggcctctgtaactgcagtccaaaacaagttacagctgccttaatccactgagattctctatgaggatgtacagaaaagttttcctgtaataattttgcttatatgctaactcttttcatgttagcaaagaatattctatgaattagaatgttactgtggtagatctaaaggagaatgaacagaaggtgctggaggacctgttaaacaatctctggctattaaaaaacatcaagatgagaattaaaggcatatcctgatatacttgcctgcttgcacatgaggctgggagatcccatgcctgttgaagttaactctagccctgacctctattgatcttttgggaatgagggctgatttgaaggtgctgttgcaggatttcatttagctgctgccagttcaagtgacctgtccccagggctgcagctgtatccacctgattgcagtaggtgagggctaacagcagaatttaaagtggaccctgggctgtggagcaaagtgactatccatttggacttttggataatgtggcaggagtcccagctgtttaatttctagtcacattttccagaaagttgttctaagttgagattactgacaagatttctcaagggcaggaccagatatgtgagagacttctagttcagagctgacccctctaagcctctgacacttaaacacgagtcctgctgtccccagcacacaactgcactgaagccttgttcctctcggctggtgtagagctcatctgcatgttgtgtgcagataccagtagcctccctgcttgaacaggcctctcctaggctaggcaggtgttcagaggcatgaaggtctgggcaggggaagggcgtcttctgaaatgggagttaccaggtttttaaatgctgctattgttttatttaccatttaaggtcttttctattatatctgagtaactagtcagtttttcttacagtgctcatagcagttgtatttgaattgtattttcagtgaaatttgttttacattgccatttaaaattggcctttaacagcttcccaactagcttataagatttttttttttaatgaaaacataacccatgaggctcagatgctgttgaagaaataaatggtatgttgctgctgacagtagtgcttgcctattgtaacagcattggttctgctgtagcctcggtgaccatttaagttgaataaatctgtcattttcacccacaaacagttgttgagcccctggatttgggttgtcactgtggttctcctgccagtgctataatccagtgtcgtaggtgcagggtatgaatcagctcagcctcttaggagagaggggctctcagcgaggagggggcggggggggggtcactatttatcttccagaggcagggttcatggattcctgatgtttagaggcggaagggaccttaggtcacctacttccacggttttcatactgttctctggggcctcgtggagagggagcctccaggcccattcaaagctttattagatttaaaagtaagatctggtatgaagaaaggttttgtttgtttcttaaaataaaaagtctgaaaatcactaaaaaaaaaaaaaaaaaa

SEQ ID NO: 6474 - DNA, 1817 bp, Homo Sapiens
  NM_153201
ctcattgaactcgcctgcagctcttgggttttttgtggcttccttcgttattggagccaggcctacaccccagcaaccatgtccaagggacctgcagttggtattgatcttggcaccacctactcttgtgtgggtgttttccagcacggaaaagtcgagataattgccaatgatcagggaaaccgaaccactccaagctatgtcgcctttacggacactgaacggttgatcggtgatgccgcaaagaatcaagttgcaatgaaccccaccaacacagtttttgatgccaaacgtctgattggacgcagatttgatgatgctgttgtccagtctgatatgaaacattggccctttatggtggtgaatgatgctggcaggcccaaggtccaagtagaatacaagggagagaccaaaagcttctatccagaggaggtgtcttctatggttctgacaaagatgaaggaaattgcagaagcctaccttgggaagactgttaccaatgctgtggtcacagtgccagcttactttaatgactctcagcgtcaggctaccaaagatgctggaactattgctggtctcaatgtacttagaattattaatgagccaactgctgctgctattgcttacggcttagacaaaaaggttggagcagaaagaaacgtgctcatctttgacctgggaggtggcacttttgatgtgtcaatcctcactattgaggatggaatctttgaggtcaagtctacagctggagacacccacttgggtggagaagattttgacaaccgaatggtcaaccattttattgctgagtttaagcgcaagcataagaaggacatcagtgagaacaagagagctgtaagacgcctccgtactgcttgtgaacgtgctaagcgtaccctctcttccagcacccaggccagtattgagatcgattctctctatgaaggaatcgacttctatacctccattacccgtgcccgatttgaagaactgaatgctgacctgttccgtggcaccctggacccagtagagaaagcccttcgagatgccaaactagacaagtcacagattcatgatattgtcctggttggtggttctactcgtatccccaagattcagaagcttctccaagacttcttcaatggaaaagaactgaataagagcatcaaccctgatgaagctgttgcttatggtgcagctgtccaggcagccatcttgtctggagacaagtctgagaatgttcaagatttgctgctcttggatgtcactcctctttcccttggtattgaaactgctggtggagtcatgactgtcctcatcaagcgtaataccaccattcctaccaagcagacacagaccttcactacctattctgacaaccagcctggtgtgcttattcaggtttatgaaggcgagcgtgccatgacaaaggataacaacctgcttggcaagtttgaactcacaggcatgccaggaggaatgcctgggggatttcctggtggtggagctcctccctctggtggtgcttcctcagggcccaccattgaagaggttgattaagccaaccaagtgtagatgtagcattgttccacacatttaaaacatttgaaggacctaaattcgtagcaaattctgtggcagttttaaaaagttaagctgctatagtaagttactgggcattctcaatacttgaatatggaacatatgcacaggggaaggaaataacattgcactttataaacactgtattgtaagtggaaaatgcaatgtcttaaataaaactatttaaaattggcaccataaaaaaaaaaaaaaaa

SEQ ID NO: 6475 - DNA, 5660 bp, Homo Sapiens
  NM_153207
gaggaggaggaggagcaggcgccgccatggccgccgctatcaccgacatggccgacctggaggagctctcccgcctgagccctctgccccccggcagcccgggttcggcggcgcggggccgggctgagccccccgaggaggaggaggaagaggaggaggaggaagaggaggcggaggccgaggcggtggcggcgctgctgctgaacggcggcagcggtgggggcggcggaggcggcggcggaggagtggggggcggcgaggcagagacgatgtcggagccgagccccgagagcgccagccaggccggggaggacgaagacgaggaggaggacgacgaggaggaggaagatgagagcagcagcagcggcgggggtgaggaggagagtagcgccgagagcctggtgggcagcagcggcgggagcagcagcgacgagacccgctcgttgagccccggcgccgccagcagcagcagcggggatggggacggcaaggagggcctggaggagcccaagggaccgcggggcagccagggcggcggcgggggcggcagcagtagcagcagcgtagtctccagcggcggcgacgagggctacgggactgggggaggcggaagcagcgcgacctccgggggccggcggggcagcttggagatgtcgtcggatggggaacccctgagccgcatggactcggaggacagcataagcagtactataatggatgtagacagcacaatttccagtgggcgttcaactccagcaatgatgaatggacaaggaagcactacttcttcaagcaaaaatattgcctataattgttgttgggaccagtgccaggcttgcttcaactctagcccagatctggcagatcacatccgttccatacatgtagatggtcagcgaggaggggtatttgtttgcttatggaaaggttgtaaagtatataacactccatctaccagtcaaagttggttacaaaggcatatgctgacacacagtggagacaaacctttcaagtgtgttgttggtggctgcaatgccagctttgcttctcagggagggctagctcgtcatgtacccacacacttcagtcagcagaactcctcaaaagtttctagccagccaaaggccaaagaagaatctccttctaaagctggaatgaacaaaaggaggaaattaaagaacaaaagacgacgctcattaccacggccacatgatttcttcgatgcacaaacactggatgcgataagacatcgagccatatgctttaacctctcagctcatatagaaagtttagggaagggacacagtgttgtttttcatagtactgtaatagctaagagaaaagaagattctgggaagatcaaacttttgcttcattggatgcctgaagacattctgcctgatgtgtgggtgaatgaaagtgaacgacatcagttaaaaactaaagtagttcatttatcaaagctacccaaagatactgccttgcttttggacccaaacatatacagaacaatgccgcagaagaggttgaagaggtaaaaaataaataaatacataaaaagcaaacaagcggggacacctgcagtcttagtcactgacaatgggtttagggaaagttgcacattagagtcaaccccttcttttttttttttttttttttaaatccagtatttaggataatatttatgcttagtgtaaacattctgtgaatgaagtagactcttcggtggaatatattaatatattactgtatatccacattttcatggaatggtactgtgggagactgagcaaacactcttttggcaacttagtagaacagcttcttaaaggctttgcatgcttgctgctttaagctgcttttttttttcttttcttccctttagtgatttcagtagtttatattggaaagaaaaacaattacaacatgtgcccttacaaataccaaaagcactgtaaggatatttgtcttgacagtgtttattgatttgaagtcatattaggaaatatttagacaatgaaaattatcaagagataatttacctttcaattatgataaatagatgtgattggttgccatttgtgttcttttgcagaactctgataagaaaagtgttcaatttgtatttaagcaaacagtgaacgacgtttgcaatcaactaaaaattcgtctatcgaattagggctgaaaattactgttaaagagtgttgcagtatgtctggtggctcccttttcaggactagggctttctcatggagtacagtatgttaatatttacctatataactaatctgttaacggtttttgaaaaacctttcaaattatttgaataatcttcatattttcatttaacctatatgactctaattttttttctgaggaaatcatttggtttttgagttgttttttcttaatgtaagaaaaattgtattttttttacaagtatcttcaaactgaatcttttatgcaccaaagttggtcttgaaaaggaaaataaaatcactttcttgcttggtaagcaagaagccatatcgattttttttaacttacagaaatggaaatatgtgtaacttgttagtattgtattaaacaaatgttgcatagagataatagaacattgcttgtaaataattcagcagatttgtaatatatttttatattttgaaatgtactgtagatgttttctagaggcatgaaagttaaatgtatatattatggtagaaataatattgaaggatattgtacttcactagtgctgccagaggaattgttaataaaagcaccttctttaacaataaatgtctttcacagacttaagggactatgtactactgttaatatctctaagaacaaaacacattgaacatccttccagaaagtctttgagggaggacctatacccataatagaattatggcactcatttctgacagtgatcaagaaatcagttatttccttactgttggaaggacattgtaaagtatgtggttatatgcagtgaaactgcagaaaatactcctggttgaggagttttcactttactacagtgatataaaaaccagcagtttttacactaaattttttaaagaaatattagacaaaaatatagaattaaaacctttggttccaaaatgggaaaggttccacgatacataaatcatttctcatttgctttaaaaaatttaaaagtgtaaaaattatgagagactttattcgttaacaatgggggtaaagagctatatacatgaaaatgagtcttataaaattaagtgaagtgcaaataaaagcactgctactataagacattctggaatggttgtttaataagggtattatccatttgatctatagcaatgtgattttatttttaaaaagaaaagcagtgtgttttctttttttgttgttttcttttgcttaagcacttcatcaattgctttattctgtatctgcgaagtaatctgcaatctcttttgttctttttaaaatttgatttgttataaaattgccaaatagaagtgtttcagatacatagtttgtacctgtatttttattttattgcctcatgttcttgtaagtcattcttaattgaccaatgattgtagaccttgcttgagtattttttctaataaaacaaagcaaatcacatttagcttcaaattgtaacaattcaattgaattttaaaatgacacctgaaaagatacatctgatattttctatatagagcacagtaaataagttttttcattgtgtagaaatacttagatgtcaaaaccagatttcgtgatccttgattaacttctgagtactcaatcaatcataatccttttgctgcttatctgatgttggtttgatactgttaacacaccaaaaagaatatggaattgaaatgagctagctttataacttgtatgtatacatatatacacataacatccaattatgactgggtaataagtgtgaaaattttaatttgtggttttcatttattaatgtctgcccatctgtattgttgctcctaccttcaaatatgacacctgaaataataagtctgttgtccagaatttatgtattgttcagcatcaagcaaactacagctcacaagcatacccatttatatgttgtctatgcctgctttctcctgcagtggcagaattgagtggtgagaccttaggtcctgcaagcccccaatttttactacaggttggcaatccctaatccaaaaatctgacataaaaaatgctccaaagttcaaaactttctgagtgctgacatcatgctgcaagtggaaaattccacgcctgacctcatgtgactggtcatagtcaaaacaattaagactttgtttcatgcacaaaattattaaaactgttgtataaaattaccttcagtctatgtgtataaggtgtttgtgagatataaatgaactttatgtttagtcttggatcgcatttctgagtctcattatgtatatgcagatactcaaaaatctgaaaaaaatcaaaaatctgaaatacttctggtcccaagcatttcggataagggatactcagcctgtctctggtcctttaagaaaaagttttcgattcctttgtctagttgacaaaaagtttggaaacataaacttagaccacacaacttgcattttaatatgacaatgttgatcttggtaataagccagtacattaaattttagtgaaagctgtttcatgtattttacagtaaatactgccatattaggtacctacaacaaatggtggtttttggaaacttttacggtgggtttttaaagttattaatagtccatcatttcatcatttgtgtttctgtatttattttgctaagaactaaataagattttgtacatcagattgtgtttgaaccgtaaggcacatctgctttatctaaaagaatcttaaggtggaaatagtgtaaaatttaaaattttttatatttctaataaactttttatatataaatgttacctaaagtggacacatgttacttctgaatttcacatgaaaggaaattaaagatggacaataattatctctcaatattttaagatttgttttactaattgaaaacagtatgtcagtaaatctttggccttagtgcttttttcccccttttacacattaataaaatgttttaaatatggtaatactcttaaaacggtagaatttgccacagttgtttaaagcatttttattttttctttgaattcttaattcatggtgaacagatgttgggttcttaaaatataaaaatgagaaaatatgtattaaaaatacttgatagagggttttctctttaatcacaacttaaaaaaagaaacctttaatacctctgcataagttctctgaaagaacttaaattcttagtttatatgaaaactgatatgtatgtctgtgtaacaaagcctgttgggtacaggtctacaaggagatactttgtttctaaaaaaggagttaaatcgtgtcacctgaattttttttttttgagataagtggacattttggggattttggttaaaacatatttctctattctaaaaattacagaatatgtattcataaaagggaagaaattgttagaaaatttcctgtgtacgtagtttgtttttaaattaaagaatcttgtgacctggtgtaggacattt

SEQ ID NO: 6476 - DNA, 2603 bp, Homo Sapiens
  NM_153208
attaatccctgagacaaaggtactgaaggcaagtggctgaagaacaggcttgattggacagatgacttggagatgttcactggacagggacagccttgtgaagatctttgtgaatacccgacctcgcaagctccagagactacaataattcacttgccctaggttccaaagccagcaagtggaaaacggagactggaattccgcccacaggactccaaagcctgtgcagcaacaccccactcccccggcaggatcaccagcaggacgcgcgggagccaggaagtaagatccgtacctccaaggctcccatgggcccaagcctccgcatcaacagactgggagggattacgtggggtcccagggccggctctgaggcgggaaaactttctggaggcggcggcctcaggccggagcgggcgcacaccgactggaggggtcggattcagggatgtgggtggaccgcatttccccatcttccccgccgcgcacttcctctggtgcaatctccacaccccgcgccggcccgcctgcaacgcgccctggcactcaccggtgggcgaaatttccccgcctccacgtgagagccagctccgccgtgacccggaagtccacttcgagtcgccggcccaccctctcgggttccggcttcttccgggtcgcggccttccggcgaacgcggttaccgtggaaaccgcggccatggcggcaccgcggcaaatccccagccacatagtgcgcctcaagcccagctgctctacagactcgtcgttcacccggacgccggtgcccaccgtgtctctcgcgtcccgcgagctgcctgtctcgtcgtggcaggtcaccgagccgtcaagcaagaatctgtgggagcagatctgcaaggagtatgaagctgagcagcctccctttccagaaggatataaagtcaaacaggagcctgtgattacggttgcgccagtagaggaaatgctttttcatggcttcagtgcagagcactattttccggtttcccatttcaccatgatctcacgtacaccctgtcctcaagataaatcggaaacaatcaacccaaaaacatgttctcccaaagaatatttggaaactttcatctttcctgttctgcttcccggaatggctagcctgcttcaccaagcgaagaaagaaaaatgttttgagaggaaaagaaccaaattcattgcctgtgattttctgactgagtggttatacaaccaaaatccaaagagggcaggggagccattcacagaatttttctccattccatttgtggaggagcggctaaagcaacacccacggccgccaatcccactctcgctcctgctgacagaagaggaagcagccctctacattcaatccttctggagagcctgtgtggttcgctgtgatcctgagattcaagaactgcgtcagtggcagaagaaacttcgcgaggccaagcacattcaccagcaagtcaaaattttctgggccaagcaagaacaaaaagtgaaatgcaaaatggaggacgatgcagtacctgcagccaagatgaaaattccatcatcttaaccatagctaagacgtatctttgcccattcgagcacaagttaccttgtgcaaggaaaatgtccaaatgatgctctctctcttgtgatttctttaacaagacttggaacatgtgcaaatggaatcttttctgtacaagataggattcattgcaaacaagctttaatgcaaatagtttagaaaagaaaggaccagtcttcactttctgcattatccccacattttattcattcatccagattacttcttcagtgcctcaggagtattcttctacaccagctgctgttaaaatgtacaatgaactctagtcccaaggaatacagaagtgctcttattaccagttttcccacttgtggccgcctttgcaaagatccatattctaatttaagtccccaacctctgaatttggttttaagtttacctagtgactgactactctctttataaaaaagaccttatacttaatgatcatttccaaaggagaccactccttaacttttactgcaaacccaacaagatgagacacttaaacccagacagatgtaacaaaggatttttgttgtctaagtcccaaagtattatatagaaagttcctgcttttatgggtaaacttattaccttaatatgttctgtggtttgctgttaaccaagattctcccatttaaaatgccacagaccgaccctcaaggcagatccgaaagcctagtagttagttgcactgggttgttttgacaagctaccacacgtcttaagtaaatagtaaagcctttatttttgtgttaagaacagcattttgaaaataaaacctatctgcccatgctttacagccttttaaatttgtaatatttatatagtcgtttatggtacatattgattgtcttgaaatttctttaacttcttttttataagtatgcaacagtcagccgggggaagataaaggtacattataaaacacacattaatgcatttaataaatatatattatctatcaaaaaaaaaaaaaaaaaaaaaaaaaaaaaaaaaaaaaaaaaaaaaaaaaaaaa

SEQ ID NO: 6477 - DNA, 3670 bp, Homo Sapiens
  NM_153209
gcgttgttggtttcgggttgtcaggcagcgcgcgaggcggcgggcagctagcagctggcggacgcgacccggaggcggtgggggtgcggctgagccatgcccggtggcgcggcctgagcccctccacctgctgcaatcatgaaggacagcggggactccaaggaccagcaactcatggtggcgcttcgggtccggcccatcagcgtggcagagctggaggaaggagctaccctcatcgcccataaagtggatgagcagatggtggttctcatggacccaatggaggatcccgacgacatcctgcgggcgcatcgctcccgggagaagtcctacctgttcgacgtggcctttgacttcaccgccacccaggagatggtgtatcaggccaccaccaagagcctcatcgagggcgtcatctcaggctacaatgccactgtctttgcctatggccccacaggctgtgggaaaacctacaccatgctgggcacagaccaggagcctggcatctatgttcagaccctcaacgacctcttccgtgccatcgaggagaccagcaatgacatggagtatgaggtctccatgtcctacctggagatctacaatgagatgatccgggacctgctgaacccctccctgggctacctggagctgcgggaggactctaagggggtgatccaggtggccggcatcaccgaagtctccaccatcaatgccaaggagatcatgcagctgctgatgaaggggaaccggcagaggacccaggagcccacggccgccaaccagacgtcctcccgctcccacgcggtactgcaggtgaccgtgcgccagcgcagccgggtcaagaacatcttgcaggaggtgcggcagggccgcctgttcatgatcgacctggctggctcagagcgcgcctcgcagacacagaatcgtgggcagcgtatgaaggagggggcccacatcaaccgctcactgctggcactgggcaactgcatcaacgccctgagcgacaagggtagcaacaagtacatcaactatcgcgacagcaagctcacccggctcctgaaggactctctgggaggaaacagccgcacagtgatgatcgctcacatcagtcctgcgagcagtgccttcgaggagtcccggaacaccctgacctacgccggccgggccaagaacattaagactagggtgaagcagaacctcctgaacgtctcctaccacatcgcccagtacaccagcatcatcgctgacctgcggggcgagatccagcgactcaagcgcaagattgatgagcagactgggcggggccaggcccggggccggcaggatcggggtgacatccgccacatccaagctgaggtccagctgcacagcgggcagggtgagaaggctggcatgggacagcttcgggagcagctcgccagcgccttccaggagcagatggatgtgcggaggcgcctgctggagctggagaaccgcgccatggaggtccagattgacacctcccgacacctgctcaccatcgccggctggaagcatgagaagtcccgccgggccctcaaatggcgggaggagcagcgaaaggagtgctacgctaaggacgacagcgagaaggactcagacacaggtgatgaccaaccagacatcctggagccacccgaggtggccgcagcccgggagagcattgcagccctggtggacgagcagaagcaactgcgcaagcagaagctggcgctggagcagcgctgccgggagctgcgcgcgcggggccggcgcctggaggagacgctgccgcggcgcatcggctccgaggagcagcgcgaggtgctcagcctgctgtgccgcgtgcacgagctcgaggtggagaacaccgagatgcagtcgcacgcgctgctccgcgacggtgcgctccgccaccgccacgaggccgtgcgccgcctggagcagcaccgcagtctctgcgacgagattatccagggccagcggcagatcatcgacgactacaacctggccgtcccgcagcgcctggaagagctctacgaagtgtacctgcgggagctggaggagggcagcctggagcaggccaccatcatggaccaagtggcctccagggccctgcaggacagctccttgcccaaaattaccccagcaggaacctcactgaccccagattctgacctggagagtgtgaagacattgagctctgatgcccagcacctgcagaacagcgccctccctcccctcagcacagagagtgaaggccaccacgtgttcaaggctggtactggggcctggcaggcaaaaagctcctctgtgcccaccccacctcccatccagctcggcagcctggtgacgcaggaggccccggctcaggacagcctgggcagctggatcaactcttcccctgacagcagtgagaacctgtcggagatccccttgtcccacaaagagaggaaggagatcctgactggcaccaagtgcatctgggtgaaggccgcccggcggcgctcgcgggccctgggaaccgaggggcgacacctgctggcacccgcgacagagcgcagcagcctgtccctgcactcactgagcgagggcgacgatgcgcggccaccaggcccactggcctgcaagcggccgcccagccccacactacagcatgctgccagtgaggacaacctgtccagcagcacgggcgaggccccgtcccgggcagtcggacatcatggggacggccccaggccctggctgcgtggccagaagaaaagcctgggcaagaaaagggaggagtcgctggaggcaaagagaaggaagcggaggtcccgatccttcgaggtcaccgggcaagggctctcccaccccaagacacacctcctggggccccatcaggcggagcgcatctcggaccacaggatgccagtgtgcaggcacccagcccctggtatccggcatctgggaaaggtcacgctacctttggccaaagtcaaactccctccaagccagaacacgggcccgggggactcctcacccctggctgttccccccaacccaggtggtggttctcgacgggctacccgtgggccccgcctgccccacggcacaagcacccatggcaaagatggatgctcccggcataactgaggggccctgcctggaactggctctctcacctcccaagactgaatggggtctagcagggcatgggaggtggaggctgggcagatggagatgaccaggaagtaagctcaggatctcagcaggccagggctcctgagacccaggaactggggtctctgcccaaccctcccatgctttcagtgccactggggaaaagaggtgaggccaggggacatggccaggacggctgggctccctggcttcccagccctggacagaatgctgttgccaaaacctgcacagccctgaggccagcctcggccttggtaacggaggaaagcagctgacagtgagacggggctcctggcccacgtgtggggcacgggcatcctggatggttggggaggcgccgacaggcacttcacgtattacaattggggatgtgggtgagggagggaatctggttttgttacttggcagtggttttttctcacccttcctttttaacaataaaatcccatttgggtcttgaaaaaaaaaaaaaaaaaaaaaaaaaaaa

SEQ ID NO: 6478 - DNA, 4900 bp, Homo Sapiens
  NM_153211
aatcatgcttacgcatataggttaaccacagttatgtaagcaggttctgagaaaaggtgagaaagagaatggagagttttgctacaacagaggcaggattctgaatttatttccagctgcccatcttgtccctcctggagacctaacccctccagcacctacacacacagcctctttagaagcaactatcctgccactggctcagaaaggctgagtcctaagaattctaaaatcttgctcctaagaaatctcaagcttcttttgtgaaatcatagcccactaatgagttttggagccagctttgtcagttttttgaatgccatgatgacatttgaggaagaaaaaatgcagttggcatgtgatgacttaaaaaccacagaaaaactgtgtgaaagtgaagaggctggagtaattgaaacaatcaagaataaaattaagaagaacgttgatgtccgaaaatccgccccctctatggttgatcggcttcagaggcagataatcatagctgactgccaggtttacctggctgtgctttcatttgtaaaacaagaattgtcagcttatatcaaaggtgggtggatccttaggaaagcctggaagatttacaataaatgctatctggacatcaatgcccttcaggagctgtatcagaagaagctaactgaagagtccttgacttctgatgctgcaaatgataatcacattgtggctgaaggggtgtctgaggagtctctgaacagactgaaaggtgctgttagctttggatatggcctttttcacctttgcatatccatggtgcccccaaacctgctcaaaatcatcaacctgctgggttttcctggagaccgcctacaggggctttcttcactgatgtatgcaagcgaaagtaaggacatgaaggcccctttagctacattagctctgctctggtatcatactgtagtccgcccgttttttgccttggatggcagtgataacaaggcaggcctggatgaagctaaggaaattctccttaaaaaagaagctgcttatccaaattcttccctctttatgtttttcaagggacggatacaacgactagagtgtcaaatcaacagtgccttgacatctttccacactgctttggaacttgcagtagaccagagagaaattcaacatgtctgtctgtatgaaattggttggtgcagcatgatagagctcaatttcaaggatgcatttgattcctttgagaggctaaaaaatgagtccaggtggtcccagtgctattatgcctacttgactgcagtttgtcagggagccactggtgatgtggatggggcacagattgtctttaaagaagttcagaaactcttcaaaaggaaaaacaatcagattgaacagttctcggtgaaaaaggcagagcgatttcggaagcaaaccccaaccaaagcgctctgtgtgttggcgtctattgaagtgttgtacttgtggaaagctcttccaaactgttccttccccaacctgcagaggatgagtcaagcttgccatgaagtggatgactcatctgttgttggattaaagtatttgcttcttggtgccatacacaaatgtctaggaaactcagaagatgctgttcagtacttccagcgagctgttaaagatgaattgtgtcgtcagaataatttatatgttcagccgtatgcctgttatgaacttggctgtcttctattagacaaaccagagactgtaggaagaggcagagctctacttcttcaagcaaaggaggatttctctggctacgactttgaaaacagattgcatgtccgcatccatgctgctctggcctctctgagggaattggttcctcagtgacagacccggaacacccgctccgtccctccccacccagggtccgcactttaaaataaaagcagaggacaaagctcttgtgaagatgggcttttcttctgaaaaccacctgtgccagggacacattttcccagttaagctgacatattaaagatctcctcttttaaacatgtagctgaaaagtaataatgatgttgaggaggatgatgatggtaataataactaaccacctggggagagggttaagtgaccttgctcaaacgttttagttttgtgatttattatttttaaaataaaatcaaacggaacatccaacccaagatcctgtaggaacacctaccttaagcacatatctgaatgggtaacatgatgaggtacctgtaaaattattaacaatatcatgacatagcatttatatttgtgttttgaaaaaataaaagtgctttctagtgttttactttatcctcaaaatactccagtgaataacatagcacagatattcttaaccccactttgcagacagtgaaactcaggcacaaaaaggcaaattgacttatcccaattaattattcctgttatcagcagagcaatgaatagaaagcagatctcctgaccaccaactgacttttattgtaaaaataattcatgttaataggccagaattccatgttttacttattaaaagaacaaaatcttcagctgaagttatgtcaccagaaatagtcatctccagattgtctacagaatgtttcaaagcgatggacactctttttcctttgaaagccaaccaagtaagagcaaatattaatagaagataattttacaactaaaagtgtgactcttttgctaatctattagcctagtctatagattagacaaacagtatctacattttaggagtttacctttctttgtgaaaattgtcaaattaccaacttttggaaatcttttgacacattacttgaaaaggttattcgtgaatgaacatagattttggcctcaaaatatttgctggtggaacatttgctgggctacacagtgccaggatttaatcattttccccttagctcaggttatttagatattatacaaggaattcaaagttatttttttattcttcattgctaatttttgtcatttaatttacctccatgcccggtactgcaaacctgtggttttgaagaatctaaatacctcagtcacttttaagaatctctgccataatttggctcaatgtttaaggttagatttttaaagaaatttttattgagctaaaggatatcattttagggtatcgtttatttacaaattcttttggctgaaacatgatctcatattaatattttaatatttcttttcaaaataaaacagaaaagcaagtagaatgttggcaaattttatctgatttgaccttgttttgagggaatagtcataatttctttgaaagaagttatttctcactgattttggctaaacagtattcatatttcttcatctctgttactgaccacttttcagtagactgtttccaaaatgtgtattcacattgactttctccctgatgtgaattccgtgtgggttttagataatagtaagagagaagagattgctctcctatattcagtgaatgagaagggaacttttttctgaagagcaaaattggtgcccaaaaatattggacatctgttttttgtttttttttttttttttttttttttttgagacggagtctcgctctgtcacccaggctggagtgcagtggcgtgatcttggctcactgcaacctctgcctcctgggttcacaccattctcctgcctcagcctcccaagtagctgggactacaggcacccgcaaccacacccggctaattttttttgtatttttagtagagatggggtttcaccatgttagccaggattgtctccatctcctgacctcgtgatccacccgccttggcctcccaaagagctgggattactggtgtgagccaccgtgcccggcctggacatctggttttaactagatggaagggaagaacattatgaatctttaaaatacggctgttgccatttttctctcttcttaacatgcagcataggtgacaagcttttctgtcatcatcatggagcattctgaatcatgacatttttgtttgagagttcattcttgaattttcagttcaaaatattgtttgaactattattccacattcaaagattatataaggtcctgtgcttttgaatctttttcaaaacatttatttctgcctgcttaaaaaaaatacttttatttccccacagagagttcaggacttcagattagtttgtgttcagctcacttaactggatagacaattttgcgttttgcaacaccatcctgtaggttttctttactagtcaaagtgtaggtctttttaaaatttttaatctttatttttatttttattttgaaacagagtctcactctgttgcccaggctggagtgcagtggtgtgatctgtgctcactgcaacctctgtcacccgggtttaagcgattcttctgcctgagcctcccaagtagctgggattacaagttcctgccaccgtgcctggctaatttttgcagttttagtagaggcagggttccaccaccttggccaggctggtcttgaactcctgacctcatgatccacccaccttgtcctctcaaaatgcttacaggcatgaaccactgtgaccggccaggtctttttttttttaaagagtctatcctaggcttggtacagatggcgcctgtggtaaatctgtgttaacatggtggtagaccatggagaatgggtagatggagcttctagactccaaaacaacaaaaccacagtgtgagtacactgtcccattaggttgactgaagtctgagtacattttctggcctgcgtgccgtgacttatccaacctgtgaactgattgtgatctgcttggtaacttggtttggtgtaaactgctcttaaccctttgctgatgaagaaaataatcatataagtggaactatttgcatctaaaaaaaaaaaaaa

SEQ ID NO: 6479 - DNA, 3044 bp, Homo Sapiens
  NM_153213
ctgacatgctgacatcgccccctgaggacttggctgcaaccccagagcccccagggtgtcccggagccctggaccgtgctggcagctggacggagctccctggctgagggccaggtgggtggcagagcaaaagaggaatggactgtgggccacctgctaccctccagccccacctgactgggccacctggcactgcccaccaccctgtagcagtgtgccagcaggagagtctgtcctttgcagagctgcccgccctgaagcccccgagcccagtgtgtctggaccttttccctgttgccccagaggagcttcgggctcctggcagccgctggtccctggggacccctgcccctctccaagggttgctatggccattatccccaggaggctcagatacagagatcaccagcggggggatgcggcccagcagggctggcagctggccacactgtcctggtgcccagcccccagctctggagggaccctggagtccccgacacacacagccacagcgccgggccagccacggctcggagaagaagtctgcctggcgcaagatgcgggtgtaccagcgtgaagaggtccccggctgccccgaggcccacgctgtcttcctagagcctggccaggtagtgcaagagcaggccctgagcacagaggagcccagggtggagttgtctgggtccacccgagtgagcctcgaaggtcctgagcggaggcgcttctcggcatcggagctgatgacccggctgcactcttctctgcgcctggggcggaattcagcagcccgggcactcatctctgggtcaggcaccggagcagcccgggaagggaaagcatctggaatggaggctcgaagtgtagagatgagcggggaccgggtgtcgcggccagcccctggtgactcacgagagggcgattggtccgagcccaggctagacacacaggaagagccgcctttggggtccaggagcaccaacgagcggcgccagtctcgattcctccttaactccgtcctctatcaggaatacagcgacgtggccagcgcccgcgaactgcggcggcagcagcgcgaggaggagggcccgggggacgaggccgagggcgcagaggaggggccggggccgccgcgggccaacctctcccccagcagctccttccgggcgcagcgctcggcgcgaggctccaccttctcgctgtggcaggatatccccgacgtacgcggcagcggcgtcctggccacgctgagcctgcgggactgcaagctgcaggaggccaagtttgagctgatcacctccgaggcctcctacatccacagcctgtcggtggctgtgggccacttcttaggctctgccgagctgagcgagtgtctgggggcgcaggacaagcagtggctgttttccaaactgcccgaggtcaagagcaccagcgagaggttcctgcaggacctggagcagcggctggaggcagatgtgctgcgcttcagcgtgtgcgacgtggtgctggaccactgcccggccttccgcagagtctacctgccctatgtcaccaaccaggcctaccaggagcgcacctaccagcgcctgctcctggagaaccccaggttccctggcatcctggctcgcctggaggagtctcctgtgtgccagcgtctgccccttacctccttccttatcctgcccttccagaggatcacccgcctcaagatgttggtggagaacatcctgaagcggacagcacagggctctgaagacgaagacatggccaccaaggccttcaatgcgctcaaggagctggtgcaggagtgcaatgctagtgtacagtccatgaagaggacagaggaactcatccacctgagcaagaagatccactttgagggcaagattttcccgctgatctctcaggcccgctggctggttcggcatggagagttggtagagctggcaccactgcctgcagcaccccctgccaagctgaagctgtccagcaaggcagtctacctccacctcttcaatgactgcttgctgctctctcggcggaaggagctagggaagtttgccgttttcgtccatgccaagatggctgagctgcaggtgcgggacctgagcctgaagctgcagggcatccccggccacgtgttcctcctccagctcctccacgggcagcacatgaagcaccagttcctgctgcgggcccggacggaaagtgagaagcagcgatggatctcagccttgtgcccctccagcccccaggaggacaaggaggtcatcagtgagggggaagattgcccccaggttcagtgtgttaggacatacaaggcactgcacccagatgagctgaccttggagaagactgacatcctgtcagtgaggacctggaccagtgacggctggctggaaggggtccgcctggcagatggtgagaaggggtgggtgccccaggcctatgtggaagagatcagcagcctcagcgcccgcctccgaaacctccgggagaataagcgagtcacaagtgccaccagcaaactgggggaggctcctgtgtgatgggcagccatggcctaggaccccacctccatgcctggctcctggatggtcctggaggggcctgcagtgtctccattccccaagctgctcctgctggcacttcgcttctgtggccttggcattgagggcacaggctggacacaggaatgggggcgcctccagagggtctctccgtcctcatgctcctcagtgtccacacttcaaggccaaggatagtttcttcctctgacatggggaccataacaggtgatcactgatacctggcaaagactggggccctctcctttctatgtcctcaatcctgcctgactcttggtccttctggcagggacctggctggggaacgttctggtgctgatggtgctgggacctatatgtatatttatatatatctggggtcttgtctaccacctcccctggtcagagcctgagtgggtgctggttgctgtgtcttgtctgtaaataaactcctatcatgccttttaaaaaaaaaaaaaa

SEQ ID NO: 6480 - DNA, 2329 bp, Homo Sapiens
  NM_153214
cttagcccaggggccggcgcctccccgcctcgcgcggactgtctcgtgcgggcagctgcgggcgcacctggaccctcgcaaggcccgggcggcgccgatccccgcgggacgcgctgcgctcggggcctcccgcctccccccctgccccagccgccccccggccgcgcggcgccccgcaccctgcagggacggctgccgcatcgctgggacaaactcggcagcggaggcaaagttatttcccctcccaggcagcgggattccgactggcaagatggtgcccagctctccgcgcgcgctcttccttctgctcctgatcctcgcctgccccgagccgcgggcttcccagaactgtctcagcaaacagcagctcctctcggccatccgccagctgcagcagctgctgaagggccaggagacacgcttcgccgagggcatccgccacatgaagagccggctggccgcgctgcagaactctgtgggcagggtgggcccagatgcccttccagtttcctgcccggctctgaacacccccgcagacggcagaaagtttggaagcaagtacttagtggatcacgaagtccattttacctgcaaccctgggttccggctggtcgggcccagcagcgtggtgtgtcttcccaatggcacctggacaggggagcagccccactgtagaggtatcagtgaatgctccagccagccttgtcaaaatggtggtacatgtgtagaaggagtcaaccagtacagatgcatttgtcctccaggaaggactgggaaccgctgtcagcatcaggcccagactgccgcccccgagggcagcgtggccggcgactccgccttcagccgcgcgccgcgctgtgcgcaggtggagcgggctcagcactgcagctgcgaggccggattccacctgagcggcgccgccggcgacagcgtctgccaggacgtgaacgagtgtgagctctacgggcaggaggggcgcccccggctctgcatgcacgcctgcgtgaacaccccgggctcttaccgttgcacctgccccggtggataccgaactctggctgacgggaagagctgtgaggatgtggatgaatgtgtgggcctgcagccggtgtgcccccaggggaccacatgcatcaacaccggtggaagcttccagtgtgtcagccctgagtgccccgagggcagcggcaatgtgagctacgtgaagacgtctccattccagtgtgagcggaacccctgccccatggacagcaggccctgccgccatctgcccaagaccatctccttccattacctctctctgccttccaacctgaagacgcccatcacgctcttccgcatggccacagcctctgcccccggccgagctgggcccaacagcctgcggtttgggatcgtgggtgggaacagccgcggccactttgtgatgcagcgttcagaccggcagactggggatctgatccttgtgcagaacctggaggggcctcagacgctggaggtggacgtcgacatgtcggaatacctggaccgctccttccaggccaaccacgtgtccaaggtcaccatctttgtatccccctatgacttctgagggtacacaggggcactggggtgtggagagctgacctcatttctcttccccgaaggctcagcttcgggcaccgactgcgtggagcctcccgcctgttcccgccctctcaccagtgcacccaggcttctagggcagcgttgcacggcgccccatggaatagcacggaagagcagccacaaaactcaactgctgccatcactctttttttttttctgctttgaggcccttcccttagattatgcactaactttcttaaaactttttcatccaggggatgggtggctttccaaaatgctgtgcaaatggccttgtgagtttgaactagctggggagagaaaaggtggcaatgtgtgtcaggtgactatcagcccttctgcctttttgtagccaggcttgctatgaatgaaacggttctagtcgtgcggggggccctagtcatgcctctgcgcatgtggcataggaagtggagtctcctcccatgacccagcacgttgttcttatctgccttttcctctgtgacatgcctgcctgcctgccttctcatcagagagtcacaggagggccttaaaccccacgcagatccttctagaccaaggacccattgttaaaagcatggattctgcctgagttacttcccttttgagaaatcatatctcaaatacataacctggtaatataactgaaaaaataaaagtgattgctccttccaaaaaaaaaaaaaaaaaaaaaaaaaaaaaa

SEQ ID NO: 6481 - DNA, 2298 bp, Homo Sapiens
  NM_153220
cggttctgccctccttgtacccgcggcgcgctgcggcccgtggcgcggccccgttcccgcctagccccgtcggcctccttcccctcccggagccgcgcgtgaggacggctgaggccgcaggagtgatttggagaacaatgcatgtaagtctgacatcatgatgtccatccggcaaagaagagaaataagagccacagaagtttctgaagactttccagcccaagaagaaaatgtgaagttggaaaataaattgccatctggttgtaccagtagaagattatggaagattttgtcattgacaattggtggaaccattgccctttgcattggacttcttacatctgtctaccttgccacgttacatgaaaatgatttatggttttctaatattaaggtatggagtttctttgaccattgtatcattcactcagtgggatctccagtagtaagccatgtggatgaatgaccaaggcaacacagttttgccataaagaatccaatctctagaaaggttggactatagagtgaaataacttttgtgtttattattttaaaataacatattagaatctttttttaaatttttctttattatttatttatttttgagatggagtctcactctgtcacccaggctggagtgcggtggcgcaatcttggctcactacaacctctgcctcgcaggttcaggtgattcttctggcttagcctcccaagtagctgggactataggtgcgtgccaccacacccagctaatttttgtatttttactagagacggggtttcagcatattgaccaggctgatctcggactcctgaccttgtgatctgcctgtctcagcctcccaaagtgctgggattacaggcgtgagccactgcgtccagccagaatctttatttttcattttaattttttgagatagggtattgctctgtcgcccaggctggaatgcagtggtgcaaacatgggtcgctgcagcctcaacctcctgggctcaagtgagtatcctgcctaagcttcctgtgtcactgggaccccaggcatgcaccacctcaccaagctaaatttgatttttttgtagagacagggtctcactttgttgcccatgctggtctcgaactcctgggctcaagcgatcctactgccctggtcttccaaaatatgagaatgagccatagcacccagcccagaatttttataatcaagtgagttttttctttttcattaacttattccatttatttagcagttattctaaattagtatttttcaagttatagattgtgaaattagtgcagtaggtcatgagtaacatttttcttaatgaaatcaaaaagaaagaatactatcacatctagtagggttgaggattgttttgtgaaacttttaattttatatatatatatatatgcacaaactgggtcacagtatacaaggtacttccttttcttttttttcttgttggctacaacaggaaaaaaaaaaaaacagaaaaggaaataaaaaagccactgctttaaatcatggggtctaaatgtggctccacagagggtcctcagcatgttcatgactatctaatactctgtgcaagtggttttgcagggcatagggcgatggggaagccatatgtttccagggaaaggaactgtaattttaatcagattttcaggagggttagccgggcgtcacgcctgtaatcccagcactttgggaggtcgaggcgggcagatcacttgaagtcaggagttcaagaccagcctggccaacatggtggaaccctatctctactaaaaatacaaaaattagccgggcatggtgacacacacctgtaatctcagctactcaggaggctgaggcacaagaatcacttgaactcgggaggaagaggttgcagtgagctgagatcccaccactgcactccagcctgggcgacagagcaatactctttatcaaaaaaaaaaagaaaaaagttgagggggtggtctgtgactctttaaacacgtttccttgttttctttctctctctctttttcaacatttctagaactcctcttggcattgttttcagaactcgtatataacttacatgtggaaatttgcatccaaatataccttacattttaatctaatatgtcatgatctttaacctaaactgtggtgtctaatgactagttgcttgtaaaaataaacaaacaccttcaaagccaaaaaaaaaaaaaaaaaaaaaaaaaaaaaaaaaaaaaaaaaaaaaaaaaaaaaaaaaaaaaaaaaaaaaaaaaaaaaaaaaaaaaaaaaaa

SEQ ID NO: 6482 - DNA, 4349 bp, Homo Sapiens
  NM_153231
cgtttgtggtagggcgtgttggtccgcgctctcagaactgtgctgggaaggatggtagggcgactggggctcacctccgcaccgttgtaggacccggggtagggttttgagcccgtgggagctgccccacgcggcctcgtcctgccaacggtcggatggcggagacgaaggacgcagcgcagatgttggtgaccttcaaggatgtggctgtgacctttacccgggaggagtggagacagctggacctggcccagaggaccctgtaccgagaggtgatgctggagacctgtgggcttctggtttcactagggcatcgggttcccaaaccagagttggtccacctgctagagcatgggcaggagctgtggatagtgaagagaggcctctcacatgctacctgtgcaggtgacagagcacaagttcataccagagagccaaccacttacccgccagtcttatctgagcgggcctttctccggggaagcctgactctggaatcttcaacctcaagtgattcgaggttggggagagctagggatgaggaagggcttttggaaatgcagaaaggtaaagtgacaccggagacagacctccacaaggagacccatcttgggaaagtgagccttgaaggtgaaggtttggggacagatgatggtctgcactccagggcattacaagagtggttatcagcagatgttctccatgaatgtgactcacagcaaccagggaaagacgccttgattcatgcagggacaaacccctacaaatgcaagcagtgtgggaaaggttttaacaggaagtggtatctcgttcgacatcagagggttcacactggaatgaaaccctatgaatgcaatgcatgtgggaaagcctttagccagagctcaactctcattcggcactacctcatccacaccggggagaaaccatacaagtgccttgagtgtgggaaggccttcaaacgcaggtcgtacctcatgcagcaccatccaatccacactggagagaaaccctatgagtgtagtcaatgtcgaaaggccttcacccaccggtctacttttattcgccataataggacccacactggagaaaagccctttgagtgcaaagaatgtgagaaagcctttagcaatagagcccacctaattcaacattacatcatccacactggagagaagccctatgattgcatggcatgtggaaaggccttcagatgcagctcagaactcatacagcaccagcggattcacactggggagaagccctatgaatgcacccagtgtgggaaagcctttcaccggagcacgtacctcattcagcactctgtcatccacactggggagatgccctacaagtgtatcgagtgtgggaaggccttcaaacgcaggtcacaccttctgcagcaccaaagggtccatacatgagagaaccctattgctgcaatgaatacagcaaggcctttacccactgttattttatcattcataatgggacccacactgtaggaagaagtccctcgagtgcaaagaatgtcaggaaacttttcattttttttgtcagctctttcttaactaacacatgagcagtcactttggagagaagccctgtgaatacagtgaatgtaaggatcccttcagtcaccactcagttctcactcattgcagaaggattcataccagggggaaatgtggaaggcattccatcaacatcagagaactcatgctggagaaagacattccaaatataactattaaggacagtctttggccagagcagaaatcttactatctgagaatcataatgaaaagttactacataattgttattgatgtgagaaaactttgtgaccaggttgtcacttgcttgtcctataaagagccatgctggaatttgacccaccttgggattttctctatgaacttatgaaaaccttcagttacaggacagagtgcacagtttcctctcctgtgggaaggagagttgactcttgaggacccccaccctcctgcatcctctctctggaaggctgcatgtattgtagctgtggctgtacttgtacctaaggccctgggttcaagagagttggagaaacccctctagaaacatattggctgtcatcaaagggttctttccaggcctgaggacctaggccccagtttgtcccaaagcaggagtgttttccatgggataaaggacaccctaggtttttcttagcttccagctctttccatacagtcttcactcaagtgtttggtacaaggatctactatgaacttgctgctgtgataggcaagaatctcatgagacacctgtcatttagctccatggccactcactgttgtggtcatacttagaagagtgggatgcagtggatggctgggctatgggtcctgcccttgagcagggaaggaacttactgtctaatataggaaaaacacatgagaacaggtgcaatatattgacttaaacttgtttagcacccgtttttaagtcagtagaagttttgaacttacagtaaaagttgtgaacttctgtatgttttccacagtttatgattgaggtaaaacatgttttttgttttgtttttgagacagagtttcactcttgttgcccaggctggagtgcagtggcgccatctcagctcactgcaacttctgcctcccgagttcaagggattctcctgcctcagcctcccgagtagctgggattacaggcgcccaccaccatgcccggctagtttttttgtatttttagtagagacggggtttcaccatgttggccaggctggtcttgaactcttgacctcatgtagtccacccgcctctgcctcccaaagtgctgcgattacaggcgtgagccaccgtgcccggcagagaaaaactgcttaaggttgaaaagagaaatttaagaaattgctgacggaataaaaacataatagaactacaacaccgaaggaaatgaaagaagcaagaaggaaagcaccagaagtgatttggaagagaaatcctaaaatgaatgtgaacaacagagtgatcagaagagtgtagggaattaatagtttctttaaacaagccatctcacaatggaagcctgtgtgtcttgaaattgctgtggttattattcactctgccctttgaagaactgcagaaattcatagggcaatgttaagtgtttgtgtctccaaaaaagatgttggagtcgttaccctcagaacctcaggtaatcatgttagttaatccattaggttagttcctaattgactatgactgtgtccttagaaaaatgggaaatttggtcacagaggcagatgtacagagggaagacgatgtgaagacacaggaagaacatcttcaagccaaggaacacacggggctaccagaagccgagatagaagcatggaacatatgttctagtaagaagtgtctgggttgttttggttttttttctttggagtttttgtggtattaaattatttttaaattatgttttattgtagacctcacaattcttttttttctttttcactcaaactacagcaaaatattatatttctatcctatatttcatgggcttacctctagccaattgtttttaactgccatgtaatattttacatcatgaagctttcatccttgattcaaatcctctgattatggacatgtatttcctccattttcctgctatgaaatatatcaccaccagcttgattcaaccttaaaaataaggtcatcagtattatgttctaaataaacttatggccatacatgagaaatgtaccttgcagctgaatggctaggtcatatggtgatctagtatgtaactggaattatgttatacattgcccttcctctcccataagatggacaaaagtgtttctgtatcactgtgtcccagacaatatttagaattacccagctttccagtttttactttagaagtttaaagtgatatagaatatatctggtatttctcatattgaaatacatttgaacattagttcatatcctttcattgccttttgtttttcctcttctgtcaatggtctactcatatgttggcctgtctttatttgtatcttgactttttattgtgtattttgtttatggtggggtactttattggtgattaatacgattttcaagtatattatatgggctagtcccttgatactattgacactgtatttatcttcagtctcttgttggtatctaactttggttctgaagtttatggaatggaagtatttaattggaaagattaaacatattgattttaattaaaaaaaaaaaaaaaaaaaaaaaaaaaaaaaaaaaaaaaaaaaaaaaaaaaaaaaaaaaaaaaaaaaaaaa

SEQ ID NO: 6483 - DNA, 1242 bp, Homo Sapiens
  NM_153236
agacacttttaactcacagtaaaagcaaaagcaacagctcaagcagcctccttggagaaaacctgaaaattcaacttgttcaagagaaggtcttgtacgtgcctaagttctagagcctcctgacgtgagcatggctgagagtgaggaccgctccctgaggatcgttctggtagggaaaactggaagtgggaaaagtgcaacagcgaacaccatccttggagaggaaatctttgattctagaattgctgcccaagctgttaccaagaactgtcaaaaagcatcccgggaatggcaggggagagaccttcttgttgtagacactccagggctctttgacaccaaggagagcctggacaccacctgcaaggaaatcagccgctgcatcatctcctcctgcccagggccccatgctattgtcctagttctgctgctgggccgctacacagaggaggagcagaaaaccgttgcattgatcaaggctgtctttgggaagtcagccatgaagcacatggtcatcttgttcactcgcaaagaagagttggagggccagagcttccatgacttcatagcagatgcggatgtgggcctaaaaagcatcgtcaaggagtgcgggaaccgctgctgtgcctttagcaacagcaagaaaaccagtaaggcagagaaggaaagtcaagtgcaggagttggtggagctgatagagaaaatggtgcagtgcaacgaaggggcttacttttctgatgacatatacaaggacacagaggaaaggctgaaacaacgggaagaggttttgaggaaaatctacactgaccaattaaatgaagaaattaaactagtagaagaggataagcataaatcagaggaagaaaaggagaaagaaattaaattactaaaattaaaatatgatgaaaaaataaaaaatataagggaagaagctgagagaaatatatttaaagatgtttttaataggatttggaagatgctttcagaaatatggcataggtttttgtcgaaatgtaagttttattcttcctaatttactgtgatttgttaatggatgaattgtattttgcaaagatagttagagaaatacctccttccccttagctttattaaggtatcattgataaataaaaataaaatatgtttaatgtatataatgtgatttttaaatatatatatatatatacacacattgtgaaataatgaaataaaggtaattaacacatctaaaaaaaaaaaaaa

SEQ ID NO: 6484 - DNA, 5356 bp, Homo Sapiens
  NM_153251
tggggtgggggcggggcctggctgggcgccgggacgggaggagtcccggcggcgcctcggacttttgctcccacaagtcctgcctcggaggcgggggagctggaccagcagccgcctggagcgtccgagtcaccgtcgccggggctcccgcgctccccagaacggtgggacgcggggctcggcagccgccagcggaacatggcgccctggacgctgtggcgctgctgccagcgcgtcgtgggctgggtgccggtgctcttcatcaccttcgtggtcgtctggtcctactacgcgtacgtggtggagctctgcgtgtttactatttttggaaatgaagaaaatggaaagaccgttgtttaccttgtggctttccatctgttctttgttatgtttgtatggtcctattggatgacaattttcacatctcccgcttccccctccaaagagttctacttgtccaattctgaaaaggaacgttatgaaaaagaattcagccaagaaagacaacaagaaattttgagaagagcagcaagagctttacctatctataccacatcagcttcaaaaactatcagatattgtgaaaaatgtcagctgattaaacctgatcgggcgcatcactgctcagcctgtgactcatgtattcttaagatggatcatcactgtccttgggtgaataactgtgtgggattttctaattacaaattcttcctgctgtttttattgtattccctattatattgccttttcgtggctgcaacagttttagagtactttataaaattttggacgaatgaactgacagatacacgtgcaaaattccacgtactttttcttttctttgtgtctgcaatgttcttcatcagcgtcctctcacttttcagctaccactgctggctagttggaaaaaatagaacaacaatagaatcattccgcgcacccacgttttcatacggacctgatggaaatggtttctctcttggatgcagtaaaaattggagacaagtctttggtgatgaaaagaaatattggctacttccaatattttcaagcttgggtgatggttgcagttttccaactcgccttgtggggatggatccagaacaagcttctgttacaaaccagaatgagtatgccagaagtggctcaaatcaaccttttcctatcaaaccacttagtgaatcaaaaaaccgcttgttggacagtgaatctcagtggctggagaatggagctgaagaaggcatcgtcaaatcaggtgtatgaaaacattatagactggtattttcaattttcatttgcaagaaaatgatcagtggaatgaaataactgaagtataacagaagatatattttttaaaacggaaagcctttgtacagttcctgggattcacagaagcactactccagagcagaatgatgccttaatcttaagtgtccatttgtgcagcattgacttagagctacaaaagtgacttaatgttattctggaaataatacttacctgttatgagttgctataatatgagctgtcatcacattttaacatgcatatgtattttttgatacctgaattacattattagaataagtatccatatacattttcactccaaaaacacaagcttaaaaactttaaagtacatctagggcaaatggtggctgaaagtgaataatattcaaattactgttgcttgtactgtataaggaaaactgcttttttaaattgggtatttgctaatttataattactattttatacttttcaacatttttaataactttttttattgttggctataacagaaggattcagatatctaaatatcatttagaacatagaacacattggtctaattcatcgaaagcttagttatgagcattaatacaaccatgtagtagagcaagtgcccaaggtttaaagggaacttggcagtataagaaatattttgggttctctctgctattttatagctttttttgttgaactttcaggggtatgtacatgggcagagaaacacaaaggtacatgtgctggagaatactggacacagtaggaagaagtataggtgtccagaagaaaatctaagaggaatattgtaatttgttaaaaaaaatagttttgagttttaacagcagttagaataaagcatgctgttgacttcactttcaaatttcagtgtaggtaatgactaaaaattactttgaaactttttacagtaatactgtaatagcttaaacagtgatttaaaatgcaatttaaactaggcaaaaaaaactttagagtaagttttcctcctggctgtcagttggaaattctaacctgagtggtcattttacattcccagtctcttgagaagtggattctactcttagacgcacagtctgaagtctgacttcctaacggcaacccctttatgactagacacatttctcctttttccttttaaaatctaagcgacaggaggtgttgcattaactccaaggaaaagtacagaataaacaatgtagaaatgtcactcctcatttacaccttttagacagacagacacacacacacacacaccccccccaaaataattgattgcttccagtgagtgggtggagatgaatctcagcagcatctgtgagtactacaggttggagcttcctgtctgtaaaatgggactgcaggggagggggtgttgtgaataagttggactggatgacttctaacattctgtgatgcctaattttgcaaaatcacttttcattcacccaataaatttttttcttcttttttccacagagttttgctctgtctcccaggcaggagtgcagtggcgggatcttggctcgctgcaacctctgccttccaggttcaatagagtctcctgcctcagcctcccaagtagctgggattacaggctcatgccaccatgcccggctaattttcacatttttagaagagacgaggtttcaccatgttgaccaggctgatcactaactcctgacctcaaataatccacccacctcagcttcccaaagtgctgggattacaggcgtgagccaccacgccccgccccggtaaattttttggagtaccttctgtatgctaaataataaactaggaatagctctgtcatttcctagtacagcataaattttatggttgctactgtaggtttataatttgtttataatttggcctaatttccatcagccatactaatattggattttaaaaggaggcaactttttttctttttgaaccaaaggaatgagttagctttgaaaacataatttgggatattatagtatggattcttctacctttgtttcaactccttagtaatcttgattctagcaaactagaatgagatttaagagataccaattattgctgggtgtggtggctcatgcctgtaatcccagcactttgggaggccaaggctggcggatcacctgaggtcaggggttcgagattagcctggtcaaaatggcaaaaccctgtctccactaaaaatacaaaaaaaccccaaaactgtccaggcatggtggcacacgcctgtagtcccaactactcgggaggtggaggcaggagaatcacttgaacccaggaggtggaggtcgcagtgagccgagatcgtgccactgcactccagcctgggcgacgagtgaaactccatctcaaaaatatatatatatatcaattaccaactaaaaacataactccagtttggcagtttgcatattataaggagataaatgttaaaacatacttgactactttcagaaatgttctcctggtactttttgcatttctacattcagataaaaagatttgcatgcacctggctaacgccaagggaacttcatttttttcttcactattatgcactttcatggtatagtctttctcagttcttttaatttttgttatttaacatctttaatagcacagcaaacatcttttcagaaattttcagttaaagcctttgaattacttatctttgatttaatttacagccagcattttgccacgttctaaataatatttagctcaactgattcatacgtattaatgaccattctagcaaaggcctacaagtggtgtgggaatcagggaaaggctgcctctttggtatctcaactggtattgattattgctatcaactatttggggagaaaaaatcaaaatgaagccctgtcaaattttagaagtactatctttggtccttcaaacactttgtgatgacaccttaagaaaaataaagttgaagttcaggtcttgccattgccattacagacaaattaggagacttggtttacctgggaacaaatttacttgaatattcagtacctgaaactatgccaaaccaaagagcagctgcagtacattcgttattttaaatgaacaagtttacaaagtttattttcatctatacgtaaggatgatttttttaaaactttttacatattagtggttatgatccaatgtgtcatgagtgaatttaactgtaaggtggtttaaatcaaatatgcaatgtttacttgaattgtatttctattagcagattttgactatgtttacaggacggtttaaattaaggattatcaggcatgtgagatctttcagttatctttaaagtagatgtatattaagggcttagatttaggatctacatattctgggcattgaataggcagtaacttacaaataagttttgcttaccttttgttctagggactagcactgctatcaatggaaagtatttttaactaatctgttattaagaaagtcatatttttgcatttcagccaaaataaagaccgcctgtaataatctgttagaaacagataatacatgtctgaaatccatatgtttcatatgatctaaactgtattttccaatttaaattaaaaatgtaatatagattcagaaaggttcatatttttctaatgacttcattctatattattttgttaggttgcataaagaagcaaggaattgtacttgtattaaaagatgaagaaagctattaggtatatttgtacatgactgcaaatgagtctatgcccgtttaaaagaaaagatggacactattttaaagtgagctttaatatgcttttatataaacaaatttgaagtacagtttagtttggttgtgtttacctaacaagtaccataagccttgtgtttgttcttatttgtataatcctagcctgtgacttaatgttgatgctttgctttgtcttttggctggcctaacctacattgacatgtacacagaacattttaaaactttttttttcaaaagtcataatgaattactttattaataaacaaagtcttgtatttgaaaaaaaaaaaaaaaaaa

SEQ ID NO: 6485 - DNA, 3060 bp, Homo Sapiens
  NM_153259
acacagagccgcctttcagccgcccgagaactgcccgccgcactccgcgactgcggcgcctgctctcgggccggggtctgcgcgcaccacgcggccggcagaaagggtaagagaagggaaccccgctttgcagggctccaacttcggcggacgcgttacggcgagggcgaaatgagtcggccgtgaacggtgtttcctgttccgaatcccgagagccctggaaagttttgaaggaggaggcatggcccggcagccttatcgttttccccaggcaaggattccggagagaggatcaggtgttttcaggttaaccgtcagaaacgcaatggcacatcgtgattctgagatgaaagaagaatgtctaagggaagacctgaagttttacttcatgagcccttgtgaaaaataccgagccagacgccagattccgtggaaactgggtttgcagattttgaagatagtcatggtcaccacacagcttgttcgttttggtttaagtaaccagctggtggttgctttcaaagaagataacactgttgcttttaagcacttgtttttgaaaggatattctggtacagatgaagatgactacagctgcagtgtatatactcaagaggatgcctatgagagcatcttttttgctattaatcagtatcatcagctaaaggacattaccctggggacccttggttatggagaaaatgaagacaatagaattggcttaaaagtctgtaagcagcattacaagaaagggaccatgtttccttctaatgagacactgaatattgacaacgacgttgagctcgattgtgttcaattagaccttcaggacctctccaagaagcctccggactggaagaactcatcattcttcagactggaattttatcggctcttacaggttgaaatctcctttcatcttaaaggcattgacctacagacaattcattcccgtgagttaccagactgttatgtctttcagaatacgattatctttgacaataaagctcacagtggcaaaatcaaaatctattttgacagtgatgccaaaattgaagaatgtaaagacttgaacatatttggatctactcagaaaaatgctcagtatgtcctggtgtttgatgcatttgtcattgtgatttgcttggcatctcttattctgtgtacaagatccattgttcttgctctaaggttacggaagagatttctaaatttcttcctggagaagtacaagcggcctgtgtgtgacaccgaccagtgggagttcatcaacggctggtatgtcctggtgattatcagcgacctaatgacaatcattggctccatattaaaaatggaaatcaaagcaaagaatctcacaaactatgatctctgcagcatttttcttggaacctctacgctcttggtttgggttggagtcatcagatacctgggttatttccaggcatataatgtgctgattttaacaatgcaggcctcactgccaaaagttcttcggttttgtgcttgtgctggtatgatttatctgggttacacattctgtggctggattgtcttaggaccataccatgacaagtttgaaaatctgaacacagttgctgagtgtctgttttctctggtcaacggtgatgacatgtttgcaacctttgcccaaatccagcagaagagcatcttggtgtggctgttcagtcgtctgtatttatattccttcatcagcctttttatatatatgattctcagtctttttattgcacttattacagattcttatgacaccattaagaaattccaacagaatgggtttcctgaaacggatttgcaggaattcctgaaggaatgcagtagcaaagaagagtatcagaaagagtcctcagccttcctgtcctgcatctgctgtcggaggaggaaaagaagtgatgatcacttgatacctattagctaaagttctgctaaagatgattaaagttcaggcatccttatccagcggctgagcagaggaaccccaaatgacttggacaagcagttccaaaatgactctcttatttaattgtggagtgggaaagaggactcacagttagccagctgaccatgactgaagttccagctttactttttataaacttgaatgataaagaatagaccatgggctactactgggcattagtgcaatataacagcgataataaaattctctattagtctgttaatttatgacatgatctcggaatggaaaaagatcatttcagagtgtgcgaaataatagtctttaaccatgtaattaaatatgtgtgtttattgtcaaataaggatttgttttaaaggtgattcttgggtttgaagacatttgttaattcatggtctgtacagaaatgaagctggttgcaataccaatctagagagtccaagctggcgaactattaagctgtttaaagatcacccttggcctggcacagtggttcacacctgtaatcccagcactttgggaggcctaggcaggcagactgagctcaggagcttgagaccagcctgggcaacatggcaaaaacccacctctacaaaaagtacaaaaattagtcgggcgtgatggcaggcatctgtagtcccagctacttgggaagctgaagtgggaggatcacctgagctctggaggtggaggctgccatgagccatgatcgtgccactacactccagcctgggtgacagagtgagatcctgtctcaaaaaaaaaaaaaaatcacccttaaatcaacaaaaagacctcatgctcatgcagtggacatttcttggcctgttttcctgtgggttttcttcagcatgatatgaagcaactgttggcatagccagtgggataaataagaaatggaatcatttggctgcctcgtcacttgtgctaatggtcagttgtacacacatgacatgtggaagtgacctgtagcagcggtcactcattttaacaattgaactctgctgggttgggtatttacctttgtctagaaaagaaatatgatatattttctctaaataaatttattttcatcattccaaaaaaaaaaaaaaaaa

SEQ ID NO: 6486 - DNA, 2427 bp, Homo Sapiens
  NM_153260
tcgatgacgtcacagggcgttcccgcccgggactaagccggggagcgcatcccggctactgcgggtcctgggtcttcacctgcggagccttacggcagctgagcggtgggagggacctgagccgcggcgctaggatgggaaacagtgcgctccgcgctcatgtggaaacggcgcagaaaactggtgtctttcagcttaaggaccgagggctgaccgagttccccgcagacttgcagaagctgacgagcaatctcaggaccatcgacttgtccaacaacaagatcgaaagcctaccgcctttgctgataggaaagttcactctgctgaagagcctctccctgaacaacaacaaactgactgttctgcctgatgagatatgcaatctgaaaaaactagagacgctaagcctaaacaacaatcaccttagagagctgccgtctacctttgggcaactctctgccctcaagaccctgagcctctctgggaaccaactgggagcattacctccccaactttgtagcctacggcacctggatgtgatggatctctctaagaaccagattcgaagtatacctgactcagtgggagagctgcaagtcatcgaactcaacctcaaccagaatcagatatctcagatctcagtgaagatatcttgctgtccacgccttaaaattcttcgcctggaagagaattgtcttgagctcagcatgcttccccagagcatcctcagtgattcccagatctgtctgcttgctgtggaaggcaatctttttgaaataaagaaacttcgagaactggaaggctatgataagtacatggagaggttcacagccaccaagaagaagtttgcgtgaagttctccaggactatggaaaccttacaggatactgacttagaacctctgttggaatgtggctgagtcaaagcctcctgttgttgttaggggtatctacagtaaggagatgatacttcaggagattatatttcactcaatgatcttttctcatttcagggctcttctcaaataagctaaaagaaaaaggatcaggagacaggaaaagtcttccgttttgagtcatgagtagggcaatagacaaggttctcttcaaaaccatcattagtttggctttaagaaaccagtagctagctgctatttatatggtgagggggtgctgcctggtaacagaatagctccacaccacagcttgagattttgtttagtttcactgtgtgagctttcataaagtctgttgccattccatctctgtgttaacacttcatatttttatgaaattcagataatttgtgagaggctggcatggatctaaggatttattatttttattctagtccatcagttcagtcgcagtttttatactaggactttaggatgtacataaatgtgtgactgtttgtcttgattaaaagtgcactttggcctgggcatggtggctcatgcctataatcccagcactttgggaggccaaggcgggtggctcacttgaggctaggagttcaagactagcgtggccaacatgaggaaaccctgtctctactaaaaatacaaaaattagctgggtgtgttggtgcatgcttataatcccagctacttgggaggctgaggcaggagaatcgcttgaacccaggaggtggaggttgcagtgagccgagattatgccactgtactccagcgtgggtgacagagtgagactctgtctcaaattaaaaaaataaaaaataattttttttttttaaagtacgctttgttggctgggcacggcgactcacgcctgtaatcccagcacattgggaggccaaggcaggcagatcacgaggttaggagttcgagaccagcctggccaacatggtgaaaccctgtctctactgaaaatacaaaaattagctgggcgtggtggtgggtacctgtaatcccagctacttgggaggctgaggcaggagaattgcttgaacccaggaggcagaggttgcagtgagccgagatcatgccattgcactccgactctgggcaacagagcaagactctgtctcgggggaaacaaaaaaaaagtgtgctttgtcaagagaagcaccagcagacctctaagaactgctctctaaggctgcggtagcaaattatctactattgcaggtgccttattggtagagggctctgaagagccaaaactgtatatgcaacacttgtaagataaaagggactttaataatcaagattttcttgaagatttgttagaaataatgtcttatttctggtaacctttccctttttgtatttataactctactaaccaaattacctatcaataaaccattactataatattttaaaacaacctatgtttatcaagcttactctctgagtgacagaatatactaaataaagaattttttaatgaaaaaaaaaaaaaa

SEQ ID NO: 6487 - DNA, 2129 bp, Homo Sapiens
  NM_153261
ggacagggcagcggcggtgacccgagctgccgcccgacatgaactcgctggagcaggcggaagccccgcgagttgtatccctgattcctgcggtggtttccggtaactgccaagatctcaaggcttttgagaggagacttactgaatatattcattgtttgcaacctgctactggacgctggagaatgcttcttatagtggtatctgtctgtacagctactggtgcctggaactggttaatagaccctgagacacaaaaggtgtccttcttcacatcattatggaatcacccatttttcaccattagctgtatcactctaataggcttgttctttgctggaatacacaagagagtagttgcaccatcaattatagctgctcgatgtcgaacggtattagcagaatacaatatgtcttgtgatgatacaggaaaactaattttgaaacctaggcctcatgttcaatgacaatcttcactcattgttatgggacttaaaatagcctttcttcgaataagtgatacagcaaaaagccataaaggattccttttgcggttggatatgtaaaggtcatagcagcaactgacaagaagtgtgcaatatttacctggattatcttgatgatggtgactcattatcagtgctttggtacttttgattacctgtgtttcagtattagtgtcactttagtacttcagatcctgcaaatatttttgcagatgaagtatgtatgtatgttactaagttaaacttagaaacagaacctcattcagtttttataatgtatttttgcaaactactgtaaatagcaaatcaatgccaatgttaaacaaagaggaaaacgttgtgtggactttgttctcttgcaccggtatttcaggaacatctgcttgccatccccacagctctttaaaactggctattatgtgtgcctttcattcttacatttctaatcatactgcaggaaaaacattggattcagcttagactgaggaaaactctccattatgttgtaagaaattatagatgttttgagagacactttttgttaaaccagatattgaactccagcaactattgtggttatatttttagttcattgttctcatttaatgctaaatatcctttatattgctttaataattttcttttttttttttttttttttagacggagtctcgctctgttgccaggctggagggcagtggcacgatcttggctttctgcaacctctgcctcccaggttcaagcgattctcctgcttcagccttccgagtagctgggactacaggcgcatgccaccatgcccagctaatttttttgtatttttagtagagacggggtttcaccacgttggccaggatggtttcgatctcctgacctcgtgatcctcctgcctcatcctcccaaaatgctgggattacaggcataagccaccgtgcctggcctctttaataatttttaaaataccctaaaggcttgtgaatatacaagtctactgataaattatgtattgtctgggaatttgatagtcattgttttagataactggattttacgctgtggtagacaggctgtgacactagtgttgcacaggtgtaattggtcatcctatgccttcaccagaataacttgggagtggtgccagaaactagagtctacaattctcactgtttagagagtgttaatgacatactgtgtatgcataatagccgcatgtactataatagcccttaaaattaaactattgggattgctgtaaatattttaaagtactggaggtgccttttacctgtttattagattttgaaaaggtttaaattatttcatgagcaatcttttaaatttcatttaacataaagctgaaaattcaataacaggataaaaaagctttttaacaaggctgccatttaacttaaatgtgttcatcttagctttcacttgtataaaatttgattctttgaactgcagcaataaaaccctcagctcctaagaagtcttaagagggtattctatatattctgctttgttttattttctgtaaattttgtaggtaaatatgtgcattaaaaataaatactttatatataactcgtgaaaaaaaaaaaaaaaaaaaaaaaaaaaaaaaaa

SEQ ID NO: 6488 - DNA, 4097 bp, Homo Sapiens
  NM_153263
agaatcttccggcgtctttccggtggtggtcgtttttgctgcctgcgagcgcgtccgcgggctgggcgtttccggctcgctgggtccgggccaggtaactggagccggaaaccggtggaggtggtgtccgcccgcagaggagcttgcctggtctcggtctgagcgtcgcccagcgatttgccaccgcacgcacgccggatcccgggctttaccgcccgcctttccaggccccgccccgcctaaagtcccatggccgaggcagcgctagtgaatacgccgcagggccatgtgacctttgaggatattgctgtgtacttctcccaggaggagtggggcctccttgatgaagctcaaaggtgcctgtatcatgatgtgatgctggagaacttttcgcttatggcctcagtaggttgtttgcatggaatagaggctgaggaggccccttctgagcagactctttctgcgcaaggagtgtcacaggccaggactccaaagctaggtccttccatcccaaatgctcattcttgtgagatgtgtatcctggtcatgaaagacattttgtacctcagtgagcatcaggggacacttccctggcagaaaccttatacgtctgtggccagtgggaaatggttttcatttggttctaacctgcaacagcaccagaaccaggacagtggagagaaacacatcagaaaggaggagagcagtgccttgcttctgaatagctgcaaaattcctctgtcagacaatcttttcccatgcaaagatgttgagaaggattttccaaccatcctgggccttctccaacaccagaccacccacagcagacaagagtatgcacatagaagcagggagacctttcaacaaagacgttacaaatgtgagcaagttttcaatgagaaagttcatgttactgagcatcagagagtccacactggagaaaaagcttataagcgtagggaatatgggaaatccttgaactctaaatacttatttgttgaacaccagagaacccataatgcagaaaagccttatgtgtgcaatatatgtgggaaatcattcctccataaacaaacactcgttgggcaccagcagagaattcacactagagaaaggtcttatgtgtgcatcgaatgtgggaaatccttgagctccaaatactcacttgtggaacaccagagaacccataatggagaaaagccttatgtgtgcaatgtatgtgggaaatcattccgccacaaacaaacatttgttggccatcagcagagaatccacactggagagaggccttatgtgtgtatggaatgtgggaaatcttttattcattcctatgaccgcattcgacaccagagagttcacactggagaaggggcttatcagtgcagtgaatgtgggaaatccttcatatacaaacagtcacttcttgatcaccatagaatccacacgggagaaaggccttatgagtgcaaagaatgtgggaaggccttcattcacaaaaaaagacttcttgagcaccagagaattcatactggagaaaagccttatgtgtgcatcatatgtgggaaatcatttatccgctcgtctgactacatgcgacaccagagaattcacactggagaaagggcttatgaatgcagtgactgtgggaaagccttcatctccaaacaaacacttcttaagcatcacaaaatccacactagagaaaggccttatgaatgcagtgaatgtggaaaaggcttctaccttgaggttaaacttcttcagcaccaaagaatccatactagagaacaactttgtgagtgcaatgaatgtggaaaagtcttcagccaccaaaaaagacttcttgagcaccagaaagttcacactggcgaaaagccctgtgagtgcagtgaatgtgggaaatgctttagacaccgcaccagcctcattcaacaccagaaagttcacagtggagagaggccttataactgcactgcatgtgagaaggcctttatctataaaaacaaacttgttgagcatcagcgaatccacaccggagaaaagccgtatgaatgtggtaaatgtgggaaagccttcaacaaaagatattcccttgtcaggcaccagaaggtacatataacagaagagccctagcaattgttgggatgtgtaattgtcttattcactgtaggacaccagagagctgatttttcaagggatccaacagacagaaattcaccctcatacatctgcatatcactagttgaaagattcactacaaggtccaagtacttgggaagctttctagagattacttgtactttctaatctgcccagtgttacaacagacactaccatgtggcatatcctcaccgttttcatcagtcactcacatgtgctcaaggaatgcagaccactgtgcttaccaaattctgaagggaataatataataaaagcctgttgagggtcctcttccatcttgctgaactgttcgaggcaaagacaaaacccaactttgaccaagaagagcaatctggattcttgtagcccatggaggtttaccttcttcataggttttttttttttttatgtgattgccatagtgggatattccctctcccacattacccaagagggaaatgggctgtcttaccatgtgctgatgtatgtgctctgccagtgtgaagggtgaacagctccaactttatgtccccccagggacatagtatgagatcggaaaatagttcttagtcctgtttgtcttaatttttattggtttccaaggtctcctaggaaggagagcagagctgtgtggtcctaatcatggtgtcgatgccagatttatttgtaggtccagaggtctccctgagaagaggcatttgtgacaaactcaagtgctgggacctgcatgaattgtttatttgcagtgatgcttcatatttcccagcactgttcatggtatcttatttcccaggtccttcattgtagccatgggcactgaaggactgaattggtaggtaggtcactggttgtaagacctactggggccaggtaagaacagtaattggcccagacaggtaggtgtgataaacagagtagaaaagattgtggccaagaagagtgaatgtgtcccatccaaaggtgcatccagatatgtctgtgttactatggcttcatggtttgggggtatatagaaattctcaggacctcagacctttgattctcctttagcaacacacatcgtcagcataaggcatctaaagattttgtggactcataacttatgtactgtttttgagatgattgctgcacgggcaggaaagcaggatttgagagaacatacaccttgccttccagatatgtggtttttgtgattcacccagatctgttgtgccagttaggaattatctttattacttcccgtttattgccactgctgagaaggctgtccttcctaacttgtgaggagatgaatccttaataataagtaaatcttgtgttatcctatagtctggttttccaaaaggagaggtagatgcatatttttgtgtggaaccatttatcttaaaacattgaggtgcagttttcatacacaaaaccttctatctttttaagaactgtctgtatggtttattgcccagttaatgggttttgatagtcatgttatctcagtaagtgtcttgtcttagaaatatgtgtgtataggctgggtgcggtggctcatgcctgtaatcccagcactttgggaggccaaggcaggtggatcacctgaggtcaggagtttgagaccagcctgaccaacatggtgaaatccagtctctacttaaaatacaaaaattagccaggcgtggtggcgtgcatttgtaatcccagctacacaggaggctgaggcaggagaattgcttgaacctggggggcggaggttgcaatgagccaaggtcgcgccattgcactccagcctgggcgacagagtgacacttctcaaaaaacaaaaacaaaaacaaaaagaacagataagaaatacgtgtgtatatattctattttgtgtgttttcattcaccttatttcattcagtcttccaaatgaaatgttcttaattttgaaaaaaaaaaaaaaaa

SEQ ID NO: 6489 - DNA, 3265 bp, Homo Sapiens
  NM_153265
ggctccgcgtccggcgcctgtttgtgctgcggcgctgtggcaccggacggccctgccaccccacccccgggagccgagagcggccccgggagagtccgagggcccgggggggtctggagactgcggccccgggcccacagcgccccctccaggccccttccccgcgcccgacagcgccccctcggggtggtggtacggcgcccttcgcgcgcgccccggggtgcttccccttcccctctccccggccgtggcccccgcggcttagacgcctcctccgccgccgccgctcggagcaacccgggggccggatggacggggccgcggggcccggtgacggccctgctcgggaggccctccagtctctgagccagcggcttcgggtgcaggagcaggagatggaactggtaaaggcagccctggcagaagcccttcgcctgctgcggctgcaggtgcccccttcctccctgcagggctctggcacaccagctcctccgggggacagtcttgcagcccccccaggactgccacccacgtgcaccccttccttggtgagccgaggcacccagacggagacagaggtggagctcaagtcatcccctggaccccctggcctgagcaatggacccccagcccctcagggggccagcgaagagcctagcgggacccaatctgaaggagggggcagcagcagcagtggtgctggctcccctggccccccggggatcctcaggcccttgcagcccccacagcgtgctgacacgccgcgaagaaattcttcctcctcctcatccccctcagagcggcctcggcagaagctctccaggaaggcaatctcctccgccaacctgttagtgcggtccgggagcacagagagccgtgggggaaaagaccccctctccagccctgggggccctggatctcggaggagcaattacaatttggaaggcatctcagtgaagatgttccttcgagggcgccccattaccatgtacatcccgtctggcatccgcagccttgaggagctgccgagtggcccaccgccagagaccctcagccttgactgggtttatgggtacaggggtcgtgactcccgctctaatctgtttgtgttgcgctctggggaggtggtctactttatcgcctgtgtggtggtgctgtaccggcctggaggaggcccagggggtcctggaggtggcggccagagacattaccgggggcacacagactgcgttcgatgccttgctgttcaccctgatggtgttcgggtagcctcgggacagacagctggagtggataaggatggaaagcccctgcagcctgtggttcacatctgggactcagagacgctgttgaaactgcaggagattggactgggggccttcgagcggggtgttggggccctggccttttcagctgcggatcagggtgcctttctttgtgtggtggatgattccaatgagcacatgctgtcggtgtgggactgcagccggggaatgaagctggctgagatcaagagtacaaatgactcagtcctggccgttggcttcaaccctcgtgacagcagctgcatcgtcaccagtgggaaatctcacgtccacttctggaattggagtggtggagtaggggttcctgggaatgggacccttacccggaaacagggtgtctttgggaaatacaagaaacccaagtttatcccttgctttgtgttccttccggatggagacattctcactggagactcagaggggaacattctcacctgggggcggagcccttcagattccaagaccccaggcaggggtggcgccaaagagacctatgggattgtggcccaggctcacgctcatgaaggttctatcttcgccttgtgtctccggagggacgggacagtgctgagtggtggcgggcgggaccgccggctggtacagtgggggcccgggttggtggccctccaggaggctgagattcccgagcacttcggggccgtgcgagccattgctgaagggcttggctctgagctgctggtgggaaccacgaagaatgcattgctgaggggagacctggcccagggcttctcccctgtaatccagggccacactgatgagctctgggggctctgcacacacccctcccagaaccgcttcctcacctgcggccacgaccggcagctctgcctgtgggatggggagagccatgcactggcctggagcatcgacctcaaggagactggtctctgtgctgacttccacccgagtggggcagttgtggccgtaggactgaacacggggaggtggttggttttggacacagagaccagagagatcgtgtctgatgtcattgatggcaatgagcagctctcagtggtccggtacagcccagatgggttgtacctggccattggttcccatgacaacgtgatctacatctatagtgtttccagtgatggtgccaaatccagccgctttggccgctgtatgggtcactccagcttcatcactcatcttgactggtccaaggatgggaatttcatcatgtccaattctggggactatgagattctttactgggacgtggctggaggctgcaagcagctgaagaatcgctatgagagccgagaccgggaatgggctacctacacctgtgtgctgggctttcacgtctacggcgtctggccggacggctccgatgggaccgacatcaactccctgtgccgctcccacaacgagcgcgtggtggcggtggccgacgacttctgcaaagtgcatctcttccagtacccgtgcgctcgtgccaaggcgccgagccgcatgtacgggggccacggcagccacgtgaccagcgtccgattcacgcacgacgactcgcacctcgtctcgctgggcggcaaggacgccagcatcttccagtggcgagtgctgggcgctgggggcgcggggccggcgcccgccacgccctctcgaaccccctccctgtcccccgcctcctccctcgacgtttgatcgctgcctggcgggaccgactggcccggcggcgtggccccgccccgccctgcccttccctggcccaatcccccacgactaggggccgactctttcctggactgacttcgagacattcccgatcgcgcattttcctggagggcgcgaacggcgcccctgcacacactgtttagacccgctggctgagccgggcagccccagcctaggccttgactcccgctgcctgctgaggggcaataaaccagaaccaaagtcgaaaaaaaaaa

SEQ ID NO: 6490 - DNA, 2840 bp, Homo Sapiens
  NM_153270
agttgtccccggccttcgcgggtgcccgcagaacccgtcctcctcgtccaccccggagaggtcagagtcctcgccctgcactcccgggacgccgcatctgcgccgtcggacatccagcacccccggagtccaccggcaactcggttcttccaggtgatggtgtgcagccaccgccgcccctggcgtgcaggtgtgggctctccacattgggccggggaggggacttcgggcaacgcgctggaagcctcggcagtcgtggaaaccaagccccacactcccgggaagcctccaaattccgcgccctccgttactaggggcctccgaaaaccgtttccagactggatttgctctgagaggggcactgggcgatctgcaggtctggatgaaggagccctgggctttaaactgagcaggcagaaatgggcccctgctaggggctctgtggcttacgcgggggtcccgggagtgttgtgccccgggatgcctccggccctgcccagcaggcctctggtcccaccaggctgcttccagccctgggtagaatgagttacttcctgtcttactgcaaagctcatggcggcgcgctgctcaccggctaccaggccctgcgcgccgagggcttcctgtgcgacgtgacactggagaccgagggcagcgaattcccggcgcacaggtcgctcctggcgtgctccagtgactacttcagggccctgttcaagagccacacccaggaatcccgggcgcgcgtgatccacctgcacgtgccatcggcagccggcctgcagcgcctgctggacttcatctacactgcctggctgtcgctttccatggacactgtagaggacactctggaggccgccagctacctgcaggtcactgaggccctggggctctgtgggcgctacttggagcgccagctggctccagagaactgctgcttcgccgccaacgtggcagcgcgctttggcctggctcacacgctggacgcggccgagcgctgcatcgtgagccacttgcaggagctgctggcgcggggcgcgggccccgcgggactcctggagctcaaccctacatcgctgagggctgtactgggtgcccccgacgtggcgcgggtgcccgaggcccggctactgggcctggcgttagcttggttgcggcaggagcccacaactgagcgcctggcacactgtacagagttgctggagcgtgtccgctttggcctggttcccgccgacgtactgcggcgcgtgtactcgggctctggcctcgtgctgcccgcccgggtcaagggcctcatcatccaggccctcaactaccacacgacgccctcccgccagccgctcatgcagggcgagcagaccagcatccggagcccccagacccgcatcttgttggtgggggggcgcagggcacgggaggtggtgattgaggaggtcgcggccccgcagagggcagctaggggccaggtcgccgccccagagcccgaggaagaagaggaagagttggaggaagaggaggaggaggaggagtgggagctcacccagaacgtggtggccttcgatgtgtacaatcaccgctggcgcagccttacgcagctacccacaccactgctggggcacagcgtgtgcaccgcgggcaacttcctgtttgtcctgggtggggagagcccttccggcagtgcatcctctcccctggccgacgactcgcgggtggtcacggcccaagttcaccgttacgacccgcgcttccacgcttggacggaagtgcccgccatgcgggaagcgcgggcccacttctggtgcggcgcggtgggcgagaggctcctggccgtcgggggcctgggtgcgggcggtgaggtgctggcctcggtggagatgtacgacctgcgtcgggaccgctggacggcggctggggcactaccgcgggctctgcacggtcacgcgggggccgtcggggaccgcggtgttgtgtacatctcggggggcaaggcagggagaggcgagggcggagcgagcagcctccgggacttatacgtcctgggccctgaggagcaggtttggagcaagaaggcacccatgggcaccgcacgtttcgggcaccacatggcagtgctgcgcggcgctgtgtttgcttttctggggcgatacgagcccttctctgagatcgagcgctacgaccccggcgccgaccagtggactcggttgcggccgctgccctacgaccgcttctgctatgggctggccgtggtcgaggagacagcgttgctgctgggcggcctcaagtggcgggactcgcgccaggtgcctacccgcaacgtagtgggctacgacctcgacctggaccgttgggaggacatcggctgcgcgttgccctgggcctggagcggcctgcggtgcgcagtgctgcagctggccgagggtggggacgacgagagggagggagaggttggagaggcgctagatttggtgctgggctgaatgggtcagtccggtttccttccgcaatggaggagaaagtcgcgcttggttagtcttacagagcaacggatgggctttttctaagaaagggattctgggagcagagtggcttctgaaggttaacaggcaaacaaggccttgagcaaagagaaacatttctccttgagctgagaatgggagacagcggggcggggggtcaaatagaaggctatatgaatcaacttcagtgagctggtgaaagaaaatttttagaaaggctcacgcaaggctagagaaggactttcacaaataaaatatgaccttattttccctcttacagttaaagtgtttccctaggtgcaaaacagtgattacttatgtgcc

SEQ ID NO: 6491 - DNA, 1469 bp, Homo Sapiens
  NM_153326
aaaaggcgaggctggccccgccccttgcaccgcccacgtggccagcgccacctgcctcattgtgcccaggagttctccaaacccgcgctgcggagtgagtgaccaagttccggccagttcgacctcgaggatccagaggtggagacggtactacctcccagctctgttttccatccccttcaggtccttcctcgggaggcggcgaaggcggtccaccctgcgcgtgatcctttatgcccggcccctgcccctccctccgggtggaacttccccctcaccgccagacttaagctgaggatcgttggatctctggcggggtgcagaactgagcccaggccacagtaccctattcacgctctgtgcttgtgccaagggggcaatggcggcttcctgtgttctactgcacactgggcagaagatgcctctgattggtctgggtacctggaagagtgagcctggtcaggtaaaagcagctgttaagtatgcccttagcgtaggctaccgccacattgattgtgctgctatctacggcaatgagcctgagattggggaggccctgaaggaggacgtgggaccaggcaaggcggtgcctcgggaggagctgtttgtgacatccaagctgtggaacaccaagcaccaccccgaggatgtggagcctgccctccggaagactctggctgacctccagctggagtatctggacctgtacctgatgcactggccttatgcctttgagcggggagacaaccccttccccaagaatgctgatgggactatatgctacgactccacccactacaaggagacttggaaggctctggaggcactggtggctaaggggctggtgcaggcgctgggcctgtccaacttcaacagtcggcagattgatgacatactcagtgtggcctccgtgcgtccagctgtcttgcaggtggaatgccacccatacttggctcaaaatgagctaattgcccactgccaagcacgtggcctggaggtaactgcttatagccctttgggctcctctgatcgtgcatggcgtgatcctgatgagcctgtcctgctggaggaaccagtagtcctggcattggctgaaaagtatggccgatctccagctcagatcttgctcaggtggcaggtccagcggaaagtgatctgcatccccaaaagtatcactccttctcgaatccttcagaacatcaaggtgtttgacttcacctttagcccagaagagatgaagcagctaaatgccctgaacaaaaattggagatatattgtgcctatgcttacggtggatgggaagagagtcccaagggatgcagggcatcctctgtacccctttaatgacccgtactgagaccacagcttcttggcctcccttccagctctgcagctaatgaggtcctgccacaacggaaagagggagttaataaagccattggagcatccataaaaaaaaaaaaaaaaaa

SEQ ID NO: 6492 - DNA, 3119 bp, Homo Sapiens
  NM_153329
attcccattagccccgcccctttgggctggaaccggaggtgtcgctcttcggacctcaaggttccccttaacacagagcgccccgcagtcttcgcggaaagcgttcggggtaggcgatggctgcgacgcgtgcagggccccgcgcccgcgagatcttcacctcgctggagtacggaccggtgccggagagccacgcatgcgcactggcctggctggacacccaggaccggtgcttgggccactatgtgaatgggaagtggttaaagcctgaacacagaaattcagtgccttgccaggatcccatcacaggagagaacttggccagttgcctgcaggcacaggccgaggatgtggctgcagccgtggaggcagccaggatggcatttaagggctggagtgcgcaccccggcgtcgtccgggcccagcacctgaccaggctggccgaggtgatccagaagcaccagcggctgctgtggaccctggaatccctggtgactgggcgggctgttcgagaggttcgagacggggacgtccagctggcccagcagctgctccactaccatgcaatccaggcatccacccaggaggaggcactggcaggctgggagcccatgggagtaattggcctcatcctgccacccacattctccttccttgagatgatgtggaggatttgccctgccctggctgtgggctgcaccgtggtggccctcgtgcccccggcctccccggcgcccctcctcctggcccagctggcgggggagctgggccccttcccgggaatcctgaatgtcctcagtggccctgcgtccctggtgcccatcctggcctcccagcctggaatccggaaggtggccttctgcggagccccggaggaagggcgtgcccttcgacggagcctggcgggagagtgtgcggagctgggcctggcgctggggacggagtcgctgctgctgctgacggacacggcggacgtagactcggccgtggagggtgtcgtggacgccgcctggtccgaccgcggcccgggtggcctcaggctcctcatccaggagtctgtgtgggatgaagccatgagacggctgcaggagcggatggggcggcttcggagtggccgagggctggatggggccgtggacatgggggcccggggggctgccgcatgtgacctggtccagcgctttgtgcgtgaggcccagagccagggtgcacaggtgttccaggctggtgatgtgccttcggaacgcccattctatcccccaaccttggtctccaacctgcccccagcctccccatgtgcccaggtggaggtgccgtggcctgtggtcgtggcctcccccttccgcacagccaaggaggcactgttggtggccaacgggacgccccgcgggggcagcgccagtgtgtggagcgagaggctggggcaggcgctggagctgggctatgggctccaggtgggcactgtctggatcaacgcccacggcctcagagacccttcggtgcccacaggcggctgcaaggagagtgggtgttcctggcacgggggcccagacgggctgtatgagtatctgcggccctcagggacccctgcccggctgtcctgcctctccaagaacctgaactatgacacctttggcctcgctgttccctcaaccctgccggctgggcctgaaatagggcccagcccagcacccccctatgggctcttcgttgggggccgtttccaggctcctggggcccgaagctccaggcccatccgggattcgtctggcaacctccatggctacgtggctgagggtggagccaaggacatccgaggtgctgtggaggccgctcaccaggctttccctggctgggcgggccagtccccaggagcccgggcagccctgctgtgggccctggcggctgcactggagcgccggaagtctaccctggcctcgaggctggagaggcagggagcggagctcaaggctgcggaggcggaggtggagctgagcgcaagacgacttcgggcgtggggggcccgggtgcaggcccaaggccacaccctgcaggtagccgggctgagaggccctgtgctgcgcctgcgggagccgctgggtgtgctggctgtggtgtgtccggacgagtggcccctgcttgccttcgtgtccctgctggctcccgccctggcctacggcaacactgtggtcatggtgcccagtgcggcctgtcctctgctggccctggaggtctgccaggacatggccaccgtgttcccagcaggcctggccaacgtggtgacaggagaccgggaccatctgacccgctgcctggccttgcaccaagacgtccaggccatgtggtatttcggatcagcccagggttcccagtttgtcgagtgggcctcggcaggaaacctcaaaccggtgtgggcgagcaggggctgcccgcgggcctgggaccaggaggccgagggggcaggcccagagctggggctgcgagtggcgcggaccaaggccctgtggctgcctatgggggactgatgcctgagcgccacctactgcattttggacacctcacaccaaggggagatgcaccccacagacacctgggactttccccttctggttcctgtgtctcccaataaactctctgaccaaccctagctgtgcttctgcgagaagaaagggtgtagcaacttctggcagatatgaggcttttttcttttttttttttttttttgagacaacgtctggctctgtcacccaggctggagcgcagtggcacaatctcggcccactgcagcctcgacctctggggctcaagggatcctcatgcctcagcctcatatgtagctggggccacagacatgcaccaccacacctggctcgaggccattttagttctgaggttgagcagctcaggagccggctccagcacggtgctgtgtttgtgaaacagagaaaggggacccccgaggaccccagacagggccttaggactctcatatcttcttgtcttctccatctggtggctcttgctctctggttttctctaccttttcatggccccagaatccatatgcagtaaaggaactctctggaataaaattaaagtcctcctaaaaaaaaaaaaaa

SEQ ID NO: 6493 - DNA, 1840 bp, Homo Sapiens
  NM_153331
ctcttatataaattctaaaaattgatgttctaagaagagaggtagaatttgaatgactgggttacttcctagactcttcctccttctcttaagtacagtatagttctttctctgaaaatcttcagtctcttagttccagatgggttctctatggtaagaatacaggacatgtagaaggccctaggggaatgctttcttccccagatctttgccctgtagtaggtttcagctgagcaaggacgagtagtttttctggtgtttggcctcctctgttgggtggaaaaagactttcttctctattttcctagttatatatgctatcatatgtctgtttttctcctcttgaagtttccctgaaacctgggctcttgaagacgcatcactggagcagatggataatggagactggggctatatgatgactgacccagtcacattaaatgtaggtggacacttgtatacaacgtctctcaccacattgacgcgttacccggattccatgcttggagctatgtttgggggggacttccccacagctcgagaccctcaaggcaattactttattgatcgagatggacctcttttccgatatgtcctcaacttcttaagaacttcagaattgaccttaccgttggattttaaggaatttgatctgcttcggaaagaagcagatttttaccagattgagcccttgattcagtgtctcaatgatcctaagcctttgtatcccatggatacttttgaagaagttgtggagctgtctagtactcggaagctttctaagtactccaacccagtggctgtcatcataacgcaactaaccatcaccactaaggtccattccttactagaaggcatctcaaattattttaccaagtggaataagcacatgatggacaccagagactgccaggtttcctttacttttggaccctgtgattatcaccaggaagtttctcttagggtccacctgatggaatacattacaaaacaaggtttcacgatccgcaacacccgggtgcatcacatgagtgagcgggccaatgaaaacacagtggagcacaactggactttctgtaggctagcccggaagacagacgactgatctccgaccctgccacaggttcctggaaagactctccaggaaatggaagatactgatttttttttttaaatcacagtgtgagatattttttttcttttaaatagttgtatttatttgaaggcagtgaggaccagaaggaagttttgtgctttggcagactcctccatgttttgttcccttccccctgagtatgcatgtgcctgttcagagtctccagataccttttttataaaaagaagtctgaaaatcattatggtatataatctacccttaacagagcttttcttattacagtgctaaaatgatttctgataaaatggtccctaactcaactagaaggctaaaaatacaagaatgaaagaataagcagagtactcatgatgcctttgagaaaaatcaaaacatcatgtagggtgacctagtttccaaaccaataaataagtagtattgtaatattaaaggaaaactgttccaatcatttaaaagtacttattaagtactgctttttacagttatgacaactgtttctttctatgcatataaatcaaggaaccaaatatctgtagccatggaaatgtctgactagaaatatttatattgaattctgaatacaaaatgtccctgtggtagaaaacttactctttatgcctggtgcagtataattcccaagtgtactgtctaccagaaaaaaaaaacaaaactaataaaaaatgaaatatgaaaattaaaaaaaaa

SEQ ID NO: 6494 - DNA, 1231 bp, Homo Sapiens
  NM_153333
cgactctcacgtgaccaggagtcgacgtgtgcagaagtccttatagtccagggcctgtttccctgtagcagctccttattgctggagaaggagaaaagtgcccaagatcctttcaggatatttggttttttgggcgcgacacaaatcgaggtgagggaagagagaggaaaatcccctgaatccctgcaggattaatttattcaaaaaggaaataaaaaatactcaatatgcaaaagtcttgtgaagaaaatgagggaaaaccacagaacatgccaaaggccgaggaagatcgccctttggaggatgtaccacaggaggcagaaggaaatcctcaaccttccgaagaaggcgtaagccaggaagcagaaggaaaccccagaggagggccgaatcagcctggccagggatttaaagaggacacacccgttaggcatttggaccctgaagaaatgataagaggagtagatgagcttgaaaggcttagggaagagataagaagagtaagaaacaagtttgtgatgatgcattggaagcaaagacattcacgcagccgtccttatcctgtgtgctttaggccttgaattcatttttgcctaatattaaaatctggccccagctttctttctgttagcattttctgatgtatctttgacctccattttacttttaatcatctgatgaaattttgttttaggtaatttccttggtaccagcatctcattggattttggattttgacccattttccaggtctatttttcaattggaaactttcacacatttgcatgggaatatgttcattccatgttgtaaagtaaaacataacaggttatggcaaagcagcatatttaatatcagctcacatatgtaggataaaattccaaactttgtgtgtgtgcgtgtgtgtatacatacatccatataacatatatcacaaacttaaccaagcttatttctgtgtggtgtgaaattttatttgttttcttctttttgttctttttgcttatatgtactttttaatgaacacgtgtctcacacacaaaaagaattaaggattttttttacaagtaagagtcaaataatttgcaaccagcttatgagggcaatgggggcacctaaactcttgatgaaagaactttaaaaagaaatgtaaacctcaaattacctctggatctcttagccagaggaataaactggcaattattacagataaaaaaaaaaaaaaaaaaaa

SEQ ID NO: 6495 - DNA, 1262 bp, Homo Sapiens
  NM_153339
cgcctctgacgccaccggctgggctccgccatgagttcggcgccggcctcaggctccgtgcgcgcgcgctatcttgtgtacttccagtacgtgggcaccgactttaacggggtcgcggccgtcaggggcactcagcgcgccgtcggggtccagaactacctggaggaggccgccgagcggctgaattccgtggagccggtcaggttcaccatctccagccgcacggacgccggggtccacgccctgagcaacgcggcgcacctggacgtccagcgccgctcaggccggccgcccttcccgcccgaggtcctggccgaggccctcaacacacacctgcggcacccggccatcagggtcctgcgggccttccgagtgcccagcgacttccacgctcgtcacgcagccacgtcccggacctacctgtaccgcctggccactggctgtcaccggcgtgatgagctgccggtgtttgaacgcaacctatgctggactctcccggcagactgcctggatatggtcgccatgcaggaagccgcccagcacctcctcggcacacacgacttcagcgccttccagtccgctggcagcccggtgccgagccccgtgcgaacgctgcgccgggtctccgtttccccaggccaagccagccccttggtcacccccgaggagagcaggaagctgcggttctggaacctggagtttgagagccagtctttcctgtatagacaggtacggaggatgacggctgtgctggtggccgtggggctgggggctttggcacctgcccaggtgaagacgattctggagagccaagatcccctgggcaagcaccagacacgtgtagccccagcccacggcttattcctcaagtcagtgctgtacgggaacctcggtgctgcctcctgcaccctgcaggggccacagttcgggagccacggatgaccctggacactcaagccaaagttaggccacaccaggcccaaccctgtgctggtcaagccagggcagtcacagctgcttggggcccacagcactgctgcctggtctccacagtagcctccctgcccgggtcccagcaccctggatgcccgtctctgtcccaggcgggatggggcacagtgcaggacacagccatgtacaccaagaagagagtaccaagtagtcttttgttcagcttttactggaaactgctgtctaggaccacctgccctaaccaggaataaaggcaagacagcctggaaaaaaaaaaaaaaaaaaaaaaa

SEQ ID NO: 6496 - DNA, 2413 bp, Homo Sapiens
  NM_153340
gcgtccgcggcggtgatggcggtgcgtgaacgcgcggcggcagcaatggccgctctggagcggcgggtgccgagtctcgatgacttcgcgggacagagctggagctcgtgggtggagcgggccgacctgcccgcggctgacggggctgagctggaggagagtagcaaaaacacgaagaagttggatgccatgaccctcattaaagaagacatgtccatcttcgggcactgccctgcccatgatgacttctacttggttgtgtgtaaccactgcagccaagtggtgaagcctcaagctttccagaagcactgcgaaagaagacatgggcccctcagcaagctttatggccgggccccacccccacctccagcccctgccagctctcagaaatgccatgtagtgaatgggcagggcccagcttgtagggccccaggttccacgaaaacctcctccagggagaagggccaggggtcccggagccgtggccaccagcctcctgagaagacccagaaggacaacctctgccagccagggggcctcaccaaggactcccctggaaaacctcccatggctcccccttctaaagaacctcctggcagagagaacatcgagatcatccccagtgaggggtccagtcactgggctgaaggcagccctcctgaaaaggagcccagtgggaccaggctgccccctaaaacccaccggaagatggctcggaaggagtgcgacctcaacaggcagtgtggggtaataaatccagagaccaaaaagatctgtacccgcctgttgacctgcaagatccactcagtacaccagcgccgggaagtccagggccgggccaaggactttgacgtgctggtggcagagctgaaggccaactcccgcaaaggggagtctcccaaggagaagagcccagggcgcaaggagcaagttctcgagcgcccctcccaggagctcccctcctcagtccaggttgtagcagcggtggctgctcccagcagcaccttctctgttcgtgccaagcagacctacccatactgtgcactgcccaggtcccgggcctcctccgagagtgaattggatgatgaaggcccctgtggtggtgatggggacccaggcctgttccccttccccatgccccggggtgggacccaggcctccagcgaagagagtgaggaggaggggacatctgacgacctccacccaccccctgactgccattatgcaacccggcccccacggccacaggcgttctgcacctttgggagccggctggtgagcccaggatgctatgtgtttagccgccggctggaccggttctgctcagcactcagctccatgctggaacggcacctcagcacacacatgtggaagaagatcccaccggcagctgaacctccagctcaccttgtcaactccccgttatctgctcccctgagcccatcctctacaggcacctgcccccgccttccaggtccaaccctgagacctgcctgcccagcctccatgccccccaccaaggacaaccttgtccccagctaccctgcaggctcccccagcgtggcggctgcctgtagccaggcagagtgcatgggcgggagccaggctatcacctcaccactgcctgccaacacgccatccccgtccttcagcaagctgccgccttccaaggccagcaagtcatccaaaggcaaggacggggtggaggtggaggccccttctcgaaagcggaagttatcccctggccctaccactcttaaacggacctgcatcctggagcccactggaaaagggaaaccctctggctgtaggggcctctcggccaaaactaaaacagccctgagcatggggcttaatgggacaatggggccaagagtgaagcgggcagggcccctggactgtcgtggctcccctcatcagctccccacaccagtcaaggcttctcagctggagaaccggggagcagctggacacccagccaaggccctgccaaccaactgcctctctgaggaggaggtggccaagaagcggaaaaacctggccacttattgccggccagtgaaggccaagcactgtcaggctggtgcccctgctgatgtggcctgctctgtgcgccgcaagaagccaggcccggccctggcctttgaggagaagtgctctacactgaagtcaaaagcccattaacgagaaagtgcctgcccactgcaacggagccgccagcacctcctcccctccagatccgggccccaggctgctgccgctttttataactttatattatttttttttaagaaaaaaagctctttaaaatacctcaagactgtctccctgttctgttgctgctatgaaaatataaaaacagaaacatagaaaaggaaggaaaaaaaaaaaaaaaaaaaaaaaaaaaaaaaaa

SEQ ID NO: 6497 - DNA, 2557 bp, Homo Sapiens
  NM_153341
atgggctccgagaaggactccgagtcgccgcgctccacatcgctacatgcggccgcacccgaccctaagtgccgcagcggcggccggcgccggcgcctcaccttgcacagcgtcttctctgcctcggcccgcggccgccgcgcccgggccaagccgcaggccgagccgccgcccccggctgcgcagccgccgcccgccccggcccctgccgcggcccagggcccgccgcccgaggcgctgcccgccgagccggccgccgaggccgaggcggaggccgcggcggcggcggcggagcctgggttcgacgatgaggaggcggcggagggcggtggcccgggcgcggaggaggtggagtgtccgctgtgcctggtgcggctgccgcctgagcgggccccgcgcctcctcagctgtccgcaccgctcgtgccgggactgcctccgccactacctgcgcctggagataagcgagagcagggtgcccatcagctgccccgagtgcagcgagcgactcaacccgcacgacatccgcttgctgctcgccgacccgccgcttatgcacaagtacgaggagttcatgctgcgccgctacctagcctcggaccccgactgccgctggtgcccggccccggactgcggttatgctgttattgcctatggctgtgccagctgcccgaagctaacttgtgagagggaaggttgccagactgagttctgctaccactgcaagcagatatggcatccaaatcagacatgcgatatggcccgtcaacagagggcccagactttacgagttcggaccaaacacacttcaggtctcagttatgggcaagaatctggaccagcagatgacatcaagccatgcccacgatgcagtgcatacattatcaagatgaatgatggaagctgtaatcacatgacctgtgcagtgtgtggctgtgaattctgttggctttgtatgaaagagatctcagacttgcattacctcagcccctctggctgtacattctggggcaagaagccatggagccgtaagaagaaaattctttggcagctgggcacgttgattggtgctccagtggggatttctctcattgctggcattgccattcctgccatggtcattggcattcctgtttatgttggaaggaagattcacagcaggtatgagggaaggaaaacctccaaacacaagaggaatttggctatcactggaggagtgactttgtcggtcattgcatccccagttattgctgcagttagtgttggtattggtgtccccattatgctggcatatgtttatggggttgtgcccatttctctttgtcgtggaggcggctgtggagttagcacagccaacggaaaaggagtgaaaattgaatttgatgaagatgatggtccaatcacagtggcagatgcctggagagccctcaagaatcccagcattggggaaagcagcattgaaggcctgactagtgtattgagcactagtggaagccctacagatggacttagtgttatgcaaggtccttacagcgaaacggccagctttgcagccctctcagggggcacgctgagtggcggcattctctccagtggcaagggaaaatatagcaggttagaagttcaagccgatgtccaaaaggaaattttccccaaagacacagccagtcttggtgcaattagtgacaacgcaagcactcgtgctatggccggttccataatcagttcctacaacccacaggacagagaatgcaacaatatggaaatccaagtggacattgaagccaaaccaagccactatcagctggtgagtggaagcagcacggaggactcgctccatgttcatgctcagatggcagagaatgaagaagaaggtagtggtggcggaggcagtgaagaggatcccccctgcagacaccaaagctgtgaacagaaagactgcctggccagcaaaccttgggacatcagcctggcccagcctgaaagcatccgcagtgacctagagagttctgatgcacagtcagacgatgtgccagacatcacctcagatgagtgtggctccccccgctcccatactgcagcctgcccctcgacccccagagcccaaggtgcaccgagcccaagtgcccatatgaacctctctgccctagccgagggacaaactgtcttgaagccagaaggtggagaagccagagtatgaagtggaatgaatgctcctgttctgagaagcacacttgtaactgcatcttttggaatttttttttttttttttccaaggggtagagatttatgtattttatttcacagattctctggtcacaggtttttgcccagggaaattctgagaaattcacaatttcttaccagataaaacatgaaaagtttgccgttagttcccctcccctcccctccctctttttagttttaatttattggttaaactgatggcagcaatccatgaggtgtgtcaaagagtgtacatatgtatgtgtgtatattgaatgctaaacatattactgaaagacacattttaataaagatttctgtcataattcaaa

SEQ ID NO: 6498 - DNA, 3543 bp, Homo Sapiens
  NM_153350
ggagcgcggggagggcgaggggaggaggaggcgcccgcctggttccctgcaaagcggccttatttatctgggcacagcctcagcctccccggtgggaggcttggggcggccgatcctctcccaccggggagctcctttccgtgcgctgccgagggggcccggccaggacgggacgcggggcgcagggcgcggccgggccctgccggccagtccagcaccccggcggcccccgcgcgccgacgcccatgccgggctccccatgacgggaggtcgcccggcggacagcgtggcatgagccaggagcccgggccgagagcgtgccaggaagatgtcgagcccgggcatcgacggcgaccccaagcctccatgcttgcctcgaaacggtctggtgaagctgccgggccagcccaacggcctgggtgcggccagcatcaccaagggcacgccagccaccaagaaccgcccctgccagccaccacccccacccaccctcccaccacccagcctggctgctccactgtcccgggctgccctggctgggggcccgtgcaccccggcaggtggaccagcctcagccttggcacctgggcacccagcggagcggccgccgctggccacggacgagaagatcctcaatgggctcttctggtatttctcggcctgcgagaagtgtgtgctggcccaggtgtgcaaggcctggcggcgcgtgctgtaccagcccaagttctgggcaggcctcacgccggtgctgcatgccaaggagctctacaacgtgctgcctggtggcgagaaggagttcgtgaacctgcagggttttgccgccagaggcttcgagggcttctgcctggttggcgtctccgacctggacatctgtgagttcattgacaactatgcgctctccaagaagggtgtcaaagccatgagcctcaagcgctccaccatcacggacgcaggcctcgaggttatgcttgaacagatgcagggcgtggtgcgtctggagctgtcgggctgcaacgacttcaccgaggccgggctgtggtccagcctgagcgcgcgcatcacctcgctgagcgtgagtgactgcatcaacgtggccgacgacgccatcgcggccatctcgcagctgctgcccaacctggcggagctgagcctgcaggcctaccacgtgacggacacggcgctggcctacttcacggcgcgccagggccacagcacgcacacgctgcgcctgctctcctgctgggagatcaccaaccacggcgtggtcaacgtggtgcacagcctgcccaacctcaccgcgctcagcctctcgggctgctccaaggtcaccgacgacggcgtggagctcgtggccgagaacctgcgcaagctgcgcagccttgacctctcgtggtgcccacgcatcaccgacatggcgctggagtacgtggcctgcgacctgcaccgcctagaggagctcgtgctcgacaggtgtgtacgcatcacggacactggcctcagctatctgtccaccatgtcgtccctccgcagcctctacctgcgatggtgctgccaggtgcaagacttcgggctgaagcacctcctggccctggggagtttgcgcctcctgtctctggcaggctgcccgctgctcaccaccaccgggctgtcgggcctggtgcagctgcaggagctggaggagctggagctgaccaactgccccggggccacccccgagctcttcaagtatttctcgcagcacctgccccgctgcctcgtcattgagtagcgcgaggcccccgccccggtcgcgggaacccggccatgacctgggcgggggcgcggggcgccgccgagccccctcttcccgccttgcgctcgggggagcccccgcgcccccggcccagcgcgggaggcggggcgagccgagggaaagcccctccccgaccttcggtccctccgccctcccagccccgccccgggcaggggggcggcgggtgggcccgccccacgcacgcacgcacactcggggactttgtgcatgcccctcgtgcccgcactgcacgccgccctccgccacgccacagccacagccgccgccatcactcgctcgccctcccgcttggggggcggggctcggtccttgggggggctttgagctctccagactgtgcccttaccgccttccccgccacacccgctctgtcttcccactgtcccccccatcccgggcagggcccagtgggattgagggggctgggtcccccaggacacgggcccagaagagccccacgggcttcctgcatcttccaccgcaccatacctggagccctccgaggggtgtcaggggaaacaggccaccgccaaagccatggcccgccgccgagagcccaggccccacccgcacctcctcacccatccagcctgacccacgcggcctctcctcctccttgccgctgtgtggggcagtcccctgtccgccccaaaacccggccttggtccctggccaggctgagagaattgggcagggagagggcggaagggctggcgatcgcttggagtcattaacgtgatcccagctgactccggtcggcctcaacccaggggtggcgcaggcaccttgcaagcctcgagctgtagccaccctcaggcctgggaagaggcctgggccgacctcacacctcagcccttgcacccggccgggctcagttcaggcctgggcaccgagcttcaccctgggtgggtctcctcaggtggagtctgcagagtggacccagccaagggtcagggtcagcactgggtcagcgactccaatcttccagtggccagcacaccctagacaccccgaggagggagggctcctttctagcctgcccccccacccccacttcacccctccccagcttcccaaacttctgtctgcccaaatgggctctgaccgtgctctgtcggcccgagacatttggaagtcctgggggatgctggcaaatctcagctgttgctgaggagggggctgggaccccttcccatcccaaccttgagccccaggagataccgcgcccacacccaatcttgggacactccctatctggttggaagagagtaaccagtttccagagagccagagagtgagagagagaaagagagtgagagagagagagaaagagagagagagatgctgttgaatcagaaacagatcaacagcccaaagattttcctgtccctggagtgccagccccaggaagctccagggctgagtggtcaggagccagtttctccagcccctcctccccacaacccctagtggggaggggcagctgtccatttgcccaaagtattaatgcaactgaagctgtgatatttccaacgactgtaggaggaaaaattaaggggagagaggaaaacaaaaccaaccaacccctaaaatcattttcttattgtacataacgacctcattctcctgtatatgcggaagatataaccttatatttggtaagtgtttcttgtgctattttatcacgtgacctgtttataaaaatatatattaaaaaagttgtaaaaaca

SEQ ID NO: 6499 - DNA, 2495 bp, Homo Sapiens
  NM_153358
gcaaatgcgtgctacgtcactgtgcgatcgggttgtgcttagcttggggtctcctggccccttgacgcgtcaggttgctgtacccctgcatcggatgcgctgtaccctgcgctggctccgtgaaccttagggacaacaccgggacacccgcgaggccggaaaatggactcagtggcttttgaggatgtgtctgtgagcttcagccaggaggagtgggctctgctggctccttcacagaagaaactctacagagatgtgatgcaggaaacattcaagaacctggcatctataggggaaaaatgggaagacccgaatgttgaagatcaacacaaaaaccaaggacgaaatctaagaagccatacgggagagagactctgtgaaggtaaagaaggtagtcaatgtgcagaaaacttcagtcccaatctcagtgtgacgaagaagactgccggagtaaaaccatatgagtgtactatctgtggaaaagccttcatgcgtctctcatcccttactagacacatgaggtctcacactggatacgagctatttgagaagccatataaatgtaaggagtgtgagaaagcctttagttatctcaaatcctttcaaagacatgaaaggagtcacactggagaaaaaccctataaatgtaaacaatgtggaaaaaccttcatatatcaccagccctttcaaagacatgagcggactcacattggagaaaaaccctatgaatgtaagcaatgtggaaaagctcttagttgttccagttcgcttcgagttcatgaaaggattcacactggagaaaagccctatgaatgtaaacaatgtgggaaagccttcagttgttccagttctattcgagtacacgaaagaactcacactggagagaaaccctatgcatgtaaggaatgtgggaaagccttcatttcccacacaagtgttctaacacacatgataacacacaacggagatagaccttataaatgcaaagaatgtggaaaggcattcatttttcccagttttttacgagtacatgaaagaattcacactggagagaaaccctataaatgtaaacaatgtggtaaagccttcagatgttccacctccattcaaattcatgaaagaattcatactggagagaagccctataaatgtaaagaatgtgggaaatctttcagtgcacgcccagcctttcgagtacacgtgagagtgcatactggagagaaaccctataagtgtaaagaatgtgggaaagcctttagtagaatcagttactttcgaatacatgaaaggactcacactggagagaaaccctacgaatgtaaaaaatgtgggaaaactttcaattatcctctagatttgaaaatccacaagagaaatcacactggagaaaaaccctatgagtgtaaggaatgtgcaaaaaccttcatttctcttgagaactttcgaagacacatgatcacccacactggagacggaccttataaatgtagggactgtgggaaggtgttcatttttcctagtgcgttacgaacacatgaaagaactcacactggagagaaaccctatgaatgtaaacaatgtggaaaagcctttagttgttctagttacattcggatacataaaagaactcacactggggagaaaccttatgaatgtaaggaatgcgggaaggcctttatttatcccacaagctttcaaggacacatgagaatgcatactggagagaaaccctataaatgtaaagaatgtgggaaggcctttagtcttcacagttcctttcaaagacatacaagaattcacaattatgagaaacctcttgaatgtaagcaatgtggaaaagccttcagtgtgtccacatccttaaaaaaacatatgagaatgcacaatcgatagaaactctataaatgtgagaaataggagaaagttttcaattctaacagatgctttcaaagttgtgaaaattcccactgaagagagaaatcctgtcaatgtaagtaatatagaaagcgagatacaagatgattcatgtatagtcaggtaccacataatcatgtttcagtcagcaatggaccatataggttggtagccccataagattatataacacctaaaacatttctatcaaccgcaatttagtagcagtagtaacaccatagtgcagcacattatttaagtgtttatggtgctggtgtaaacgtgctgcactttcagttgtataaaagtacaagacagcggccggggacggtggctcacgcctgtaatcccagcactttgggaggccaaggcgggcggatcacgaggccaggagatcaagaccatcctggctaacacggtaaaaccccatctctactaaaaatacaaacaattagccgggcgtggtggtgggcgcctgtagtcccagctacttgggaggctgaggcaggagaatggcataaacccaggaggccgagctgacagtgagctgagatccggccaacagagcgagactctgtctc

SEQ ID NO: 6500 - DNA, 2205 bp, Homo Sapiens
  NM_153370
cctgggtgcaaccagtcacagctctgcagaggttactgtgattttgcccctgaaggatctgtccacaacttaggaactcacacagcttttggcctgagcccccgttaccaagagaaaggaggtttttgccaaggactccaaggggagtgcacttgatgctggtcgggacccaaagcgcccagccctccctgagacattgtgtgagtcgggctgggcctcaaacacggcccccactgccccaccccagccagggtggtgcttgtgtgggaaggactttaaatccagctgccagacccctggacgggagaaggagagacggctggccaccatgcacggctcctgcagtttcctgatgcttctgctgccgctactgctactgctggtggccaccacaggccccgttggagccctcacagatgaggagaaacgtttgatggtggagctgcacaacctctaccgggcccaggtatccccgacggcctcagacatgctgcacatgagatgggacgaggagctggccgccttcgccaaggcctacgcacggcagtgcgtgtggggccacaacaaggagcgcgggcgccgcggcgagaatctgttcgccatcacagacgagggcatggacgtgccgctggccatggaggagtggcaccacgagcgtgagcactacaacctcagcgccgccacctgcagcccaggccagatgtgcggccactacacgcaggtggtatgggccaagacagagaggatcggctgtggttcccacttctgtgagaagctccagggtgttgaggagaccaacatcgaattactggtgtgcaactatgagcctccggggaacgtgaaggggaaacggccctaccaggaggggactccgtgctcccaatgtccctctggctaccactgcaagaactccctctgtgaacccatcggaagcccggaagatgctcaggatttgccttacctggtaactgaggccccatccttccgggcgactgaagcatcagactctaggaaaatgggtactccttcttccctagcaacggggattccggctttcttggtaacagaggtctcaggctccctggcaaccaaggctctgcctgctgtggaaacccaggccccaacttccttagcaacgaaagacccgccctccatggcaacagaggctccaccttgcgtaacaactgaggtcccttccattttggcagctcacagcctgccctccttggatgaggagccagttaccttccccaaatcgacccatgttcctatcccaaaatcagcagacaaagtgacagacaaaacaaaagtgccctctaggagcccagagaactctctggaccccaagatgtccctgacaggggcaagggaactcctaccccatgcccaggaggaggctgaggctgaggctgagttgcctccttccagtgaggtcttggcctcagtttttccagcccaggacaagccaggtgagctgcaggccacactggaccacacggggcacacctcctccaagtccctgcccaatttccccaatacctctgccaccgctaatgccacgggtgggcgtgccctggctctgcagtcgtccttgccaggtgcagagggccctgacaagcctagcgtcgtgtcagggctgaactcgggccctggtcatgtgtggggccctctcctgggactactgctcctgcctcctctggtgttggctggaatcttctgaaggggataccactcaaagggtgaagaggtcagctgtcctcctgtcatcttccccaccctgtccccagcccctaaacaagatacttcttggttaaggccctccggaagggaaaggctacggggcatgtgcctcatcacaccatccatcctggaggcacaaggcctggctggctgcgagctcaggaggccgcctgaggactgcacaccgggcccacacctctcctgcccctccctcctgagtcctgggggtgggaggatttgagggagctcactgcctacctggcctggggctgtctgcccacacagcatgtgcgctctccctgagtgcctgtgtagctggggatggggattcctaggggcagatgaaggacaagccccactggagtggggttctttgagtgggggaggcagggacgagggaaggaaagtaactcctgactctccaataaaaacctgtccaacctgtggcaaaaaaaaaaaaaaaaa

SEQ ID NO: 6501 - DNA, 2017 bp, Homo Sapiens
  NM_153373
agacggggcagcgctcgagttcctgcgcgggactgccaaggcacgaccacgggccggaaggctgccaggcccagtgggcaagcgaagaaatgaaccaccgcaacgcgggcgcttcggggcggggccgagtgcgaacctgagccccaaatcccgacccaggcaggggcggggcccggagcggggccttggaggcccagcccgcgcggcgacgtctccgcgtggcgtcacggcaccgactgacggccacccaccatggccgcagaccagcgcccgaaggccgacacgctggccctgaggcaacggctcatcagctcttcctgcagactcttttttcccgaggatcctgttaagattgtccgggcccaagggcagtacatgtacgatgaacagggggcagaatacatcgattgcatcagcaatgtggcgcacgttgggcactgccaccctctcgtggtccaagcagcacatgagcagaaccaggtgctcaacaccaacagccggtacctgcatgacaacatcgtggactatgcgcagaggctgtcagagaccctgccggagcagctctgtgtgttctatttcctgaattctgggtcagaagccaatgacctggccctgaggctggctcgccactacacgggacaccaggacgtggtggtattagatcatgcgtatcacggccacctgagctccctgattgacatcagtccctacaagttccgcaacctggatggccagaaggagtgggtccacgtggcacctctcccagacacctaccggggcccctaccgggaggaccaccccaacccagctatggcctatgccaacgaggtgaaacgtgtggtcagcagtgcacaggagaagggcaggaagattgcagccttcttcgctgagtctctgcccagtgtgggagggcagatcattccccctgctggctacttctcccaagtggcagagcacatccgcaaggccggaggggtctttgttgcagatgagatccaggttggctttggccgggtaggcaagcacttctgggccttccagctccagggaaaagacttcgtccctgacatcgtcaccatgggcaagtccattggcaacggccaccctgttgcctgcgtggccgcaacccagcctgtggcgagggcatttgaagccaccggcgttgagtacttcaacacgtttgggggcagcccagtgtcctgcgctgtggggctggccgtcctgaatgtcttggagaaggagcagctccaggatcatgccaccagtgtaggcagcttcctgatgcagctcctcgggcagcaaaaaatcaaacatcccatcgtcggggatgtcaggggtgttgggctcttcattggtgtggatctgatcaaagatgaggccacaaggacaccagcaactgaagaggctgcctacttggtatcaaggctgaaggagaactacgttttgctgagcactgatggccctgggaggaacatcctgaagtttaagcccccaatgtgcttcagcctggacaatgcacggcaggtggtggcaaagctggatgccattctgactgacatggaagagaaggtgagaagttgtgaaacgctgaggctccagccctaagccagccctgctctgcctaagtgtactccagaagaaactcatctcatccaaatacacgctattgagaaggcgagcctgacctccctcttacagataaagtcagctttcagaggctcagggtgggggggcctgcccgaggccataatgctacccaccccctcctcctaaccactggtctgttggaataacccagatgtctgcatcccctcaagtcagtcaatttcctttctgtccactgggggtggaatggggtagggtgggatactttaaagtgctcctgcttaaataaattagaccagaccagtgtatttctaaagaaaatcctgacatgcacacccattaaaaatagtacattttacagtgtcccagtcatacttttaattggcaaattaaaataatgcaatctgaaaaa

SEQ ID NO: 6502 - DNA, 1709 bp, Homo Sapiens
  NM_153374
cattggcagagctggaaggtctgtgcaagctggctcctgctggggaatcaataaaggaggcagagcaacgctttttttttttttcgccgtggccagggcagggttctgccagggctctatcgccaatggagcaggggtccacctggggcctaggacgcctgcagatagccctctcttagccccaacggccgcgggcttcagcgctccccggctccctcgctctgcagggtcttcccggtaccggcaggccgcggcgggagctgctttcgctcttaaccttgcaggtgcgtgtgccgcgggcgcccggggcaggcaggacgcagaggaggaggcgcccgccatgcccggcctgcggctccccgcctcggcttcccgtccgccgcccccgcggaacggcctgctgcagcccctgtgaagaggaagaggcggcggcggcggcggaggaggaggaggcgccgcccccttggcaagctccccgacccggcggcctcggcaggacccatggcggattcctcgcccgcactgtccctgcgggaaggcggcccccgcgcgccgcggccctcggccccctcgccgccgccgcgctcgcgctccggctccgagtccgaggaggccgagctgtcgctgagcctggcccgcaccaagacccgctcgtacggcagcaccgccagcgtgcgggcgccgctgggcgccggcgtcatcgagcgccatgtggagcaccgggtccgcgcgggcgacacgctgcagggcatcgcgctcaagtacggtgtcacgatggaacagattaaaagggccaataaactgtttaccaatgattgtatatttctgaagaaaactttgaacatcccagttatatcagagaagcctttgttgtttaatggacttaactccattgattctccagaaaatgaaactgctgataacagtttttctcaggaagaggagccagtggtggccggggaagacctccctcctcccagtcctcaagaatctgatgttcagcctgtgcagcctgaggaagtgtcagccagagatttcctgcagagacttgacttgcagattaagttatcaacacaggcagccaagaagctaaaagaagagagcagagatgaagaaagtccctatgcaacttccctctatcacagttaggtgatttgggggcataactctaaccaaaattaagatatgtttggaccataaagaatccaacaactgaagattcaaaaacatcccttctggattcctatagtgtccatcttaaaatcataactaggtagttctacctgctgcagttgcactgaagtgattagttccctctggctttctataattttaagtctttattatggcatgatggcaaggttgtagcctaaagctcatcacttttgtaggtggtgttagtttttagactagcttttataaatactaattgacataaagcatcaaagattatttatatatttaggctaaaaataatgtttatctccttatgcaatcctgattatgtgaaaatatggttgctgtttaagtgatgctgaatttgctgtgtgtttataacttaagtgctatatatatatttcgatatgtcttacatattctctattaatataaagaaccaaattttgtctgctattttgtaaaaataaactacaaaagcctgaatgagaaaataaactatgttttcaaacttgaaaaaaaaaaaaaaaaaa

SEQ ID NO: 6503 - DNA, 1691 bp, Homo Sapiens
  NM_153443
gtctgcaccggcagcaccatgtcgctcatggtcgtcagcatggcgtgtgttgggttcttcttgctggaggggccctggccacatgtgggtggtcaggacaagcccttcctctctgcctggcccggcactgtggtgtctgaaggacaacatgtgactcttcagtgtcgctctcgtcttgggtttaacgaattcagtctgtccaaagaagacgggatgcctgtccctgagctctacaacagaatattccggaacagctttctcatgggccctgtgaccccagcacatgcagggacctacagatgttgcagttcacacccacactcccccactgggtggtcggcacccagcaaccctgtggtgatcatggtcacaggagtccacagaaaaccttccctcctggcccacccaggtcccctggtgaaatcgggagagacggtcatcctgcaatgttggtcagatgtcaggtttgagcgcttccttctgcacagagaggggatcactgaggaccccttgcgcctcgttggacagctccacgatgcgggttcccaggtcaactattccatgggtcccatgacacctgcccttgcagggacctacagatgctttggttctgtcactcacttaccctatgagttgtcggctcccagtgaccctctggacatcgtggtcgtaggtctatatgggaaaccttctctctcagcccagccgggccccacggttcaggcaggagagaatgtgaccttgtcctgcagctcccggagcttgtttgacatttaccatctatccagggaggcagaggccggtgaacttaggctcactgcggtgctgagggtcaatggaacattccaggccaacttccctctgggccctgtgacccacggagggaactacagatgcttcggctctttccgtgccctgccccacgcgtggtcagacccgagtgacccactgcccgtttctgtcacaggtaactccagacacctgcacgttctgattgggacctcagtggtcatcatcccctttgctatcctcctcttctttctccttcatcgctggtgtgccaacaaaaagaatgctgttgtaatggaccaagagcctgcagggaacagaacagtgaacagggaggactctgatgaacaagaccctcaggaggtgacatacgcacagttgaatcactgcgttttcacacagagaaaaatcactcgcccttctcagaggcccaagacacccccaacagataccagcgtgtaacacggaacttccaaatgctgagcgcagatccaaagttgtcttctgtccactagcaccacagtcaggccttgatgggatcttctagggagacaatagccctgtctcaaaaccgggttgccagctcccatgtaccagcagctggactctgaaggcgtgagtctgcatcttagggcatcgctcttcctcacaccacgaatctgaacatgcctctctcttgcttacaaatgtctaaggtccccactgcctgctggagagaaaacacacttgcttagcccacaattctccatttcacttgacccctgcccacctctccaacctaactggcttacttcctagtctacttgaggctgcgatcacactgaggaactcacaattccaaacatataagaggctccctcttaacacggcacttagatacgtgctattccacctttcctcag

SEQ ID NO: 6504 - DNA, 2195 bp, Homo Sapiens
  NM_153449
ggctgcaggcggggccggcgggggcgcagcggcccgggaggaagcagtaccttgaagagaaattggagagggagtcaattcctaggatagcagagagatggacaacagacagaatagatggagtttcacaatggtggccatgtgtctggaattggtgggttcttggtctcactgacttcaagaatgaagccgcacaccctcgcagtcaccccagctctgatctttgccatcacagttgctacaatcggctctttccagtttggctacaacactggggtcatcaatgctcctgagacgatcataaaggaatttatcaataaaactttgacggacaaggcaaatgcccctccctctgaggtgctgctcacgaatctctggtccttgtctgtggccatattttccgtcgggggtatgatcggctccttttccgtcggactctttgttaaccgctttggcaggcgcaattcaatgctgattgtcaacctgttggctgccactggtggctgccttatgggactgtgtaaaatagctgagtcagttgaaatgctgatcctgggccgcttggttattggcctcttctgcggactctgcacaggttttgtgcccatgtacattggagagatctcgcctactgccctgaggggtgcctttggcactctcaaccagctgggcatagttattggaattctggtggcccagatctttggtctggaactcatccttgggtctgaagagctatggccggtgctattaggctttaccatccttccagctatcctgcaaagtgcagcccttccatgttgccctgaaagtcccagatttttgctcattaacagaaaaaaagaggagaatgctacgcggatcctccagcggttgtggggcacccaggatgtatcccaagacatccaggagatgaaagatgagagtgcaaggatgtcacaagaaaagcaagtcaccgtgctggagctctttagagtgtccagctaccgacagcccatcatcatttccattgtgctccagctctctcagcagctctctgggatcaatgctgtgttctattactcaacaggaatcttcaaggatgcaggtgttcaacagcccatctatgccaccatcagcgcgggtgtggttaatactatcttcactttactttctctatttctggtggaaagggcaggaagaaggactctgcatatgataggccttggagggatggctttttgttccacgctcatgactgtttctttgttattaaagaatcactataatgggatgagctttgtctgtattggggctatcttggtctttgtggcctgttttgaaattggaccaggccccattccctggtttattgtggccgaactcttcagccagggcccccgcccagctgcgatggcagtggccggctgctccaactggacctccaacttcctagtcggattgctcttcccctctgctgcttactatttaggagcctacgtttttattatcttcaccggcttcctcattaccttcttggcctttaccttcttcaaagtccctgagacccgtggcaggacttttgaggatatcacacgggcctttgaagggcaggcacacggtgcagatagatctgggaaggacggcgtcatggggatgaacagcatcgagcctgctaaggagaccaccaccaatgtctaagtcatgcctccttccacctccctcccggcatgggaaagccacctctccctcaacaagggagagactttatcaggatgaacccaggactgcttctgaatgctgctacttgatttctttctcatcccacgcactccatgagcaccccaaggctgcagtttgttggatcttcaatggctttttaaattttatttcctggacatcctcttctgcttaggagagaccgagtgaacctaccttcatttcaggagggattggccgcttggcacatgacaactttgccagcttttcctcccttgggttctgatattgccgcactagaggatataggagaggaaaagtaaggtgcagttgccccaacctcagacttaccaggaagcagatacatatgagtgtggaagccggagggtgtttatgtaagagcaccttcctcacttccatacagctctacgcggcaaattaacttgagttttatttatcttatcctctggtttaattacataaatatttatttttta

SEQ ID NO: 6505 - DNA, 1605 bp, Homo Sapiens
  NM_153450
cagcgccggggcggagggtacgatggagaatttcacggcactgtttggggctcaggctgacccaccaccgcccccaaccgcactcggcttcggaccaggaaagcctccacccccgccaccgcctcctgcgggcgggggacccggcacggccccgcctcccaccgcggccacggctcctcctggcgcggacaagtcaggagctggctgtggccctttttacctcatgagggaactgccaggtagcacagagctgacaggcagcacgaatctgatcacacactacaacttggaacaagcctataataaattctgtgggaagaaggtgaaggagaagctaagtaacttcctgcctgacctgccagggatgattgatctgcctggttcccatgataacagcagcctccgctctctcattgagaagccccctattctcagtagctctttcaatcctatcacagggaccatgctggccggcttccgcctccacactggcccgttgccggagcagtgtcgtctgatgcatattcagcctcccaagaagaagaataagcacaagcacaaacagagccgtacccaggatcctgtccccccaggtaaacccagttaagttccgtatggagctctggactcctaaattcccctgaagaagaaaccaatgtactgtggtctcttgggacttgggacagggactctagcagcacctctgtatcctttctggccatttggacaaaagcagttgccccgacttgggattttcctgtagtcttcagtggttcataacagtagaggattttgagctttacaggtgataggtacctaatgtctcctacagaaacaccatctgattcagatcacaagaagaagaaaaagaaaaaagaagaggatcctgaacggaaaaggaagaagaaagagaagaagaaaaagaaggtagagtagaggcctattgccacaacccagtgagtttccccagatctcacccctgtcctaaataccctagagttctttgcctcaagttggacccaagattgaaaacccaaggcaggttgcaggtttctcctgtacagcctgatcaaagccaaggctagttcctagttgttcttaccctgcttctttctcccccagaatcgacatagtccagaccacccaggtatgggcagctcccaggccagcagcagcagcagcctacgctaataggaccactggactctttgccaggatggcttttcctgctgtactgaacctgctgataaaagctgccttccaggctcttggacactgccttgggagcatcctgcagctgggacagaggccagctcctgttgggctcagttgagactaagtaaattaggagagagagggacatgcttttgtaggctcatcccagttggttttctcatggacatctcttcctctcccaggaagcttacaattttcttctctctcttttgtgcaatttgtctgatttaggacttgttctgtgttttctttaaaaaaaaaaaaattacatttatcaaaaaaaaaaaaaaaaaaaaaaaaaaaaaaaaaaaaaaaaaaaaaaaaaaaaaaaaaaaaaaaaaaaaaaaaaaaaaaaaaaaaaaaaaaaaa

SEQ ID NO: 6506 - DNA, 2544 bp, Homo Sapiens
  NM_153451
cccgcgtgccgttcttacccggcctgccccgcgccgccgcttccggaagtgggtctcgtctcctcccaagcggagcatttgtgcctgaagctgccgggtctgctacggcaccgcggggctgcagaaacccgggggccaagggcgggctgcttgccgctatggctggcagtcaggacatattcgatgccatcgtgatggcggatgagaggtttcatggggaagggtatcgggaaggctatgaagaaggcagtagtttgggtgtgatggagggaaggcagcatggcacgctgcatggagccaaaatcgggtctgagatcgggtgctaccaaggttttgcttttgcatggaaatgtctactgcacagttgcaccactgagaaggacagcagaaagatgaaggtcttagaatcattgattggaatgatccagaaattcccttatgatgaccctacttacgataaactccatgaagacttagacaagatcagaggaaaatttaaacagttttgttcgttactcaatgttcagccagactttaaaattagtgcagaaggttccggactttcattttgaggaggatggatgaacagagaccgaacgtcgaggaacagatgtgtgtgtgacgtgtttagaaatgcggtgaagggccagacggtgctgggaaggcagttgttcattgggagggtgagggttccggttcggccgtgggagggcttccttccctggggttttctgcctgtgtcaccttggtgcccgtcttggggcctcgccacacatgccctttgttgggctgaagccgtccctggcagagccctcgtgcattgacttgacagcctctccggcagcacaggcctagctggttctgggttggagttggctctggatagggtcagtcaccaggcctggactgaaggcagttatttttattattattattatttgcaatgagagagatggttggccccgaatgaggctcatgggaggtttggacgggtgctgtgccgcatgtcgaggccgattgtgtgccaggcggtgcgggacgtgcctcccgtgtgttatttaatcccttcaggagcccacaagatgggtgttattctcattttacagaggagggaggggagacgcgaagggattgcctggtctaagggcacccagcagcagagctaggacttccgccctaaggctgtgcctcactgccaccaggcacagccgcctccggaatgcacaggcgagtccctgccctccctcccaggccgcacaggtcctgccaagcctcacggagcacgggggagtctgtggtggccagtttacctgggcatctggctgagaggaagaaaggccaacctgatcctgaggggacccagacatatcctttgcactgtccctagaggggcgatgagctttgcagcattaaaaaatggtgaaggggggaaatattttgaaccaaagaccaaatgttaggccgccgttatatttgcagaagctttgagaaccatgcgtatagcctcctgcattctcccctctcctaggagctcttttgtctctgtccttacgaggcgtcatacagaggcagtggggtgggcacagatgagcagagtggatggttcggtgggtccccacgaggcgagtggtggtcatatgtgatggcacgtgttcacacaccctcctgtgtacccccccagggtcaccgaagtccccacacgctggctctccacacccctcctgttccagaaagcatgtccgaaagcagtccaggagattattaaggggtcgccatgaatccactttggttttaaaaccattcccgaatgtcctagtggattgtgttgtgctgcctaagctgccggctgcaggagccagagaagtgacccccgcgggagcagcggcaggtggatctccacggtggctcgctttgtttttgttttgttttttcttttaagacggagtctcactctgtcgccgagtttggagtgtattggcgcgatctcggctcactgtaacctccgcctcctgaattcaagtgattctcctgcctcagcctccctagtagctgggattataggcgccccccaccacgcccaagtaacttttgtatttttagtagagatggggttttgccttgttggccaggctggtcttgaactcccagcctgaaatgatccacccacgtccacctaccaaagtgctggaattgcaggcatgagccaccactcccggcctgctttttgtttttgaagacaggacttaggtctcctcctcccgaactctaaacctgcgtgtgtggctgtgcaccgctcgtttgtagcgtcacctcaggtctggggaagtctgtgctggcatctcctcattgtgccttcatcagagctggtgccttcgggccagaaagactctcgttctttctagatggtgggatcaggggcctttgctgtgtttcccttggtggatttttgtgttttgtaagttgtctattttgataatgtattatttttataactgtaaaaaaagtaaatagcatattttaaagtgaaaaaaaaaaaaaaaaaaa

SEQ ID NO: 6507 - DNA, 4355 bp, Homo Sapiens
  NM_153485
aaggcgctcgtttggcgcgcgcgccctaggcggcggatctaagctaacttcttggatcttttcttgtttctccttggtttttgactttttctggaccctggtgtctacgatttccgagatgccgtcttctttgttgggcgcggcgatgccggcctctacatctgccgcagccctgcaggaagctctggaaaatgctggacggctcatcgaccgtcagttgcaagaggaccgcatgtacccggacctttccgagctgcttatggtgtctgccccaaataatcccaccgtttctggcatgtcagatatggattatcctttacaaggacctggtttgctgtccgtacccaaccttccagagatcagttccatccgaagagttcctctcccacctgaacttgttgagcagtttggacatatgcagtgtaattgcatgatgggtgtgttccctcctatcagcagagcttggctcacaattgacagtgatatattcatgtggaactatgaggatggaggagaccttgcctattttgatggacttagtgagactattcttgctgtggggcttgtgaagccaaaagcaggcatctttcaacctcatgtgcgacacctcctggttttggcgacccctgtagacatagtaattcttggactcagctatgctaatttgcaaacaggttctggagttcttaatgatagtttgtctggtggaatgcagttgcttccagatcctttatattctcttcctactgataatacttaccttttaacaataacttccactgataatggcagaattttcttggctggaaaggatggctgtttatatgaagtagcctaccaggctgaagcagggtggtttagccaaagatgtaggaaaataaaccactcaaagagctcactttctttccttgttccttccttgctacaattcacgttctcagaagatgatcctattcttcaaattgcaattgataattctagaaatattttatatacacgatctgagaaaggagtaatacaggtgtatgatttgggacaagatggacaaggaatgagcagagttgcctctgtgtcacagaatgccattgtctctgctgctggtaacattgctaggaccatcgatcgttctgtttttaaaccaattgtccaaatagcagtgattgaaaattctgaatcactggactgtcagttattggctgtcacacatgcaggtgttaggttatattttagcacttgtccattcagacagccattagcacggcctaatacactgacgctggttcatgtccgcttacctcctggattctcagcatcttcaaccgtggaaaagccttcaaaagtacatagagctctttatagtaaaggtattctattgatggcagcctcagaaaatgaggataatgatattttatggtgtgtcaaccatgatacttttcctttccaaaagccaatgatggaaacccagatgacagctggtgttgatggtcattcctgggctctttctgcgatagatgaattgaaagtagataaaataattacacctttaaacaaggatcatattccaataactgattcaccagttgttgtacagcagcacatgttacctccgaagaaatttgttctcctctcagcacaggggagccttatgtttcataaacttagacctgtagatcaactgaggcatctacttgtgagtaatgtgggaggagatggagaagagattgaaagattctttaaattacatcaggaagaccaggcttgtgcaacttgccttattcttgcttgctccactgctgcctgtgatagagaagtatctgcctgggctactcgggctttctttaggtatggtggtgaagcacagatgagatttccaaccactcttccgcctccaagtaatgttggtcccatcttggggtctcctgtctattctagttctcctgttcctagtggtagtccctatccaaatccatcctttttgggaacaccgtctcatggtatacagcctcctgccatgtcaactccagtgtgtgctctgggaaacccagcaactcaggccacaaatatgagttgtgtgactggaccagagattgtgtactctggaaaacacaatggtatttgcatttacttttctcggatcatgggaaacatttgggatgcaagcttagttgtggagagaatattcaagagtggcaacagagagatcactgcaattgaaagtagtgttccctgccaactgctagagtcagtgctacaagaactaaagggtttgcaggaatttctagacagaaactcccagtttgcaggaggaccattaggaaatccaaatactactgctaaagtgcagcagaggctgataggattcatgcgtcctgaaaacggaaatccccagcaaatgcaacaggaactgcagaggaagtttcatgaggctcaactaagtgaaaagatttcacttcaggcaattcagcagttggttcgaaaatcatatcaggctctggctttatggaaacttctttgtgaacatcaattcactatcattgtggcagaacttcagaaggaacttcaagagcagctgaagatcaccacctttaaagatcttgtaatcagggacaaagaactcacaggggcattaattgcttctcttatcaactgctacatcagagataatgccgctgttgatggcattagtttacatttacaggatatctgcccacttctatatagcactgatgatgcaatttgttctaaggcaaatgagcttctccagcgttcccgacaagttcaaaataagactgaaaaagaaagaatgttaagggaatcattaaaggaatatcaaaaaattagcaatcaagtggacctttccaatgtttgtgctcagtatagacaagtgagattttatgagggtgtggtggaactttctcttacggctgcagagaaaaaagatcctcaaggtcttgggcttcatttctataaacatggagaaccagaagaagacatagttggacttcaggccttccaagaaagattaaacagttacaaatgcattacagacacacttcaagaactggtaaatcaaagtaaggccgctcctcagtctcccagtgtacccaaaaaacctggtcctccagtgttgtcatctgatccaaatatgctgagtaatgaagaagcaggacatcattttgaacaaatgcttaaattgtcacagcgatccaaggatgagctctttagtattgccctttataattggctaatacaagtcgaccttgcagataagctgctacaggttgcttctccatttctggagccacatctagtccgaatggccaaagttgatcaaaacagagttcgttatatggatttactctggcggtattacgagaagaacagaagtttcagtaatgctgctcgtgtactgtccagactggctgacatgcatagcacagaaatttcacttcagcagcgactagagtacattgctcgagccattcttagtgccaaaagttccactgccatttcatcaatagctgccgatggtgaatttcttcatgaattagaagaaaaaatggaggttgctaggatccaacttcagatacaggagacactacaaaggcagtattcccatcattcttctgtacaggatgcagtttctcagctggattctgagctgatggacataactaagctttatggggaatttgctgacccatttaaacttgcagagtgcaaacttgcaataattcattgtgccggttattcagaccctatattggtgcagacactttggcaagatatcatagagaaagaattgagtgacagtgtgacattgagctcctcggatagaatgcatgctcttagtctcaagattgttctccttggcaaaatttatgctggcacaccacgcttctttcctttagattttattgtacagtttttagaacagcaggtttgtactttgaactgggatgtgggcttcgtaatacagacaatgaatgaaattggagtaccattacctagactactagaagtttatgatcagttgttcaaatcacgggatccattctggaacagaatgaagaagccactgcaccttttggattgtatacatgtattattgataagatatgttgagaatcccagccaagttttaaattgtgaaaggagaagatttacaaatctctgcctggatgctgtttgtggttaccttgttgagctccagtctatgagctcgtcagtagcagtacaagccatcactgggaattttaaatctcttcaagctaaattagaacggcttcattaattactgtgatatactttcatccgttttatgatctgtaaaataaaaactcagctgggtccag

SEQ ID NO: 6508 - DNA, 8907 bp, Homo Sapiens
  NM_153487
ggagagcgagagaccgaacgaggagacgcgaggaggagggaggaggaagagagggagggaggcgggaggagcgcggaatgaaaagctcggaggggcgaaaaagcagcacagcaaagcccaagttgctgagcgagcggagcgctcccgcggcccggagccgagcggccgccgcgccccggagcccggcccggccccgcccgctctgggcccccgcaggccaaggccgccgggcgggggcggggacgaccaacttggggcgcggcgtagccccgctctcccgagagctcggagcccgggagggctacggccgcggccagacggcgggagaggagcgcggcgagcggaggcggcgagcggcgcccgcgccgcagccccggcctgggcgagagcgcgaatatttttcaaaagactcaaactttcctcctttccccgttttctggggcccttcttgcctggaattgctctccagattcccgcggggcgccgggctgctattcttcccccgggtttatcggcggctcggctaacttcacggacccggggacccgcggcgctcgtccctcggccgaacccagcccgcgctgctccccggatcaggagggccgggcccggggctgcttcgccgccgcgagtgctttcagcccggccccctggagtcgggccgctgagcccacggcagcggccgcaggactggaaacagcagattgattaactcgagcggagccccggcctccccgactccgctccgctgaggggcggccccagtgcggggaaacgacaagtttgtcagtcgtccgtggcctgttggatcgaagcgccgcctccgccgccgagaggtccccggcgcctagcatcccgcgcggacggccctgggtacccggggcggctcggcggccgggctcctcgggtcggggcgctggctgctgtgccgggcgcgccgaggcacccggggctgggccagcgccccctgcgtccccacgcgggcagcggccccgccggaggagaaacacgggtcgccgccacctccgcctcttcagtctcctggtcttcgtcgccgctctctctctcacctctcagggaaagggggggacataggggcgtcgcggggccccggcgaatgcgccccccgccgcctctcgggctgcgccgcctcgcggggatgaagcaccggccgtgaagatggaggtgacctgccttctacttctggcgctgatccccttccactgccggggacaaggagtctacgctccagcccaggcgcagatcgtgcatgcgggccaggcatgtgtggtgaaagaggacaatatcagcgagcgtgtctacaccatccgggagggggacaccctcatgctgcagtgccttgtaacagggcaccctcgaccccaggtacggtggaccaagacggcaggtagcgcctcggacaagttccaggagacatcggtgttcaacgagacgctgcgcatcgagcgtattgcacgcacgcagggcggccgctactactgcaaggctgagaacggcgtgggggtgccggccatcaagtccatccgcgtggacgtgcagtacctggatgagccaatgctgacggtgcaccagacggtgagcgatgtgcgaggcaacttctaccaggagaagacggtgttcctgcgctgtactgtcaactccaacccgcctgcccgcttcatctggaagcggggttccgataccctatcccacagccaggacaatggggttgacatctatgagcccctctacactcagggggagaccaaggtcctgaagctgaagaacctgcggccccaggactatgccagctacacctgccaggtgtctgtgcgtaacgtgtgcggcatcccagacaaggccatcaccttccggctcaccaacaccacggcaccaccagccctgaagctgtctgtgaacgaaactctggtggtgaaccctggggagaatgtgacggtgcagtgtctgctgacaggcggtgatcccctcccccagctgcagtggtcccatgggcctggcccactgcccctgggtgctctggcccagggtggcaccctcagcatcccttcagtgcaggcccgggactctggctactacaactgcacagccaccaacaatgtgggcaaccctgccaagaagactgtcaacctgctggtgcgatccatgaagaacgctacattccagatcactcctgacgtgatcaaagagagtgagaacatccagctgggccaggacctgaagctatcgtgccacgtggatgcagtgccccaggagaaggtgacctaccagtggttcaagaatggcaagccggcacgcatgtccaagcggctgctggtgacccgcaatgatcctgagctgcccgcagtcaccagcagcctagagctcattgacctgcacttcagtgactatggcacctacctgtgcatggcttctttcccaggggcacccgtgcccgacctcagcgtcgaggtcaacatctcctctgagacagtgccgcccaccatcagtgtgcccaagggtagggccgtggtgaccgtgcgcgagggatcgcctgccgagctgcaatgcgaggtgcggggcaagccgcggccgccagtgctctggtcccgcgtggacaaggaggctgcactgctgccctcggggctgcccctggaggagactccggacgggaagctgcggctggagcgagtgagccgagacatgagcgggacctaccgctgccagacggcccgctataatggcttcaacgtgcgcccccgtgaggcccaggtgcagctgaacgtgcagttcccgccggaggtggagcccagttcccaggacgtgcgccaggcgctgggccggcccgtgctcctgcgctgctcgctgctgcgaggcagcccccagcgcatcgcctcggctgtgtggcgtttcaaagggcagctgctgccgccgccgcctgttgttcccgccgccgccgaggcgccggatcacgcggagctgcgcctcgacgccgtaactcgcgacagcagcggcagctacgagtgcagcgtctccaacgatgtgggctcggctgcctgcctcttccaggtctccgccaaagcctacagcccggagttttacttcgacacccccaaccccacccgcagccacaagctgtccaagaactactcctacgtgctgcagtggactcagagggagcccgacgctgtcgaccctgtgctcaactacagactcagcatccgccagttgaaccagcacaatgcggtggtcaaggccatcccggtccggcgtgtggagaaggggcagctgctggagtacatcctgaccgatctccgtgtgccccacagctatgaggtccgcctcacaccctataccaccttcggggctggtgacatggcctcccgcatcatccactacacagagcccatcaactctccgaacctttcagacaacacctgccactttgaggatgagaagatctgtggctatacccaggacctgacagacaactttgactggacgcggcagaatgccctcacccagaaccccaaacgctcccccaacactggtccccccaccgacataagtggcacccctgagggctactacatgttcatcgagacatcgaggcctcgggagctgggggaccgtgcaaggttagtgagtcccctctacaatgccagcgccaagttctactgtgtctccttcttctaccacatgtacgggaaacacatcggctccctcaacctcctggtgcggtcccggaacaaaggggctctggacacgcacgcctggtctctcagtggcaataagggcaatgtgtggcagcaggcccatgtgcccatcagccccagtgggcccttccagattatttttgagggggttcgaggcccgggctacctgggggatattgccatagatgacgtcacactgaagaagggggagtgtccccggaagcagacggatcccaataaagtggtggtgatgccgggcagtggagccccctgccagtccagcccacagctgtgggggcccatggccatcttcctcttggcgttgcagagatgatgagagctgtgtggccacccccccaaccttgcccccggcacaccaaagtgtccacattgtaccaaagactgacccccgccagctggggtgcccaggggcagggccggcccgccagggagggggcctgcattggctgcaaggatgagcagagaacaaggacagaggccaggcactgaggccctggagacagctgttccacttgcacacacgcacacactcatgctcacacacacagagatatattaaagcacaagtttctatctgacctgccagcaccttctttactgcaaagacaggggacttgcctgaatggcatccgccaacccagggacctcggcgcaacataggccttgtccttgctgcactcgtggtgtgcttctgactttaccctgtcccctaagtcaaggccgaactccagcctggtggctttgccagaagggagccagaagtggggcagacatggagcccctcccttggtcagactctgggactcctgagatgggagaggcagggatcagaggacgaacaggtgggactttgcgagctctgtgactgtcccacgtccaggagacaaggaaggtagggcacctgctgcacacgattctgtccagagtgagcactggatggtggagaccataggtcaccccagattccttgacctatttctgggacaccatatttccctcctcagtgtgcaccctttgaagggacccagcacagggtcttgggcctgggcagtctgaagactgataacttccccactccaccctacaagcagtgggactcctgagaacacggttctctcctagcctcagcccccagctgggtctcagaggagctgggggagcggtggccagcccattttctggggtgaggcttgacttggagaaaggcagaagagacgtcccgcttctgtgatttggtgcccccatatcagacaatgaatttggaagtggagaggggccttcatttcttatctacttggcatgaaagggtgccctggataggagggtgtgtacagggcaaaatgccaaaaagcactgtctagttgaaagttcccttctccacccaggggcagtgaaggaggaggggcttatagagctgggattggtggagggagcaggtgccagtcccctcactctctgggagctgtgaaagggatccctgtccttgggtcctgggttaggcacctgagattgacatgatgggatctagatctttcctccttgacatcacctgagcccccacctagccatccatgggagagagaaggcccagccccttctagaatgactctttaggcatgcgtgcatatgtgtgtatgtgtttgtgcccgtctgtgtctaggtaccaccgtgggtacattgttgggcaggagtgtgtgcaaacacaggtctgtgtgtgcaatctcacatatctgcctgtgagactggattgagacccattcgtttctatgaatgtccgtgtacgtcagcgtgtgtgtccaccttcctgagtgatgtgttcgcttgtagggtgctggctgaatagactctgtccagccctgttctgtagtctcaagctgcctgcgatggcctgaaattccacctttcatcccctatggatgacggagagcttacagatgaccctattgaatgcaagcacctttggtgaggagcatcacagggctccttctggagcatttggtggggacagctgcagagaagaggcctggaactcgggcagcactgcagtgccaggaggcaggcggggaaccgaggcaaaggctgcccatctccccctgccaggcctgtgtgatcattatcaccaacagctggtgggtggccgggccaggatgcagcggggccttctgatgcccaatcagcacggctgccttcctgacccagtcaaggcctctgtctgaaatgagtcgctccaggttctcagcatacacttccatcgcgtctgtcgggtattgttccttaactgtcccatctgtgcagagtccattgccccaactagactgtgagctcctcctctgagccttccaagtcccccctccaccttcgccacctcccgctcgtgcccagcacaagtgagcctggtgtggaaaccactccattgcccggtggaatggattctgtaatcagtggttcctggccttgcctgcagaatagaaccaccagagtcctttaaaaagtattgctgcttggttcccacctcagaggttctgagttaattggactggagcgcagtcggacatcaagaaatgttgaaaagctccttgggttctcctgacagcaggaaccactggcctggcaccacctgggtgcttcctctgtgccctcgctggggtaggcattggagcaccagagatgaatagccccaagtgctccctctttggggttcccaaggcaccctgtgcctgcttccctcagaggaccttccaatccatttgccccgcaaccctggctgctccgacaggggagacttgtctcccttgttcccctcaggatccatagagtggacagtaaaggtgctcagtacatgttggctgagctgaactgcatacatgtggcccccaggttcctggtctttatggacgaagggcacaaggtggaggggggatggggggatgctgctggaggtctcagtgggtgcagacagccctgccttgaggatggcttgacctgggattgacaaaatgtgtctgctgaaatgctgaggtccccacgtgtgaatgggtgaggctgatgtggatgtctgtgtgtgccagcaggtgggtgggggatgtgggtgtcagtgtatgccagtgggcactgtaaatgtctaggcatgtgctggtctctgtgtgtttgtgtgttcctcagcaggaatgagtgtctttgtgtatcacctggtgacttgtcagtgtctgtgtctgtgtgtgcctgtgagccagcatctctgtatcagtgttgctcatgctgtgtctttgtgcgccatggtgtgtcagtgtctgtgtgttgatgggtggcccatgagtgacccccgccaggggagaccaggctggctggatccagcacatctccccagtggcagcctcgccctctgggtcagggtgactgaggcattttgtggccttaaaacggggtgttcagggtcagccctcagggtgctggggcccttccatcccttgtccccttcaggttggtgaaaaggactccgggggccaggtgctgtatagcagcttatggaagtctcagctgggctatcctgcccttgggagcacagacaggctcctagggtgctgagtgaagcctgaagaccaagccccctcctcctggaatgctccttccacccctacctctcagagatgggcctgacacctctttctcattcattctccttttccctgtgctctgggaaagcccctggctcaggctgtcagagtgaggatggacctcaaaagtttgatcccctcgtgcagatgaagaagctgaagcccagagtggggaaggggagtggcccaaggtcacacagctagtttgagtagagccagtcttgggagagccaagtactacagccctgggggtgtcacaccgcttgtcactgcccctgaggtctcctgccaaacaactgcagggagtttggctaacagtcctgtgtccagggtgccggtggggatgttatagatgttgctgggatcctgccctcggctccaaattctggcctctcatcccaggctgcagacccttctgccccatgacaggcctgggtgccacacagaggtggccaccctcccaccacagtgtctgcagctgctgcccttctcccaggcccccagacagaagagaccctgtttcccctcctctcccctgtgacttcacaagagcttgggctaggagtgaaggtcagcatgttctcatgtgctcatcctcttggtttccccaaagaccgggagggtcacggatggggcgtgcagaatccttgtgttttttctcgctgggcagcttgaggggctggggagtattcccagggtctttgctctggagagtccctgcagagccactggctgaggttgggttcagggttcagcggagtcctccatgcttccaaaggccgggaagcacccgcctctctatcgagtcagtgctgtgcgtgtgtgtctgagaatgtgtgtgatgtgtggagtgtgcgtgtgtttgtgtgtgtgtgtgtgtgtgttggggcagaaggaccactctttcctggggatcccttgacccttataactagaagggaccttagggagcatctaagctggtgcccccattgtacaggcgaggtccagagggatggcatctgcccaccccaccccttgccctcttgttgcctgcactcatttcccagggaccctcctaggataggactgccctccttcctggccccctcccgccatcctcccagccacccacataatcaccatctcagcccaactctggtggccctctaggtctccatgcattcttcctgccctagagtagccagctcaccaaggcctttatccccagcccaggagaagggtcagggagggaaggggctgcaccagccctgagacctcaaagacttgggagaaaagccaaaactcctcatgcccaggcccacatgtctgaccaccccagcccaccccgccaccaaggtaaaagcacaacaggagacccccttattaatgggtgaaatgattggggttgtttttttagtcacacagccccatcctcacccctttgccttgctgtctgtctccaccccagcctctgttccccatttgcctctctttcacctccaagcccccaaatgtaacctctagttgcggacgcggttgttctatcaataaagctgcagtgttctagcgctcagcgt

SEQ ID NO: 6509 - DNA, 1994 bp, Homo Sapiens
  NM_153497
actcgctgctctgcggggaggcgggcgctcccgcaggggttcctccaagatggcggcgcagaggaggagcttgctgcagagtgagcagcagccaagctggacagatgacctgcctctctgccacctctctggggttggctcagcctccaaccgcagctactctgctgatggcaagggcactgagagccacccgccagaggacagctggctcaagttcaggagtgagaacaactgcttcctgtatggggtcttcaacggctatgatggcaaccgagtgaccaacttcgtggcccagcggctgtccgcagagctcctgctgggccagctgaatgccgagcacgccgaggccgatgtgcggcgtgtgctgctgcaggccttcgatgtggtggagaggagcttcctggagtccattgacgacgccttggctgagaaggcaagcctccagtcgcaattgccagagggagtccctcagcaccagctgcctcctcagtatcagaagatccttgagagactcaagacgttagagagggaaatttcgggaggggccatggccgttgtggcggtccttctcaacaacaagctctacgtcgccaatgtcggtacaaaccgtgcacttttatgcaaatcgacagtggatgggttgcaggtgacacagctgaacgtggaccacaccacagagaacgaggatgagctcttccgtctttcgcagctgggcttggatgctggaaagatcaagcaggtggggatcatctgtgggcaggagagcacccggcggatcggggattacaaggttaaatatggctacacggacattgaccttctcagcgctgccaagtccaaaccaatcatcgcagagccagaaatccatggggcacagccgctggatggggtgacgggcttcttggtgctgatgtcggaggggttgtacaaggccctagaggcagcccatgggcctgggcaggccaaccaggagattgctgcgatgattgacactgagtttgccaagcagacctccctggacgcagtggcccaggccgtcgtggaccgggtgaagcgcatccacagcgacaccttcgccagtggtggggagcgtgccaggttctgcccccggcacgaggacatgaccctgctagtgaggaactttggctacccgctgggcgaaatgagccagcccacaccgagcccagccccagctgcaggaggacgagtgtaccctgtgtctgtgccatactccagcgcccagagcaccagcaagaccagcgtgaccctctcccttgtcatgccctcccagggccagatggtcaacggggctcacagtgcttccaccctggacgaagccacccccaccctcaccaaagacccttccaggcctgcaagcgatttgacagccatccctcagtgccaactaaacctcctgggcagcctgaccccagggtaggaaggaagcgcctacaccaaggggccctctgggagctgagatcatcctggggttttgtcgcctggtctgacttgtgcactgggatcttctcgtgccaggccaggccccgccccctccccgggactgggcagaccccctccctcatgcatctgtgtccactgaggcttccctcacctagaatggcccatccttcaggacccagctcactctcatcttctttccagggacttatcccccaaggctgtcctctgttctggtgagctcagggctcttggaacttggtctgcagtgactctggggttcctggttaggacccatgttctctaggtcccagcaccctgcacggggcagtgtttgtgacactgggcccagctattctgagagaaggactccaaccttccatcaggtgtggcccgagatgtgggtggccctgggcatggggcatggatgcattgtgactttcatgggcctcttctgcaaaaaaaaaattaaaattatactttatgactattggtagaaagataaatatattaatacattaaaatttctctttgag

SEQ ID NO: 6510 - DNA, 2242 bp, Homo Sapiens
  NM_153498
agccggcgcgcggcggcggcaggaagtctgtgcccgagaacagcagaaataagagccagggagggaccgcggccgcggcggcggcggcgagagcgaaagaggaaactgcagaggaggaagctgcgccgcagcccgagccgcccggcatccccgccgcctctgcgcccgcgccgcgcccccggcgccccctccccagcgcgcccccggccgctcctccgcgccgcgctcgtcggccatggcccgggagaacggcgagagcagctcctcctggaaaaagcaagctgaagacatcaagaagatcttcgagttcaaagagaccctcggaaccggggccttttccgaagtggttttagctgaagagaaggcaactggcaagctctttgctgtgaagtgtatccctaagaaggcgctgaagggcaaggaaagcagcatagagaatgagatagccgtcctgagaaagattaagcatgaaaatattgttgccctggaagacatttatgaaagcccaaatcacctgtacttggtcatgcagctggtgtccggtggagagctgtttgaccggatagtggagaaggggttttatacagagaaggatgccagcactctgatccgccaagtcttggacgccgtgtactatctccacagaatgggcatcgtccacagagacctcaagcccgaaaatctcttgtactacagtcaagatgaggagtccaaaataatgatcagtgactttggattgtcaaaaatggagggcaaaggagatgtgatgtccactgcctgtggaactccaggctatgtcgctcctgaagtcctcgcccagaaaccttacagcaaagccgttgactgctggtccatcggagtgattgcctacatcttgctctgcggctaccctcctttttatgatgaaaatgactccaagctctttgagcagatcctcaaggcggaatatgagtttgactctccctactgggatgacatctccgactctgcaaaagacttcattcggaacctgatggagaaggacccgaataaaagatacacgtgtgagcaggcagctcggcacccatggatcgctggtgacacagccctcaacaaaaacatccacgagtccgtcagcgcccagatccggaaaaactttgccaagagcaaatggagacaagcatttaatgccacggccgtcgtcagacatatgagaaaactacacctcggcagcagcctggacagttcaaatgcaagtgtttcgagcagcctcagtttggccagccaaaaagactgtctggcaccttccacgctctgtagtttcatttcttcttcgtcgggggtctcaggagttggagccgagcggagacccaggcccaccactgtgacggcagtgcactctggaagcaagtgactggccctggaggtggggcccggggtcggggctggggaaggggagccccagggtcgccagagccgcgagccactccagcgagaccccaccttgcatggtgccccttcctgcataggactggaagaccgaagtttttttatggccatattttctactgcaattctgaagtgttcatttctcacaaactgtactgactcgaggggcgctgatttcataggatctggtgctgtatatacgaatcttgcaaagctctaactgaacggaccttcttattcctctcccctaacaccatcgtttccactcttctcagtgtaggtaaccgtctatggtgtgttttttcattaatgacaaaaaaaaaaaggtttcaactggattatttaaatattggtaaatattgtgcattagggtttgtttttccttttaagaagtatgtcctttgtatctctaagttacatgacctatatcttttcctctttaatagtagttttatgttaacctttaagagatttgtttttcctcaaaggagaatttaaaggtattttttaaaattctaataagaggatcagccgggtgcaatgactcatgcctgtaatcccagcacgttgggaggccaagtcgggcggatcacaaggtcaggagatcaaggccatcctggccaacatggtgaaaccccacgtctactaaaaatacaaaaaattagccgggcgtggtggcacacacctgtagtcccggctactcgggaggctgaggcaggagaattgcttgaacccgggagacggaggttgcagtgagctgagatcgtgccactgcactccagcctgggtgacagagcaagactctgtctcaaaa

SEQ ID NO: 6511 - DNA, 2943 bp, Homo Sapiens
  NM_153603
gcgagggtcattcccagccgcaaactgagtgcgctgagcggggaagcgcaaaggggcaagttacccgtcctggcgtttctggggttcgcctcggaggctagcctcggtgctctcgcaggctcgctcgcttctgcatccccgttgccgcccggagccaactcttaagttctggacgccaggcctgaggcagttccgccatggacttctccaagttcctggcagacgacttcgacgtgaaggagtggatcaatgcggccttcagggccggctccaaggaggcggcgtccgggaaggcggatggccacgcagccaccctggtgatgaagctgcagctgttcatccaagaggtgaaccacgccgtggaggaaacaagtcaccaagctctccagaacatgcccaaagtgctccgtgatgttgaagccctaaaacaggaggcatctttcctgaaagaacagatgattcttgtcaaggaggacattaaaaaatttgaacaggacacatctcaatccatgcaggtgttggtagaaattgaccaagtgaagtccagaatgcaacttgctgccgaatctcttcaggaagcagataagtggagcacgttgagcgccgatattgaggagacatttaagactcaggacatagctgtgatttctgccaagctaacaggtatgcagaacagcttaatgatgcttgttgatacaccagactactcagaaaagtgtgtgcacttggaggcactgaagaacaggctggaggccctagccagtccacagattgtagcggcattcacctctcaggctgtagatcagtccaaagtgtttgtgaaggtgtttactgaaattgaccggatgccccagctcctggcctactactacaagtgtcacaaggtgcagcttttagcagcctggcaagagctgtgtcaaagtgacctatccctggaccggcagcttaccggactctatgatgccttgcttggtgcttggcacacacaaatccagtgggctacacaggttttccagaagccccacgaggtggtaatggtgctgctgattcagaccctgggggccctcatgccctcgctgccctcctgcctcagcaacggcgtggagagggcagggcccgagcaggagctcaccaggctgctggagttctacgacgccaccgcccacttcgccaagggcttggagatggcactgctcccccacctacatgaacacaatctggtaaaagtcacggagctggtggatgctgtgtatgatccatacaaaccctaccagctgaagtatggcgacatggaagagagcaacctcctcatccagatgagtgctgtgcctctggagcatggggaagtgattgactgtgtgcaggagctgagccactccgtgaacaagctgtttggtctggcgtctgcagccgttgacagatgcgtcagattcaccaatggcctggggacctgcggcctgttgtcagccctgaaatccctctttgccaagtatgtgtctgatttcaccagcactctccagtccatacgaaagaagtgcaaactggaccacattcctcccaactccctcttccaggaagattggacggcttttcagaactccattaggataatagccacctgtggagagcttttgcggcattgtggggacttcgagcagcagctagccaacaggattttgtccacagctgggaagtatctatctgattcctgcagcccccggagcctggctggttttcaggagagcatcttgacagacaagaagaactctgccaagaacccatggcaagaatataattacctccagaaagataaccctgctgaatatgccagtttaatggaaatactttatacccttaaggaaaaagggtcaagcaaccacaacctgctggctgcacctcgagcagcgctgactcggcttaaccagcaggcccaccagctggctttcgattccgtgttcctgcgcatcaaacaacagctgttgcttatttcgaagatggacagctggaatacggctggcatcggagaaaccctcacagatgaactgcccgcctttagtctcacccctctcgagtacatcagcaacatcgggcagtacatcatgtccctccccctgaatcttgagccatttgtgactcaggaggactctgccttagagttggcattgcacgctggaaagctgccatttcctcctgagcagggggatgaattgcccgagctggacaacatggctgacaactggctgggctcgatcgccagagccacaatgcagacctactgtgatgcgatcctacagatccctgagctgagcccacactctgccaagcagctggccactgacatcgactatctgatcaacgtgatggatgccctgggcctgcagccgtcccgcaccctccagcacatcgtgacgctactgaagaccaggcctgaggactatagacaggtcagcaaaggcctgccccgtcgcctggccaccaccgtggccaccatgcggagtgtgaattactgaccccaccacacaccggaccaccaagagagccagggctgctgtttcgcgactcaccagcacagatttgctcagaaactctgcccaagattgggcagaagttactttaaaaagacttggttcagctggtcacggtggctcacgcctgtaatcccagcactttgggaggccaagccagatggatcatgaagccaggagttcgagaccagcctgaccaacatggtgaaaccccatctctactaaaaatacaaaaattaacagcagagcgagactctgtctcaaaaaaaaaaaaaaaaaagacttggttcatttgtataatcaaaaagagttgtaaattaaagatgtattatttatcagagaagactttttagataatttttttaaaggatcagatcttgaaaatggaataaataactactgtgaaatgcaaaaaaaa

SEQ ID NO: 6512 - DNA, 3045 bp, Homo Sapiens
  NM_153611
tctatggccagtctggccgccatgttggagctttcgctgttcggggcccggcctgctccgggccctcccagcgtcgccgctagctgacttagggctcccgcccacactgcgcacggccttgctgagggccggctcgtagtgggaggcttcgcgttcacctgaacatttccgcctcctctggatgggggatgagaggcggggctgatgcatcgcagcagtcctggaccctgacttcggacttggagaagaaacgccgaggaggaacgggagttagggggttagcagcttggcgcgctgggagccggccacccctggtctccggacttcacttcccaggaggcctcgcgcgcgactggaagtgctgcgagcctataagaaggcgaggcggcacccgccgctctgctctggggcggcattgccagccggctgtaggcattcagggcagtgtcttctgcatctcctaggaacctcgggagcggcagctccggcgcctggtagcgagaggcgggttccggagatcccggcctcacttcgtcccactgtggttaggggtgagtcctgcaaatgttaagtgatttgctcaaggtgcccatttcgcaggaattggagcccaggccagttctctgagcctatcattagggctaaaggagtgcgtgatcagaatggtgtctggacggttctacttgtcctgcctgctgctggggtccctgggctctatgtgcatcctcttcactatctactggatgcagtactggcgtggtggctttgcctggaatggcagcatctacatgttcaactggcacccagtgcttatggttgctggcatggtggtattctatggaggtgcgtcactggtgtaccgcctgccccagtcgtgggtggggcccaaactgccctggaaactcctccatgcagcgctgcacctgatggccttcgtcctcactgttgtggggctggttgctgtctttacgtttcacaaccatggaaggactgccaacctctactcccttcacagctggctgggcatcaccactgtcttcctcttcgcctgccagtggttcctgggctttgctgtcttcctcctgccctgggcgtccatgtggctgcgcagcctcctaaaacctatccacgtcttttttggagccgccatcctctctctgtccatcgcatccgtcatttcgggcattaatgagaagcttttcttcagtttgaaaaacaccaccaggccataccacagcctgcccagtgaggcggtctttgccaacagcaccgggatgctggtggtggcctttgggctgctggtgctctacatccttctggcttcatcttggaagcgcccagagccggggatcctgaccgacagacagcccctgctgcatgatggggagtgaagcagcaggaaggggctcccaagagctcctggtggtgcagcctgtgctcccctcagaagctctgctcttcccagggctcccggctggtttcagcaggcgactttcttccaatgctgggcccagacttcttgcctgggtgctggcctgccctctccggccgcttgctgcctgtctgctttccttggtggctttgcctgggtgctgggcctgccctctccggccgcttgctgcctgtctgctttccttggtggctttgcctgggtgctgggcctgccttctctggctgcttgctgcctgtctgctttccttggtggctttggcttctgcactccttggcgtcagcctctcaggtcctccattcacacgaggtcctcctcgctctggccgctcttgctgctcctgtctgaagaaatcagactgatttcctcttaagactcctagggatgtggtgaagagctgggactcaagtgcagtccacggtgtgaaacatgagggaggtgaggtgtccgtccacttcccccataaaggtgtgcatttcagttaggctgccccgccacagagcaggcttcatctgctctgccatccagccccatctggatgtgaggtggggtggagacatcatggggtgattgcagaaagggggagtggcggcccacgcagcttctgctgaggagctgaccgctctgagctgttctgtttcgtattgctgctctgtgtctgcatgtattgtgaccgtgcggctccacctcttccagctgctgctacagctgaggcctggatcccggcctttccctgtgacttacgtgtctgtcaccggcaggcagccctacaaatcctggtgacctgctctcccaagaacagagcctgtccccagatgtcccagtagcgatgagtaacagaggtggctgtggacttcctctacttctccttgctggatcagggccttcctgcctcccgctgggcaggtctggccttgctctcttggcagggccccagcccctctgaccactctgcagctcaccatgcagctgatgccaaagttgtggtgtccagtgtgcagcagccctgggagccactgccaccttcagaggggttccttgctgagacccacattgcttcacctggccccaccatggctgcttgcctggcccaacctagcgttctgtgccatgctagagcttgagctgttgctcttcttcaggggaggaaatagggtggagagcgggaagggtcttgctcctaagtgttgctgctgtggcttttttgccttctccaaagacgcactgccaggtcccaagcttcagactgctgtgcttagtaagcaagtgagaagcctggggtttggagcccacctactctctggcagcatcagcatcctactcctggcaacatcaggccaacgtccaccccagcctcacattgccagatgttggcagaagggctaatattgaccgtcttgactggctggagccttcaaagccactgggatgtcctccaggcacctgggtcccatgaccagctccccatctccataggggtaggcatttcactggtttatgaagctcgagtttcattaaatatgttaagaatcaaagctgtctttgttcaggctgctataacaaaaatataatagcctgggtggcttaaacaaaaa

SEQ ID NO: 6513 - DNA, 1908 bp, Homo Sapiens
  NM_153613
agcgccgccgccgccgctgctgcagcagcagctgctctgcagagtggtggccggggccagggccggggtgccctccctcccaccttctcccgccatgagccagggaagtccgggggactgggcccccctagatcccacccccggacccccagcatcccccaaccccttcgtgcatgagttacatctctctcgcctccagagggttaagttctgcctcctgggggcattgctggcccccatccgagtgcttctggcctttatcgtcctctttctcctctggccctttgcctggcttcaagtggccggtcttagtgaggagcagcttcaggagccaattacaggatggaggaagactgtgtgccacaacggggtgctaggcctgagccgcctgctgtttttcctgctgggcttcctccggattcgcgttcgtggccagcgagcctctcgccttcaagcccctgtccttgttgctgccccacactccactttctttgaccccattgttctgctgccctgtgacctgcccaaagttgtgtcccgagctgagaacctttccgttcctgtcattggagcccttcttcgattcaaccaagccatcctggtatcccggcatgacccggcttctcgacgcagagtggtggaggaggtccgaaggcgggccacctcaggaggcaagtggccgcaggtgctattctttcctgagggcacctgttccaacaagaaggctttgcttaagttcaaaccaggagccttcatcgcaggggtgcctgtgcagcctgtcctcatccgctaccccaacagtctggacaccaccagctgggcatggaggggtcctggagtactcaaagtcctctggctcacagcctctcagccctgcagcattgtggatgtggagttccttcctgtgtatcaccccagccctgaggagagcagggaccccaccctctatgccaacaatgttcagagggtcatggcacaggctctgggcattccagccaccgaatgtgagtttgtagggagcttacctgtgattgtggtgggccggctgaaggtggcgttggaaccacagctctgggaactgggaaaagtgcttcggaaggctgggctgtccgctggctatgtggacgctggggcagagccaggccggagtcgaatgatcagccaggaagagtttgccaggcagctacagctctctgatcctcagacggtggctggtgcctttggctacttccagcaggataccaagggtttggtggacttccgagatgtggcccttgcactagcagctctggatgggggcaggagcctggaagagctaactcgtctggcctttgagctctttgctgaagagcaagcagagggtcccaaccgcctgctgtacaaagacggcttcagcaccatcctgcacctgctgctgggttcaccccaccctgctgccacagctttgcatgctgagctgtgccaggcaggatccagccaaggcctctccctctgtcagttccagaacttctccctccatgacccactctatgggaaactcttcagcacctacctgcgccccccacacacctctcgaggcacctcccagacaccaaatgcctcatccccaggcaaccccactgctctggccaatgggactgtgcaagcacccaagcagaagggagactgagtgcctcagcctctcaccccctcctcctcagggcagcgctaggggcctcccctatgcctcagccccatctctgctcctgtttgaattttgttattgttgtttggttgttgtttttttaagttgattttaattttttgtttggttgatttttttgtaaaaaactattttatatataaatataaatctatatctatatctattaaaaaaaatgaagtccagtcatattgatgttaccatta

SEQ ID NO: 6514 - DNA, 2897 bp, Homo Sapiens
  NM_153615
taaacccatctcctcctatgccacctgcctgggcccctcctgggactttatcactgtgccacactttttggaactactggttagaaggtgagtgtccatccccctccaagacacagaggtgcctctgtcccctactggctctgtcttgaagatgcacctctcggagcctcggttggctcctctggaacagggagtagtgagaagacgaacctcacagggttcttgtagggactcaatgatctaagacacagcaaacaaaggggtccctagagcctaaaactctggaaaatctgctgggggtgctgtgattcatgtttgttacttttctcttccccctcacttgaagcagctctcagcattctgcctcaatggcctgtatcactcactgtttggaaaaacacatagaaaccaagtctgcgatggcactggtaaaggatgtctgagattccttctggctggtctttctccttgacacagacagaagaggggtcccttggtgctgaaaaaggagccacaggcccactcagacatctggagaggctcactggggttctccaaaggttggggttcactcattcaacacatacattcaaaacacctcatttgtgcatcgctcttcttggggcttggcataatttcataaacaaagcagatgacaatcccccggccttgattctactcagagtcaggcactcacagtagacagaataaacaagtcatatctacagaatgttacaggtgagaccctcatggcctcctctacgtatggtggcatcctcccagattctgactagaatgacgcagcccagcaacaaatataaactgggtggatttagggttctgaagggccttttcacccacaaaacatgggggaaaatatgtggactctggctggggagagactaaaggagctctggggctcatacttcttataattcccacgagaaggctgacatctggggacttcccccacaagaggcaaatagtgagttctgtaaatggagacttaggtcccctgcaaagcagaggggaggctggggtcacagctggccactgagagacccatccccctcagcaccgtggcttcccagctctccctgtcctcctccccccgacatctgccccttccctcctaaccccaggaccaggggacccagatctggagctttgatgaggaagctgctcacaaatctgcctgcagctgcagtcttgagtgcccaggtgtacagtgctgtgctccagggcctttgggaagagaatgtctgtgggacgccagggcgcacgagggtctgtacagccctgctgtatggccaggtctgccccttccaggacagcactgatggcttacgcaccatcacctccattttgttcaactggccccccgaaaacacttcagtttactatcagcccccgcaacggtcatctttccggataaagctggccttcaggaacctctcctggcctggactgggcttggaggaccatcaggaaattgtcctaggccagttggtgcttccggagcccaacgaggccaagccagatgatcctgctccacgtcctgggcaacacgcattaacaatgccggccctggagccagcaccaccactgctggcggacctggggcctgctctggagccagagtcacctgcagccctgggtccaccaggatatctacattcagcaccagggccagcaccagcaccaggggaagggccccctccagggacagtgctggagccacagtcagccccagagtcctcctgtccctgtcgtgggtctgtaaagaaccaacccagtgaggagctgcctgacatgacgaccttccctcccaggctgctggcagagcagctgaccctcatggatgcggagctgttcaagaaggtggtgctccacgaatgcttgggctgcatctggggccaaggacatctgaaggggaatgagcacatggcacccacagttcgtgccaccatcgcacacttcaacaggctcaccaactgcatcaccacctcctgcctcggggaccacagcatgagggcccgggacagggccagggtggtggagcactggatcaaggtggccagggagtgcctaagcctcaacaacttctcctcggtgcacgtcatcgtctctgctctgtgcagcaacccaataggtcagctacacaagacgtgggcaggagtgtccagcaaaagcatgaaagagctaaaagaactctgcaaaaaagacactgcagtgaagagggacctactgatcaaggcggggagctttaaggtggccacccaggagaggaacccccagagagtccagatgaggctgcggaggcagaagaagggtgtggtccccttcctgggggattttctgactgagttacagaggctggattcggccatcccggacgacctggatggcaacaccaacaagaggagcaaggaggtccgagttctgcaggaaatgcagctgctccaagtggctgccatgaattacaggcttcggcctcttgagaaatttgtcacctatttcacaagaatggagcagctcagtgacaaagagagctacaagctgtcctgccagctggagcccgaaaacccgtaggctggcaacatcctgcagtggctgggaacccaccgggatgctggccagaacaccggctctgcaccatccctcacccagaccgtagacaccagggaaccacatctaggaggctggcagctcagctgcatcttgccctggatcctcatcaccaactgctcctgctggccaggatcaggccatgggacttttgtgagtcaggcgggagaccattttatgtttattttctttagtgtataagtaagggttttttcttaactttcgttaaaataaaattttaaaaaactattcaaaataaaaaaaaaaaa

SEQ ID NO: 6515 - DNA, 1763 bp, Homo Sapiens
  NM_153640
ccgcgcgcggacactgtccccgcacggtggtccctcgttggtgcgtggcctgacatccggctggaggcctcgggtgctccgaaagcggtaccttcgggggcccccccgcacccattgtttttccatggtttggactggatatcggtggaactctggtcaagctggtatattttgaacccaaagacatcactgctgaagaagaagaggaagaagtggaaagtcttaaaagcattcggaagtacctgacctccaatgtggcttatgggtctacaggcattcgggacgtgcacctcgagctgaaggacctgactctgtgtggacgcaaaggcaatctgcactttatacgctttcccactcatgacatgcctgcttttattcaaatgggcagagataaaaacttctcgagtctccacactgtcttttgtgccactggaggtggagcgtacaaatttgagcaggattttctcacaataggtgatcttcagctttgcaaactggatgaactagattgcttgatcaaaggaattttatacattgactcagtcggattcaatggacggtcacagtgctattactttgaaaaccctgctgattctgaaaagtgtcagaagttaccatttgatttgaaaaatccgtatcctctgcttctggtgaacattggctcaggggttagcatcttagcagtatattccaaagataattacaaacgggtcacaggtactagtcttggaggaggaactttttttggtctctgctgtcttcttactggctgtaccacttttgaagaagctcttgaaatggcatctcgtggagatagcaccaaagtggataaactagtacgagatatttatggaggggactatgagaggtttggactgccaggctgggctgtggcttcaagctttggaaacatgatgagcaaggagaagcgagaggctgtcagtaaagaggacctggccagagcgactttgatcaccatcaccaacaacattggctcaatagcaagaatgtgtgcccttaatgaaaacattaaccaggtggtatttgttggaaatttcttgagaattaatacgatcgccatgcggcttttggcatatgctttggattattggtccaaggggcagttgaaagcacttttttcggaacacgagggttattttggagctgttggagcactccttgagctgttgaagatcccgtgatcattacctggggaggggttcctgaaaccttccacaatgggatctgtggactttcatttttttaagagacttactcaatttcatgactgtactacctgaaacaaagtgagaaaggacaggtgtatttttctaagtcatcaagataaatccttaagaattcagtctaaattagcaaccaggaaggaaaaatatattaaaaacaacaaaaaagtggcacatgtccaggcagtgtgaggatttgctgtatataagttgcctgctttgtatttttgaaatctctgcatcactcattggaagtgcttctgaagagagctgctctgtgttcagttgactggttttgtgtcctgtttgaacttgctgaatgtaaggcaggctactatgcgttataatctaatcacaatttgtcaatatggtcttggcaatcatctgtgcattactctggtttgcattaagcctgtgtgtgaacttactgtaaaacatgttttatttcaaggttctgcaaaattaattgggcaggttaattgtgtacctgaaacttaacaagcagtttttggaagggca

SEQ ID NO: 6516 - DNA, 9773 bp, Homo Sapiens
  NM_153647
agagagaaagttcccggggagagctcgcccctgggagggccgacgtcgagcctgctcgccgcgagggtctcagagacggcacccaggcgctccgggatggcgctccgcgggaccctccggccgctcaaagttcgcaggaggcgagagatgctgccgcagcaagtcggcttcgtgtgcgcggtgctggccctggtgtgctgtgcgtccggcctcttcggcagcttggggcacaaaacagcttctgctagcaaacgtgtcctgccagacacgtggagaaatagaaagttgatggccccagtgaatgggacacagacagccaagaactgcacagatcctgcgattcacgagttccccacagatctgttctccaataaggagcgacagcacggagccgtcctgctgcacatccttggtgctctgtatatgttctatgccttggccatagtgtgcgatgacttctttgttccgtctctagagaagatctgtgagagactccatctgagcgaagatgtggctggagccaccttcatggctgcaggaagctcaacgccagagctgtttgcgtctgttattggggtgttcatcacccatggggacgtcggggtgggcaccatcgtgggctctgctgtgttcaacatcctgtgcataattggagtgtgcggactgtttgctggccaggtggtccgtctgacgtggtgggccgtgtgccgagactccgtgtactacaccatctctgtcatcgtgctcatcgtgttcatatatgatgaacaaattgtgtggtgggaaggcctggtgctcatcatcttgtatgtgttttatattctgatcatgaagtacaatgtgaagatgcaagcctttttcacagtcaaacaaaagagcattgcaaacggtaacccggtcaacagtgagctggaggctgtgaaggagaagccacagtatggcaagaaccccgtggtgatggtggacgagattatgagctccagccctcccaagttcaccttccctgaagcaggcttacgaatcatgatcaccaataagtttggacccaggacccgactacggatggccagcaggatcatcattaatgagcggcagagactgatcaactcggccaatggtgtgagcagtaagccgcttcaaaacgggaggcacgagaacattgagaacgggaatgttcctgtggaaaaccccgaagaccctcagcagaatcaggagcagcagccgccgccacagccaccaccgccagagccagagccggtggaggctgacttcctgtcccccttctccgtgccggaggccagaggggacaaggtcaagtgggtgttcacctggcccctcatcttcctcctgtgcgtcaccattcccaactgcagcaagccccgctgggagaagttcttcatggtcaccttcatcaccgccacgctgtggatcgctgtgttctcctacatcatggtgtggctggtgactattatcggatacacacttgggatcccggatgtcatcatgggcattactttcctggcagcagggacaagtgttccagactgcatggccagcctaattgtggcgagacaaggccttggggacatggcagtctccaacaccataggaagcaacgtgtttgacatcctggtaggacttggtgtaccgtggggcctgcagaccatggttgttaattatggatcaacagtgaagatcaacagccgggggctggtctattccgtggtcctgttgctgggctctgtcgctctcaccgtcctcggcatccacctaaacaagtggcgactggaccggaagctgggtgtctacgtgctggttctctacgccatcttcttgtgcttctccataatgatagagtttaacgtctttaccttcgtcaacttgccgatgtgccgggaagacgattagcgctgagtcgcggcccctgggagctgatctggacaccctgtgacactggcgttctcctctcccctccttcccccaccacaggtctctcctgcataggcagccactgtccgttctttcacacactggaaggaagagccatcgtggtctttgtctggccacaggccaggctgctgggcatcctcctcctccttggagttccgcccctgcaaggctggatttgggggccattatctgagcagcttcaaagacccctgagctgccaaccacggagatgtgccaagcatctcatctctcctgcacactttagtcagaaggacttctgcatgcagtttgtctttctgttctgcaggcagcttcagaattgaggtcatttgtgagcacaagatctcatagggcaggtgcaaaataggaatgttgttctcaagtgtcacctccagcccagaggtggttccttaggcagcatgtgctcctgggagcctctgacttttgctggaagcagccacagtttggaaggggcaagacctcaacctgttggggtttagggcccatgatggcagacattctaccccttttcctggaaaaactggaagaatgaaaataatttttttctgtggaagagagaaaatgagtgaatattcttctcacttttattgatgcattcagagaataagcaatgaaatattaaaaaatgaaacatcatataggtcatcatacttgaaaattatcattccatatgaaaggatcatgatacacaccaaaaaagtaatgatcgtaaagacacaaatcctctgtatgccatcttgcattggcactgaggtgtttggtttggaatagggaaaaaggtaagagactaacgtggaaaggtgctaactcagagactggagattatagtttacagctgtactttccagatcttctatgtgacacaatgcactgtccttgtgggtttgtcatttattggttaatgctctagtttcaaaaccaccctgttgaaagttccagttatttatatgcccaacaaatttcatagcctgctgaactgaactgagtgtgtcagaagtgctggttaatgacgagaagagattgcctgaaaaacaacaaactgctttctggttagctgaaggcaagtgtgaaaatcagaatttagaatatttagagctaagcttctggaaccacgtagtttctacacgtggcaggccaagaatgggaggctgactcaaaactagatagaaaaatataaaataatcttcgaccacttgatagctctcaaatatatatttaaaagatttatgaatacaaaccatttatggtttatgatttctaaaaagaaagcacaattaattttatagagaggttttttatttttttaatatttctattgcaaaagtctatccgatttgatgcactttgaatattgagatattttgcacggatgaatgtatgggaactacccatgatgatgtaagaggaaagaacatttttttgtgattcaccagacatcactttaaacttggtgatgagtttaaatccagtagctaatcccttcctgagactcaaagatcgtgacgctggttggaatttctgactgtgccctttagggcctcctgagtttcaaaaggaggaagtgttcgtgcttgtgtccctgaagttccctgttgcatgagcctgcgacaggacctcacccccaccaccaggcttctatttgggattcacatcagtattagtatcgtagctacaccaagttcaggcttctctttttgtttttttacctagaaattgggctcagtggtcttcaacttgaggacgagggtgattttcctaagaaatcagcaaagagggaaggcagggcccctgtagattcaccagtataaacttcagctgcagggattccagagccctcgggaccactctgtcaccttaatagccaagttctcctggttcctccgatcttacaggctcatccaggttccaaagtgcttctgtctctgttttgattctccaaactgctctgtgatgtatgtagggattattctccccacttaacagaaagtagtgtcttggagaggtcaagggtctctagttcaatggccagtcatagcagaagggaggccaagcaccagtccatcacccctcccaggccagcctctgtaagttggccacacttggggagtgagtgtgggtatgactttaccctcctggttggttcttactgtttgagtcaaaacctcatcaatatatcattgactcctgggttcctcaggtcatttcctaatatctgtccctatccaatgcctctattttatcttgaaaaaaggaccaaaaattatttttagctatggcaaggcacaggccacatggcccctgatggcgtccctgctggttttcaattctctgaagccttgtgtagctttcagagcacacgtatcctaattaccctcctcttcctcagcagaacccatttgagattctaaatgaatactcttagtctctaaagttgcagttagaaactaaaataatgttttttaatatgtaatatgctcctcttggctaattttcttttgactttaatgtgccaatgtaacttcctttaaaggatctatgcatttattaaatctggaaaactatatgtacactgtaggtggaaaattctcttttttaactaaatatttttccatcacaaatttaaagaattgcatgattaattaggctttcatttttaaattacgctttcatcactacgcaggattactttattttattcccaaagctcattagcatgggataattactctgctacagaaataggcaatttaaaaaaatgaatttagctcttctcattgggggcagaaaagaaaaaaaaaaccattgcactcagatggaaaatgcctatagacacaggagcaggtggttcctgtggacttctggtttggaattttgcctcaccaggtcaagcgtggttagggtggaaggtgtccagtatcttgaaaacctggccctggaggaaggttctgggtcagctgcaatgagagactggtgattaagggcaccgtgggcaggacacagtcctcgccttacccaccccatccttcctgttacccacagtctgctggcctccatgcctcttccccttgtcacttgtgtctcctccttatgcacagagctgcctgcctttatgaattttcttttcttttttttttgagacagcgtcttgctgtgtcacccaggctggagtgcagtggtgccatcttggctcactgcaacctccgcctcccaggttcaagcaattcttgtgcctcagcctcctgaggattacaggcgtgcgccaccacacccagctaatttttgtatttttagtagagacgggttttcaccatgttggccaggctggtctcaaactcctgacctcaggtgatccacccacctcggtttcccaaagtgctgggattacaggtgtgagccaccacgcccagcctgcccttgtgaattttcacctgctccttacccctcacctgttaggactgtttcttgcttttgcccctgtcggtcccctgccttaacagacctaagcagctgataatgcaccaagcttccctgaccaggtggggtgtgtctatcacccaagggcagtcctacagaccctgaccaaaggccgttcctgggcggcccaaggtccaggtttcttccacctgctcttccctgtttatggggatttgcaagcctaattgcatcagcaggagcccatctctcagagaacccggactccccaagcagactgggattttgggaagggtgtggggggtgtcattgctggatacccgtctttctgcctgtcctttctcctctctgaatcctggggcccctctccctccttaaagctggagtggacagagggacaggagaggatcagagttcatcccccctgggaaagagcaagagcgaatgaatcccagcgccagcggctgaggctgccttccgtgccttccctccatgggcgacgggtgagtggggcttaggaaactggaacagggaaggttctgttaccacactttggaactttccccctgggattcagcagttgagaagcagagacctttctgccctgggtgaatgggtccttgggggaggggttggtcttttgtctcgcatccccatctttcctttccttctgggccatgctcctccctggctggaaaaaggtggctgtgctgtccctgtgatccactctcagcaaatgcgtgtggctcaaataaacaaagaacttacctgttagagtgaaaatcctcaggagattgtacccaaatgccatgctctaaatattcatggtctctctaatgccctcaagacgtgatttccatgggaaccatcctcccctgggggcagttagcaggagtacgtggggcacgtgaggtggtcctcctttcagcacaccgtgcccatagaaacttctagaaatttctgaaaatgctctgtgggcagctcttgggtggcagtaagtccatcaacccccatctaccccgggcctgaagcgctgcgcttgctctctttatgtgtgtgcacccgaaggatttcctggtctctgtagctgatcctgtgagcccctcaagcatgaagcctcccttggggcttctcaaagcatggagaggggcccttcctgtcctttgggaaaatcttccccactgtgtcagttatatgggaacaagagtgatggggtctttctctaggcctgtgccacaggacagagaacacgggattctgctgttcgctttgagccacagcctttaccagcccggcttgtgtggggggccccttcgccttgctgcaaagagctgttccccaaagggcatatccacagggtacaggttttaaaaaggcttttttttttttttttgagacagggtctcgctctgtcgcctagactcagtgcagtggcgccatgttggctggttgcaacctccacctcctgggttcaagtgattctcccacctcagcctctctggtagctgggactacaggcacgcgccaccatgcccagctaatttttggatttttagtagagaaggagtttcaccatgctgaccaggctggtttcgaactcctgacctcaagtgatccgcccgcctgggcctcccagagtgctgagattacaggcgtgagccaccgcacctggccaaaaaaaggcattttgatttaggttgctgtgtttgcttgttgataaagaaaactcaatcgggacactagttttgtgctcagctttaggccgggtagctaatgggaggatgtccagcctgtcactgtgctcccagcgcaaggaaatgggtgcccacctggaatcaggagaagaggcttttccctcctgttctgcaaccagggtggagctatctttccagggaagccagctgagaggttttagggctttggttattttatgggggttttaaacctcctaacttttcaatgacaaatggctcccaggtgccatagtctctgttaaatcctcaaacattcacaagcacacactgccaggggcacgggttgtctttcacctgcatgtttctaaggctctttattcaatctcacggtgtcagtgtccagttgtcaaagttatgaatcttcctcctgcttctaaacagggctgacagtatactctcgtctagtctaggaacatgtctgctgctgggataccctggtaccaggatttgagggccacgggtggcatctctgagagctgaaaatccacagagtgcctgtgggaaagccaagcccttggctgtgtggcttttctatcccttggatttacaggtctgggaattggctgcttcttagttataaccccagtgacaaatgctggcttaagccacacctgttcccactgttgctagaattcaaacagttgctttttttttttctttttgagaaagggcctcactctgttgcccaggctggagtgcagtggcttgatcacagctcacgaaagcctcaaactcctaggctcaagtgatcctcctgaaaagtaggtaggactacaggcacatgccaccacatacagctaatttgttttcattttttttttttttagagacaggatctcgctgtgttccccaggtaggtcttgaactcctggcctcaagtgatcctcctgccttgacctcccaaagtgctggattacaagcgtgagcccctgcacccggcccaagcagttgcttctttttttctctttttttttttttttgagatggagcctcactctgttgcccaggctggagtgcagtggcgcgatctccactcactgcaagctccgcctcccgggttcatgccattctcctgcctcagcctcccgagtagctgggactacaggcgcctgccaccacacccagctaattttttgtatttttggtacagacagggtttcaccgtgttagccaggatggtcttgatctcctgatctcgtgatccgcccaccccggcctcccaaagtgctggattacaagcgtgagccaccgcgccccgccaagcagttgcttcttatgcaacatgttggttgggacttgtccacgggccaggccaataaaattcttaatcctgcagagagtcagtaccctcatcaccccatcactggaaaacaaatgttttaagctatcaagagagggaatgtgcagcttttggtttctagatgcatggtttggtgtgatctacctttgtgcctaaagggaatgtcccaaacaacagagccttctttgctgtcactccagaattctctacacagaatttcccaagtccattcaggacagacgcgcagtcctctttcaatggaagaagagaggacttttcccctcctgaaaaatgactggagtgtgaacaaggcagctctgtttttctaaataagttgttcttgtgagttttttctggccactgggcatctctgccctcacttttcatccctgccctctaagctgcagaccccatgaccacactgtctgcttccttgagcttcccgcacgaggcttggacctgggggacctggagaccctgcggacagaactgtggctgagccactgtggccaactcttggggagctccacagtgggggttgctggtctgtgaggctgagtctccatttcagagcacacactccctggcagggcgcctctgcctgtgtctcctgcccagcagccgccagcagggaatagttgctggtgtctgagcacaaagagagctttgattacctagagaggaaaaaggctgtcagccagatgcagccaggcccaggggtagatacaggagttgctaaggaaggggccgagccaggagaggccaggcagatccacaaagcccaaggggatgcaggctgggtgtggtttctgagggaacctaccaaatagcaggtagatggaatcagaggactcttgtgtcctgaaagaacctccttaaaaacaactaaaacgaagaacttctggggctgttcacacattgttcaagtcaccccaagatcgttctggcacgctgagctgaacaccaccatctttgttcattctctctctaatgggcaaagcaggatcatcgagttgaaaagttgtaaataatgaggatatttatcccgctatttattttttcaataactgtgacctcctgcactgtgaatgctctgtgacatgagattcttagtttaataaaactgtcattaaatttgaatgaattgatattattggttactgaacactggcatgagtttatttttattgtgaagaaaaaaatctacagcaatctaaactaaacctttctaagaaatctagcagtcagtattgtaatgcaatatatcaaaatctgtacactgtcaataaaataaatgagcacaaaaaaaaaaaaaa

SEQ ID NO: 6517 - DNA, 9659 bp, Homo Sapiens
  NM_153648
gggcccgcagatctctctggttcccctctctgccccgtctccagcttttttgcagggcacaaaacagcttctgctagcaaacgtgtcctgccagacacgtggagaaatagaaagttgatggccccagtgaatgggacacagacagccaagaactgcacagatcctgcgattcacgagttccccacagatctgttctccaataaggagcgacagcacggagccgtcctgctgcacatccttggtgctctgtatatgttctatgccttggccatagtgtgcgatgacttctttgttccgtctctagagaagatctgtgagagactccatctgagcgaagatgtggctggagccaccttcatggctgcaggaagctcaacgccagagctgtttgcgtctgttattggggtgttcatcacccatggggacgtcggggtgggcaccatcgtgggctctgctgtgttcaacatcctgtgcataattggagtgtgcggactgtttgctggccaggtggtccgtctgacgtggtgggccgtgtgccgagactccgtgtactacaccatctctgtcatcgtgctcatcgtgttcatatatgatgaacaaattgtgtggtgggaaggcctggtgctcatcatcttgtatgtgttttatattctgatcatgaagtacaatgtgaagatgcaagcctttttcacagtcaaacaaaagagcattgcaaacggtaacccggtcaacagtgagctggaggctggtaatgatttctatgacggtagctatgatgacccttccgtgccattgctggggcaagtgaaggagaagccacagtatggcaagaaccccgtggtgatggtggacgagattatgagctccagccctcccaagttcaccttccctgaagcaggcttacgaatcatgatcaccaataagtttggacccaggacccgactacggatggccagcaggatcatcattaatgagcggcagagactgatcaactcggccaatggtgtgagcagtaagccgcttcaaaacgggaggcacgagaacattgagaacgggaatgttcctgtggaaaaccccgaagaccctcagcagaatcaggagcagcagccgccgccacagccaccaccgccagagccagagccggtggaggctgacttcctgtcccccttctccgtgccggaggccagaggggacaaggtcaagtgggtgttcacctggcccctcatcttcctcctgtgcgtcaccattcccaactgcagcaagccccgctgggagaagttcttcatggtcaccttcatcaccgccacgctgtggatcgctgtgttctcctacatcatggtgtggctggtgactattatcggatacacacttgggatcccggatgtcatcatgggcattactttcctggcagcagggacaagtgttccagactgcatggccagcctaattgtggcgagacaaggccttggggacatggcagtctccaacaccataggaagcaacgtgtttgacatcctggtaggacttggtgtaccgtggggcctgcagaccatggttgttaattatggatcaacagtgaagatcaacagccgggggctggtctattccgtggtcctgttgctgggctctgtcgctctcaccgtcctcggcatccacctaaacaagtggcgactggaccggaagctgggtgtctacgtgctggttctctacgccatcttcttgtgcttctccataatgatagagtttaacgtctttaccttcgtcaacttgccgatgtgccgggaagacgattagcgctgagtcgcggcccctgggagctgatctggacaccctgtgacactggcgttctcctctcccctccttcccccaccacaggtctctcctgcataggcagccactgtccgttctttcacacactggaaggaagagccatcgtggtctttgtctggccacaggccaggctgctgggcatcctcctcctccttggagttccgcccctgcaaggctggatttgggggccattatctgagcagcttcaaagacccctgagctgccaaccacggagatgtgccaagcatctcatctctcctgcacactttagtcagaaggacttctgcatgcagtttgtctttctgttctgcaggcagcttcagaattgaggtcatttgtgagcacaagatctcatagggcaggtgcaaaataggaatgttgttctcaagtgtcacctccagcccagaggtggttccttaggcagcatgtgctcctgggagcctctgacttttgctggaagcagccacagtttggaaggggcaagacctcaacctgttggggtttagggcccatgatggcagacattctaccccttttcctggaaaaactggaagaatgaaaataatttttttctgtggaagagagaaaatgagtgaatattcttctcacttttattgatgcattcagagaataagcaatgaaatattaaaaaatgaaacatcatataggtcatcatacttgaaaattatcattccatatgaaaggatcatgatacacaccaaaaaagtaatgatcgtaaagacacaaatcctctgtatgccatcttgcattggcactgaggtgtttggtttggaatagggaaaaaggtaagagactaacgtggaaaggtgctaactcagagactggagattatagtttacagctgtactttccagatcttctatgtgacacaatgcactgtccttgtgggtttgtcatttattggttaatgctctagtttcaaaaccaccctgttgaaagttccagttatttatatgcccaacaaatttcatagcctgctgaactgaactgagtgtgtcagaagtgctggttaatgacgagaagagattgcctgaaaaacaacaaactgctttctggttagctgaaggcaagtgtgaaaatcagaatttagaatatttagagctaagcttctggaaccacgtagtttctacacgtggcaggccaagaatgggaggctgactcaaaactagatagaaaaatataaaataatcttcgaccacttgatagctctcaaatatatatttaaaagatttatgaatacaaaccatttatggtttatgatttctaaaaagaaagcacaattaattttatagagaggttttttatttttttaatatttctattgcaaaagtctatccgatttgatgcactttgaatattgagatattttgcacggatgaatgtatgggaactacccatgatgatgtaagaggaaagaacatttttttgtgattcaccagacatcactttaaacttggtgatgagtttaaatccagtagctaatcccttcctgagactcaaagatcgtgacgctggttggaatttctgactgtgccctttagggcctcctgagtttcaaaaggaggaagtgttcgtgcttgtgtccctgaagttccctgttgcatgagcctgcgacaggacctcacccccaccaccaggcttctatttgggattcacatcagtattagtatcgtagctacaccaagttcaggcttctctttttgtttttttacctagaaattgggctcagtggtcttcaacttgaggacgagggtgattttcctaagaaatcagcaaagagggaaggcagggcccctgtagattcaccagtataaacttcagctgcagggattccagagccctcgggaccactctgtcaccttaatagccaagttctcctggttcctccgatcttacaggctcatccaggttccaaagtgcttctgtctctgttttgattctccaaactgctctgtgatgtatgtagggattattctccccacttaacagaaagtagtgtcttggagaggtcaagggtctctagttcaatggccagtcatagcagaagggaggccaagcaccagtccatcacccctcccaggccagcctctgtaagttggccacacttggggagtgagtgtgggtatgactttaccctcctggttggttcttactgtttgagtcaaaacctcatcaatatatcattgactcctgggttcctcaggtcatttcctaatatctgtccctatccaatgcctctattttatcttgaaaaaaggaccaaaaattatttttagctatggcaaggcacaggccacatggcccctgatggcgtccctgctggttttcaattctctgaagccttgtgtagctttcagagcacacgtatcctaattaccctcctcttcctcagcagaacccatttgagattctaaatgaatactcttagtctctaaagttgcagttagaaactaaaataatgttttttaatatgtaatatgctcctcttggctaattttcttttgactttaatgtgccaatgtaacttcctttaaaggatctatgcatttattaaatctggaaaactatatgtacactgtaggtggaaaattctcttttttaactaaatatttttccatcacaaatttaaagaattgcatgattaattaggctttcatttttaaattacgctttcatcactacgcaggattactttattttattcccaaagctcattagcatgggataattactctgctacagaaataggcaatttaaaaaaatgaatttagctcttctcattgggggcagaaaagaaaaaaaaaaccattgcactcagatggaaaatgcctatagacacaggagcaggtggttcctgtggacttctggtttggaattttgcctcaccaggtcaagcgtggttagggtggaaggtgtccagtatcttgaaaacctggccctggaggaaggttctgggtcagctgcaatgagagactggtgattaagggcaccgtgggcaggacacagtcctcgccttacccaccccatccttcctgttacccacagtctgctggcctccatgcctcttccccttgtcacttgtgtctcctccttatgcacagagctgcctgcctttatgaattttcttttcttttttttttgagacagcgtcttgctgtgtcacccaggctggagtgcagtggtgccatcttggctcactgcaacctccgcctcccaggttcaagcaattcttgtgcctcagcctcctgaggattacaggcgtgcgccaccacacccagctaatttttgtatttttagtagagacgggttttcaccatgttggccaggctggtctcaaactcctgacctcaggtgatccacccacctcggtttcccaaagtgctgggattacaggtgtgagccaccacgcccagcctgcccttgtgaattttcacctgctccttacccctcacctgttaggactgtttcttgcttttgcccctgtcggtcccctgccttaacagacctaagcagctgataatgcaccaagcttccctgaccaggtggggtgtgtctatcacccaagggcagtcctacagaccctgaccaaaggccgttcctgggcggcccaaggtccaggtttcttccacctgctcttccctgtttatggggatttgcaagcctaattgcatcagcaggagcccatctctcagagaacccggactccccaagcagactgggattttgggaagggtgtggggggtgtcattgctggatacccgtctttctgcctgtcctttctcctctctgaatcctggggcccctctccctccttaaagctggagtggacagagggacaggagaggatcagagttcatcccccctgggaaagagcaagagcgaatgaatcccagcgccagcggctgaggctgccttccgtgccttccctccatgggcgacgggtgagtggggcttaggaaactggaacagggaaggttctgttaccacactttggaactttccccctgggattcagcagttgagaagcagagacctttctgccctgggtgaatgggtccttgggggaggggttggtcttttgtctcgcatccccatctttcctttccttctgggccatgctcctccctggctggaaaaaggtggctgtgctgtccctgtgatccactctcagcaaatgcgtgtggctcaaataaacaaagaacttacctgttagagtgaaaatcctcaggagattgtacccaaatgccatgctctaaatattcatggtctctctaatgccctcaagacgtgatttccatgggaaccatcctcccctgggggcagttagcaggagtacgtggggcacgtgaggtggtcctcctttcagcacaccgtgcccatagaaacttctagaaatttctgaaaatgctctgtgggcagctcttgggtggcagtaagtccatcaacccccatctaccccgggcctgaagcgctgcgcttgctctctttatgtgtgtgcacccgaaggatttcctggtctctgtagctgatcctgtgagcccctcaagcatgaagcctcccttggggcttctcaaagcatggagaggggcccttcctgtcctttgggaaaatcttccccactgtgtcagttatatgggaacaagagtgatggggtctttctctaggcctgtgccacaggacagagaacacgggattctgctgttcgctttgagccacagcctttaccagcccggcttgtgtggggggccccttcgccttgctgcaaagagctgttccccaaagggcatatccacagggtacaggttttaaaaaggcttttttttttttttttgagacagggtctcgctctgtcgcctagactcagtgcagtggcgccatgttggctggttgcaacctccacctcctgggttcaagtgattctcccacctcagcctctctggtagctgggactacaggcacgcgccaccatgcccagctaatttttggatttttagtagagaaggagtttcaccatgctgaccaggctggtttcgaactcctgacctcaagtgatccgcccgcctgggcctcccagagtgctgagattacaggcgtgagccaccgcacctggccaaaaaaaggcattttgatttaggttgctgtgtttgcttgttgataaagaaaactcaatcgggacactagttttgtgctcagctttaggccgggtagctaatgggaggatgtccagcctgtcactgtgctcccagcgcaaggaaatgggtgcccacctggaatcaggagaagaggcttttccctcctgttctgcaaccagggtggagctatctttccagggaagccagctgagaggttttagggctttggttattttatgggggttttaaacctcctaacttttcaatgacaaatggctcccaggtgccatagtctctgttaaatcctcaaacattcacaagcacacactgccaggggcacgggttgtctttcacctgcatgtttctaaggctctttattcaatctcacggtgtcagtgtccagttgtcaaagttatgaatcttcctcctgcttctaaacagggctgacagtatactctcgtctagtctaggaacatgtctgctgctgggataccctggtaccaggatttgagggccacgggtggcatctctgagagctgaaaatccacagagtgcctgtgggaaagccaagcccttggctgtgtggcttttctatcccttggatttacaggtctgggaattggctgcttcttagttataaccccagtgacaaatgctggcttaagccacacctgttcccactgttgctagaattcaaacagttgctttttttttttctttttgagaaagggcctcactctgttgcccaggctggagtgcagtggcttgatcacagctcacgaaagcctcaaactcctaggctcaagtgatcctcctgaaaagtaggtaggactacaggcacatgccaccacatacagctaatttgttttcattttttttttttttagagacaggatctcgctgtgttccccaggtaggtcttgaactcctggcctcaagtgatcctcctgccttgacctcccaaagtgctggattacaagcgtgagcccctgcacccggcccaagcagttgcttctttttttctctttttttttttttttgagatggagcctcactctgttgcccaggctggagtgcagtggcgcgatctccactcactgcaagctccgcctcccgggttcatgccattctcctgcctcagcctcccgagtagctgggactacaggcgcctgccaccacacccagctaattttttgtatttttggtacagacagggtttcaccgtgttagccaggatggtcttgatctcctgatctcgtgatccgcccaccccggcctcccaaagtgctggattacaagcgtgagccaccgcgccccgccaagcagttgcttcttatgcaacatgttggttgggacttgtccacgggccaggccaataaaattcttaatcctgcagagagtcagtaccctcatcaccccatcactggaaaacaaatgttttaagctatcaagagagggaatgtgcagcttttggtttctagatgcatggtttggtgtgatctacctttgtgcctaaagggaatgtcccaaacaacagagccttctttgctgtcactccagaattctctacacagaatttcccaagtccattcaggacagacgcgcagtcctctttcaatggaagaagagaggacttttcccctcctgaaaaatgactggagtgtgaacaaggcagctctgtttttctaaataagttgttcttgtgagttttttctggccactgggcatctctgccctcacttttcatccctgccctctaagctgcagaccccatgaccacactgtctgcttccttgagcttcccgcacgaggcttggacctgggggacctggagaccctgcggacagaactgtggctgagccactgtggccaactcttggggagctccacagtgggggttgctggtctgtgaggctgagtctccatttcagagcacacactccctggcagggcgcctctgcctgtgtctcctgcccagcagccgccagcagggaatagttgctggtgtctgagcacaaagagagctttgattacctagagaggaaaaaggctgtcagccagatgcagccaggcccaggggtagatacaggagttgctaaggaaggggccgagccaggagaggccaggcagatccacaaagcccaaggggatgcaggctgggtgtggtttctgagggaacctaccaaatagcaggtagatggaatcagaggactcttgtgtcctgaaagaacctccttaaaaacaactaaaacgaagaacttctggggctgttcacacattgttcaagtcaccccaagatcgttctggcacgctgagctgaacaccaccatctttgttcattctctctctaatgggcaaagcaggatcatcgagttgaaaagttgtaaataatgaggatatttatcccgctatttattttttcaataactgtgacctcctgcactgtgaatgctctgtgacatgagattcttagtttaataaaactgtcattaaatttgaatgaattgatattattggttactgaacactggcatgagtttatttttattgtgaagaaaaaaatctacagcaatctaaactaaacctttctaagaaatctagcagtcagtattgtaatgcaatatatcaaaatctgtacactgtcaataaaataaatgagcacaaaaaaaaaaaaaa

SEQ ID NO: 6518 - DNA, 804 bp, Homo Sapiens
  NM_153682
cacgcccgcccccgcgctcgctggctcccacccggggagggtcgttgtgcgcctgcgccagggtgggggttgccgtcgcgcctaggcctttccctcaggttttcctcttccccactgcggctccccagtcggcgcttgcgcggagaactcagcgctgagattgtctaaagccccaggaaaaatggtggaaaattcaccgtcgccattgccagaaagagcgatttatggctttgttcttttcttaagctcccaatttggcttcatactttacctcgtgtgggcctttattcctgaatcttggctaaactctttaggtttaacctattggcctcaaaaatattgggcagttgcattacctgtctacctccttattgctatagtaattggctacgtgctcttgtttgggattaacatgatgagtacctctccactcgactccatccatacaatcacagataactatgcaaaaaatcaacagcagaagaaataccaagaggaggccattccagccttaagagatatttctattagtgaagtaaaccaaatgttctttcttgcagccaaagaactttacaccaaaaactgaactgtgtgtaaccatagtaacaccaagcacgtatttatttataagtttttgccattataattttgaccataaattaatttgaccatctctcttattaatagagaagtaaaaaatgtaagttgaccttctcttagattatgttcaatgaatattgtaaatgttcaagtattgttaatgaatagaataaatacaatattgcattcccatatagcagactt

SEQ ID NO: 6519 - DNA, 5049 bp, Homo Sapiens
  NM_153683
cgcgcagcatgcccgccagcgccccgccgcgccgcccgcggccgccgccgccgtcgctgtcgctgctgctggtgctgctgggcctgggcggccgccgcctgcgtgcggagccgggcgacggcgcgcagacctgggcccgtttctcgcggcctcctgcccccgaggccgcgggcctcttccagggcaccttccccgacggcttcctctgggccgtgggcagcgccgcctaccagaccgagggcggctggcagcagcacggcaagggtgcgtccatctgggacacgttcacccaccaccccctggcacccccgggagactcccggaacgccagtctgccgttgggcgccccgtcgccgctgcagcccgccaccggggacgtagccagcgacagctacaacaacgtcttccgcgacacggaggcgctgcgcgagctcggggtcactcactaccgcttctccatctcgtgggcgcgagtgctccccaatggcagcgcgggcgtccccaaccgcgaggggctgcgctactaccggcgcctgctggagcggctgcgggagctgggcgtgcagcccgtggtcaccctgtaccactgggacctgccccagcgcctgcaggacgcctacggcggctgggccaaccgcgccctggccgaccacttcagggattacgcggagctctgcttccgccacttcggcggtcaggtcaagtactggatcaccatcgacaacccctacgtggtggcctggcacggctacgccaccgggcgcctggcccccggcatccggggcagcccgcggctcgggtacctggtggcgcacaacctcctcctggctcatgccaaagtctggcatctctacaatacttctttccgtcccactcagggaggtcaggtgtccattgccctaagctctcactggatcaatcctcgaagaatgaccgaccacagcatcaaagaatgtcaaaaatctctggactttgtactaggttggtttgccaaacccgtatttattgatggtgactatcccgagagcatgaagaataacctttcatctattctgcctgattttactgaatctgagaaaaagttcatcaaaggaactgctgacttttttgctctttgctttggacccaccttgagttttcaacttttggaccctcacatgaagttccgccaattggaatctcccaacctgaggcaactgctttcctggattgaccttgaatttaaccatcctcaaatatttattgtggaaaatggctggtttgtctcagggaccaccaagagagatgatgccaaatatatgtattacctcaaaaagttcatcatggaaaccttaaaagccatcaagctggatggggtggatgtcatcgggtataccgcatggtccctcatggatggtttcgagtggcacagaggttacagcatcaggcgtggactcttctatgttgactttctaagccaggacaagatgttgttgccaaagtcttcagccttgttctaccaaaagctgatagagaaaaatggcttccctcctttacctgaaaatcagcccctagaagggacatttccctgtgactttgcttggggagttgttgacaactacattcaagtaagtcagctgacaaaaccaatcagcagtctcaccaagccctatcactaataccactctgtctcagtttaccgacctgaatgtttacctgtgggatgtccaccacagtaaaaggcttattaaagtggatggggttgtgaccaagaagaggaaatcctactgtgttgactttgctgccatccagccccagatcgctttactccaggaaatgcacgttacacattttcgcttctccctggactgggccctgattctccctctgggtaaccagtcccaggtgaaccacaccatcctgcagtactatcgctgcatggccagcgagcttgtccgtgtcaacatcaccccagtggtggccctgtggcagcctatggccccgaaccaaggactgccgcgcctcctggccaggcagggcgcctgggagaacccctacactgccctggcctttgcagagtatgcccgactgtgctttcaagagctcggccatcacgtcaagctttggataacgatgaatgagccgtatacaaggaatatgacatacagtgctggccacaaccttctgaaggcccatgccctggcttggcatgtgtacaatgaaaagtttaggcatgctcagaatgggaaaatatccatagccttgcaggctgattggatagaacctgcctgccctttctcccaaaaggacaaagaggtggccgagagagttttggaatttgacattggctggctggctgagcccattttcggctctggagattatccatgggtgatgagggactggctgaaccaaagaaacaattttcttcttccttatttcactgaagatgaaaaaaagctaatccagggtacctttgactttttggctttaagccattataccaccatccttgtagactcagaaaaagaagatccaataaaatacaatgattacctagaagtgcaagaaatgaccgacatcacgtggctcaactcccccagtcaggtggcggtagtgccctgggggttgcgcaaagtgctgaactggctgaagttcaagtacggagacctccccatgtacataatatccaacggaatcgatgacgggctgcatgctgaggacgaccagctgagggtgtattatatgcagaattacataaacgaagctctcaaagcccacatactggatggtatcaatctttgcggatactttgcttattcgtttaacgaccgcacagctccgaggtttggcctctatcgttatgctgcagatcagtttgagcccaaggcatccatgaaacattacaggaaaattattgacagcaatggtttcccgggcccagaaactctggaaagattttgtccagaagaattcaccgtgtgtactgagtgcagtttttttcacacccgaaagtctttactggctttcatagcttttctattttttgcttctattatttctctctcccttatattttactactcgaagaaaggcagaagaagttacaaatagttctgaacatttttctattcattcattttgaaataattatgcagacacatcagctgttaaccatttgcacctctaagtgttgtgaaactgtaaatttcatacatttgacttctagaaaacatttttgtggcttatgacagaggttttgaaatgggcataggtgatcgtaaaatattgaataatgcgaatagtgcctgaatttgttctctttttgggtgattaaaaaactgacaggcactataatttctgtaacacactaacaaaagcatgaaaaataggaaccacaccaatgcaacatttgtgcagaaatttgaatgacaagattaggaatattttcttctgcacccacttctaaatttaatgtttttctggaagtagtaattgcaagagttcgaatagaaagttatgtaccaagtaaccatttctcagctgccataataatgcctagtggcttcccctctgtcaaatctagtttcctatggaaaagaagatggcagatacaggagagacgacagagggtcctaggctggaatgttcctttcgaaagcaatgcttctatcaaatactagtattaatttatgtatctggttaatgacatacttggagagcaaattatggaaatgtgtattttatatgatttttgaggtcctgtctaaaccctgtgtccctgagggatctgtctcactggcatcttgttgagggccttgcacataggaaacttttgataagtatctgcggaaaaacaaacatgaatcctgtgatattgggctcttcaggaagcataaagcaattgtgaaatacagtataccgcagtggctctaggtggaggaaaggaggaaaaagtgcttattatgtgcaacattatgattaatctgattatacaccatttttgagcagatcttggaatgaatgacatgacctttccctagagaataaggatgaaataatcactcattctatgaacagtgacactactttctattctttagctgtactgtaatttctttgagttgatagttttacaaattcttaataggttcaaaagcaatctggtctgaataacactggatttgtttctgtgatctctgaggtctattttatgtttttgctgctacttctgtggaagtagctttgaactagttttactttgaactttcacgctgaaacatgctagtgatatctagaaagggctaattaggtctcatcctttaatgccccttaaataagtcttgctgattttcagacagggaagtctctctattacactggagctgttttatagataagtcaatattgtatcaggcaagataaaccaatgtcataacaggcattgccaacctcactgacacagggtcatagtgtataataatatactgtactatataatatatcatctttagaggtatgattttttcatgaaagataagcttttggtaatattcattttaaagtggacttattaaaattggatgctagagaatcaagtttattttatgtatatatttttctgattataagagtaatatatgttcattgtaaaaatttttaaaacacagaaactatatgcaaagaaaaaataaaaattatctataatctcagaacccagaaatagccactattaacatttcctacgtattttattttacatagatcatattgtatatagttagtatctttattaatttttattatgaaactttcctttgtcattattagtcttcaaaagcatgatttttaatagttgttgagtattccaccacaggaatgtatcacaacttaaccgttcccgtttgttagactagtttcttattaatgttgatgaatgttgtttaaaaataattttgttgctacatttactttaatttccttgactgtaaagagaagtaattttgctccttgataaagtattatattaataataaatctgcctgcaactttttgccttctttcataatc

SEQ ID NO: 6520 - DNA, 3182 bp, Homo Sapiens
  NM_153690
ggcaggcgagccggacgccgctcgcagcaccggagagggcgcactgcaaaggcgggcagcagaccgtggagagcccgggagcggagctggacaccgcctcggagggaagaaatgaggtagcggcggttcccggacccggccatgcccgtcccctgttctcggagcccagcgccgtctcggccaggccagcccggacactgagcgggccgagcgcgagtccccggcgtccggcggagcgaagatgcagtgagtccccgcgggactgctgcgcggggcccgccgcggccagccggacccagcatccgaccgcactttgggcgagctgctgacttgagaccagcccaaacggggggctttccatctccagcacccctcggaggtggggagcaccggcccctaggcacactcgctgtagagtttccgcgggttttggccccagtcctgagggttgtgtgtgttaggggacccacctcacgttcgccgaggagttcctgcatattcttgcaccatcccgggtgctgttgctggggctctctttatttgcacgcgcgcttctagcttttttcctgacattttccactctacgctcgttctttctcccttgcattttgttgcttgcctgagactctttgctctcgcccttgcccaggctggggtaattctgtgtgcgcgcgtgtctcccccgcaccaaccttttttgcacactcgaagctgaatattttcttttttagagaatttacccgcacctcctgcggggttcctaagcactctctctgctcccctccccccaactccctaccacagggccgctcccagtagttttattcttcgatcttgcccgggccgagcctggcaggggccggtggctcagcgggcctcgcacccggcgctccgccgccgccgccgcccagctgcgccggggcgccctccggagatgctgccgtggaagaagcacaagttcgagctgctggccgaggcgccgccgcggcaggcgtccaagcccaagggctacgctgtgagcctgcactactcggcgctcagctcgctggcgcgggcgtgccccgaaggcgcgcttagccgggtgggcagcatgttccgctccaagcgcaagaagctgcacatcactagcgaggacccaacttacaccgtgctctacctgggcaatgccaccaccatccaggcgcgcggcgacggctgcaccgaccttgctgtgggcaagatctggagcaagagcgaggcgggccgtcagggcaccaagatgaagctgacggtgagtgcgcagggtatccgcatggtgcacgccgaggagcgcgcgctgcgccgcccgggccacctctacctgctgcaccgcgtcacctactgcgtggccgacgcgcggctgcccaaggtcttcgcctgggtgtaccggcacgagctgaagcacaaggccgtgatgctgcgctgccacgccgtgctggtgtccaagcccgaaaaggcgcaggccatggccctgctgctctaccagacgtcggccaacgcgctggcggaatttaaacgcctcaagcggcgggacgacgcgcgtcaccagcagcaggagctggtgggcgcacacaccatcccgctagtgccgctgcgcaagctgctcctacacggaccctgctgctataaaccgccggtggagcgcagccgcagcgcgcccaagcttggctccatcaccgaggacctgctcggcgaacagctggagcaggagctgcaggaggaagaggaagaggagcaacccgagggctgcccggaggaggaggagaaccgtgcggcagagggagatccagcagaggaggaggccgaggcgcagcgtgcgctagtggtcgccatgcactttgagtgcggggacttgttggatactctggagaatggccgtggggaggcgctaggaggcggcgggggctccctgggcccgggggccgggccgccgcctctgctgctgggcagcgcctccgacatgaaggctgagctgtcgcaacttattagcgacctgggcgagctcagcttcggcaacgacgtgcgcaccctgcaggccgacttgcgggtgacgcgcctgctgtcaggcgacagcacgggcagcgagagctccatcgagggcgggggccctgacgccacctccgccaccgccggggactcgtcccgccaggccgacggcgccagtgcagacgagccccactcgggctgagctcctccgcgcgtcgccggcgctccaccgtggctacccatccgtggtcccgacaacctccctgtcccttgcccgcccccaggaagggggaaatggggcatttggggcccagacctacacttggagcccaggtccagcgttcccccgaccgctttcccctacctcccggcccccgctcccgccccagcacttttggctctgttgcgcgtggggatgcggggagatttgagaggggaaaaccccgccaggagggagagagaggcacccctctgggatgcgggtgagggaaggttggctgaagttcctagtctcaggccgtaggtgcctggccagtttcctgtttgtggggcagctggggcctgaggaggaggggttcacttcctcctcccaccccctgggagcggccctgcgctgtcactgacatctcattaaaaaaaaaaaaaaatttgctctcaaggtgtttgaggctttaatgcaaccctttagcccttggttctttttggtgcaagaattctggctgtttacctcagactcagacccctgaaatgttgccaaattcttcaaataactgtttggggggtggggggagatgaaagagagtcgcgttttgtttacagttaaagacatccaatatcttaaaaaggagttttcctttagaaacacacacacccttcctcttgctcaaaagatctcactccatgatactgtgtaaaatatttttgcactgttgtgaagtatttttgacttttttctgtacataactgtgttctcagagctgaatgtttatatcttttgctgtgcaaaagaaacatgtaaaatgttgttcagttgtatatacagaaatgtgtataaaacattttgttattttttaaaagtagcactgttctggttctgtttgcacgccagtggggagagaataaagaggaaaatttaacagaaaaaaaaaaaaaaaaaaaaaaaaaaaaaaaaaaaaaaa

SEQ ID NO: 6521 - DNA, 1242 bp, Homo Sapiens
  NM_153698
gacagagcggacccaggccctcggccgccccgcgtcatggccgcgccggccccggtcacgcggcaggttagcggcgccgccgccctggtcccggccccgagcggccccgacagcgggcagcccctggcggccgccgtggccgagctgccggtgctggacgcccgcgggcagcgggtaccgttcggcgcgctgttccgggagcgccgcgccgtggtggtgttcgtgcggcatttcctgtgttacatctgcaaggaatacgtagaggatctggccaaaatccccaggagtttcttacaagaagcaaatgtcacccttatagtgattggacagtcatcctaccatcatattgagcctttttgcaagctgactggatattctcatgaaatctatgtcgatcctgagagagaaatttataaaagattgggaatgaaaagaggtgaagaaattgcttcctcaggacagagcccccacataaaatcaaatctactctcaggaagccttcagagcctgtggcgggcagtgactggccctctctttgattttcaaggagacccagctcagcaaggtggaaccctcattttaggtccaggtaacaacatccattttatacaccgcgataggaataggttggatcacaaacctatcaactctgttttacagcttgtaggagttcagcatgtgaactttacaaacagaccttcagttatccatgtgtgacttaaaatgcactcagtcactttcaactggaccttctggaatgtgaccttcaatgcctgggtgtaatatcctcgtgcagtgtctaacctgctgtcccttcccagcctttgaggagttagggaagcataaagggggcttgaacctgttgaattgcatgctgggaagcatcagttgtcaaaatatgttatatacttccattttataacttttaacattttatacaaaaaaaatgaatatacaaaatataactttaaaagctataaaatcataaatactctaaattattttacattatggtatattcagtcaatgaaagagttttttggcaatataaattctgacagtatataaggggacaggagaacaacacaagaccattatattcagtgaagaaggcaaaatatcaaatctgtcaacaatgtaactgcatttttatatgtatatatttgtatttttgtatgctttggaaaaagacaggaaataaacaccaaaatgttgccagtaggtaaaaaaaaaaaaaaaaaa

SEQ ID NO: 6522 - DNA, 5515 bp, Homo Sapiens
  NM_153700
gccctgccctcacctggctatcccacacaggtgagaataaccagaactcacctccggtaccagtgttcacttggaaacatggctctcagcctctggcccctgctgctgctgctgctgctgctgctgctgctgtcctttgcagtgactctggcccctactgggcctcattccctggaccctggtctctccttcctgaagtcattgctctccactctggaccaggctccccagggctccctgagccgctcacggttctttacattcctggccaacatttcttcttcctttgagcctgggagaatgggggaaggaccagtaggagagcccccacctctccagccgcctgctctgcggctccatgattttctagtgacactgagaggtagccccgactgggagccaatgctagggctgctaggggatatgctggcactgctgggacaggagcagactccccgagatttcctggtgcaccaggcaggggtgctgggtggacttgtggaggtgctgctgggagccttagttcctgggggcccccctaccccaactcggcccccatgcacccgtgatgggccgtctgactgtgtcctggctgctgactggttgccttctctgctgctgttgttagagggcacacgctggcaagctctggtgcaggtgcagcccagtgtggaccccaccaatgccacaggcctcgatgggagggaggcagctcctcactttttgcagggtctgttgggtttgcttaccccaacaggggagctaggctccaaggaggctctttggggcggtctgctacgcacagtgggggcccccctctatgctgcctttcaggaggggctgctccgtgtcactcactccctgcaggatgaggtcttctccattttggggcagccagagcctgataccaatgggcagtgccagggaggtaaccttcaacagctgctcttatggggcgtccggcacaacctttcctgggatgtccaggcgctgggctttctgtctggatcaccacccccaccccctgccctccttcactgcctgagcacgggcgtgcctctgcccagagcttctcagccgtcagcccacatcagcccacgccaacggcgagccatcactgtggaggccctctgtgagaaccacttaggcccagcaccaccctacagcatttccaacttctccatccacttgctctgccagcacaccaagcctgccactccacagccccatcccagcaccactgccatctgccagacagctgtgtggtatgcagtgtcctgggcaccaggtgcccaaggctggctacaggcctgccacgaccagtttcctgatgagtttttggatgcgatctgcagtaacctctccttttcagccctgtctggctccaaccgccgcctggtgaagcggctctgtgctggcctgctcccaccccctaccagctgccctgaaggcctgccccctgttcccctcaccccagacatcttttggggctgcttcttggagaatgagactctgtgggctgagcgactgtgtggggaggcaagtctacaggctgtgccccccagcaaccaggcttgggtccagcatgtgtgccagggccccaccccagatgtcactgcctccccaccatgccacattggaccctgtggggaacgctgcccggatgggggcagcttcctggtgatggtctgtgccaatgacaccatgtatgaggtcctggtgcccttctggccttggctagcaggccaatgcaggataagtcgtgggggcaatgacacttgcttcctagaagggctgctgggcccccttctgccctctctgccaccactgggaccatccccactctgtctgacccctggccccttcctccttggcatgctatcccagttgccacgctgtcagtcctctgtcccagctcttgctcaccccacacgcctacactatctcctccgcctgctgaccttcctcttgggtccaggggctgggggcgctgaggcccaggggatgctgggtcgggccctactgctctccagtctcccagacaactgctccttctgggatgcctttcgcccagagggccggcgcagtgtgctacggacgattggggaatacctggaacaagatgaggagcagccaaccccatcaggctttgaacccactgtcaaccccagctctggtataagcaagatggagctgctggcctgctttagtcctgtgctgtgggatctgctccagagggaaaagagtgtttgggccctgcagattctagtgcaggcgtacctgcatatgcccccagaaaacctccagcagctggtgctttcagcagagagggaggctgcacagggcttcctgacactcatgctgcaggggaagctgcaggggaagctgcaggtaccaccatccgaggagcaggccctgggtcgcctgacagccctgctgctccagcggtacccacgcctcacctcccagctcttcattgacctgtcaccactcatccctttcttggctgtctctgacctgatgcgcttcccaccatccctgttagccaacgacagtgtcctggctgccatccgggattacagcccaggaatgaggcctgaacagaaggaggctctggcaaagcgactgctggcccctgaactgtttggggaagtgcctgcctggccccaggagctgctgtgggcagtgctgcccctgctcccccacctccctctggagaactttttgcagctcagccctcaccagatccaggccctggaggatagctggccagcagcaggtctggggccagggcatgcccgccatgtgctgcgcagcctggtaaaccagagtgtccaggatggtgaggagcaggtacgcaggcttgggcccctcgcctgtttcctgagccctgaggagctgcagagcctagtgcccctgagtgatccaacggggccagtagaacgggggctgctggaatgtgcagccaatgggaccctcagcccagaaggacgggtggcatatgaacttctgggtgtgttgcgctcatctggaggagcggtgctgagcccccgggagctgcgggtctgggcccctctcttctctcagctgggcctccgcttccttcaggagctgtcagagccccagcttagagccatgcttcctgtcctgcagggaactagtgttacacctgctcaggctgtcctgctgcttggacggctccttcctaggcacgatctatccctggaggaactctgctccttgcaccttctgctaccaggcctcagcccccagacactccaggccatccctaggcgagtcctggtcggggcttgttcctgcctggcccctgaactgtcacgcctctcagcctgccagaccgcagcactgctgcagacctttcgggttaaagatggtgttaaaaatatgggtacaacaggtgctggtccagctgtgtgtatccctggtcagcctattcccaccacctggccagactgcctgcttcccctgctcccattaaagctgctacaactggattccttggctcttctggcaaatcgaagacgctactgggagctgccctggtctgagcagcaggcacagtttctctggaagaagatgcaagtacccaccaaccttaccctcaggaatctgcaggctctgggcaccctggcaggaggcatgtcctgtgagtttctgcagcagatcaactccatggtagacttccttgaagtggtgcacatgatctatcagctgcccactagagttcgagggagcctgagggcctgtatctgggcagagctacagcggaggatggcaatgccagaaccagaatggacaactgtagggccagaactgaacgggctggatagcaagctactcctggacttaccgatccagttgatggacagactatccaatgaatccattatgttggtggtggagctggtgcaaagagctccagagcagctgctggcactgacccccctccaccaggcagccctggcagagagggcactacaaaacctggctccaaaggagactccagtctcaggggaagtgctggagaccttaggccctttggttggattcctggggacagagagcacacgacagatccccctacagatcctgctgtcccatctcagtcagctgcaaggcttctgcctaggagagacatttgccacagagctgggatggctgctattgcaggagtctgttcttgggaaaccagagttgtggagccaggatgaagtagagcaagctggacgcctagtattcactctgtctactgaggcaatttccttgatccccagggaggccttgggtccagagaccctggagcggcttctagaaaagcagcagagctgggagcagagcagagttggacagctgtgtagggagccacagcttgctgccaagaaagcagccctggtagcaggggtggtgcgaccagctgctgaggatcttccagaacctgtgccaaattgtgcagatgtacgagggacattcccagcagcctggtctgcaacccagattgcagagatggagctctcagactttgaggactgcctgacattatttgcaggagacccaggacttgggcctgaggaactgcgggcagccatgggcaaagcaaaacagttgtggggtcccccccggggatttcgtcctgagcagatcctgcagcttggtaggctcttaataggtctaggagatcgggaactacaggagctgatcctagtggactggggagtgctgagcaccctggggcagatagatggctggagcaccactcagctccgcattgtggtctccagtttcctacggcagagtggtcggcatgtgagccacctggacttcgttcatctgacagcgctgggttatactctctgtggactgcggccagaggagctccagcacatcagcagttgggagttcagccaagcagctctcttcctcggcaccctgcatctccagtgctctgaggaacaactggaggttctggcccacctacttgtactgcctggtgggtttggcccaatcagtaactgggggcctgagatcttcactgaaattggcaccatagcagctgggatcccagacctggctctttcagcactgctgcggggacagatccagggcgttactcctcttgccatttctgtcatccctcctcctaaatttgctgtggtgtttagtcccatccaactatctagtctcaccagtgctcaggctgtggctgtcactcctgagcaaatggcctttctgagtcctgagcagcgacgagcagttgcatgggcccaacatgagggaaaggagagcccagaacagcaaggtcgaagtacagcctggggcctccaggactggtcacgaccttcctggtccctggtattgactatcagcttccttggccacctgctatgagcctgtctctacagtagaaggagattgtggggagagaaatcttaagtcataatgaataaagtgcaaacagaagtgcatcctgattattttcagaagctgatgaggaata

SEQ ID NO: 6523 - DNA, 1881 bp, Homo Sapiens
  NM_153701
ggtggctgaacctcgcaggtggcagagaggctcccctggggctgtggggctctacgtggatccgatggagccgctggtgacctgggtggtccccctcctcttcctcttcctgctgtccaggcagggcgctgcctgcagaaccagtgagtgctgttttcaggacccgccatatccggatgcagactcaggctcggcctcgggccctagggacctgagatgctatcggatatccagtgatcgttacgagtgctcctggcagtatgagggtcccacagctggggtcagccacttcctgcggtgttgccttagctccgggcgctgctgctacttcgccgccggctcagccaccaggctgcagttctccgaccaggctggggtgtctgtgctgtacactgtcacactctgggtggaatcctgggccaggaaccagacagagaagtctcctgaggtgaccctgcagctctacaactcagttaaatatgagcctcctctgggagacatcaaggtgtccaagttggccgggcagctgcgtatggagtgggagaccccggataaccaggttggtgctgaggtgcagttccggcaccggacacccagcagcccatggaagttgggcgactgcggacctcaggatgatgatactgagtcctgcctctgccccctggagatgaatgtggcccaggaattccagctccgacgacggcagctggggagccaaggaagttcctggagcaagtggagcagccccgtgtgcgttccccctgaaaaccccccacagcctcaggtgagattctcggtggagcagctgggccaggatgggaggaggcggctgaccctgaaagagcagccaacccagctggagcttccagaaggctgtcaagggctggcgcctggcacggaggtcacttaccgactacagctccacatgctgtcctgcccgtgtaaggccaaggccaccaggaccctgcacctggggaagatgccctatctctcgggtgctgcctacaacgtggctgtcatctcctcgaaccaatttggtcctggcctgaaccagacgtggcacattcctgccgacacccacacagatggcatgatctcagctcactgcaacctccgccttccagattcaagagattctcctgcttcagcctcccgagtagctgggattacaggcatctgccaccatacccggctaattttgtatttttagtagagacggggtttcaccacgttggccaggctggtctcgaactcctgacctcaagtgatccacctgccttggcctcccaaagtgttgggattataggcgtgagccaccatgcccagcctaatttttgtatttttagtagagatggagtttcaccatgttgcccaggctggtctcaaactcctgccctcaggtgatccacccacctcagcctctcaaagtgctgggattacaggtgtgagccactgtggccgacctactatttttattatttttgagctaggttctcagtctgttggcagactggagtgcaatcatggctcactgcagccttgaactcccagactcaagtgatccttccacctcagcctctggagtagctgggactacagacatgcaccaccacacctggttaattttttatttttattttttgtagagacaggtgtctctctacgttgcccaggctggtctcgaactcctgggctcaagtgatccacccatctccacctcccaaagtgctaggattacaggcgtgagccaccgtacccagcctggtcccatatcatagtgaaatggtgcctgtaaagctctcagcattggcttggcacatgcagttggtactcaataaacggctgttgctatccccaaaaaaaaaaaaaaaaaaaaaaaaa

SEQ ID NO: 6524 - DNA, 4425 bp, Homo Sapiens
  NM_153702
ctcgctccctgacttccgggtcgcggtgcttgaagggagtgttccgtcgtttccgttgccggctgtttgcagtggggaaaccgaggcagctcctgctccccctagttcttccgctcctgtgaggaaaaaaaaatgtttatttctttgtgggagttcttctatgggcacttttttcgattttggatgaaatggctattacgacagatgactgggaagtgtgaattgcagcgaatatttgatacctatgtaggtgcacaaaggacacacaggatagaaaattccttgacatactccaagaataaggttttacagaaggcgacacatgttgttcagagtgaagtggacaaatatgtagatgatattatgaaggaaaagaatattaaccctgagaaggatgccagttttaaaatatgcatgaagatgtgcttactgcagataactggttataaacagctgtatttggatgtagaaagtgtgaggaaaaggccatatgattctgataacctacagcatgaagagctactcatgaagctttggaatcttctaatgcccacgaagaagttaaacgctagaatctccaagcagtgggctgaaattggttttcagggtgatgatcccaagacagacttcagaggcatgggcatacttgggttaatcaatcttgtgtatttcagtgaaaattacactagtgaagctcatcagattctttcccgttcaaatcatccaaaattagggtattcttatgcaatagttggaatcaatcttacagagatggcttatagcttactgaagagtgaagctttgaagtttcatctctataaccttgttcctggtataccaacaatggaacactttcatcagttttactgttatcttgtctatgaatttgacaagttttggtttgaagaagaaccagaaagcattatgtatttcaatttgtatagagagaagtttcatgaaaagattaaaggacttttactggattgtaatgtagcacttactttaaaagtataaatcatccactgtatcttctatttctaccacattttgcacattcaacagaatttatatgttgtaataggaattatctgatcaattacactcttatatataatttcctacaaaaatatttcagaaattctatttaagaaagctagtggacaatcagtgtatgtttacaattgtttatacactgttctccaaaggtaccttatccttccaaagatcccctctgtagagtcatgcgaactacagtttggaacttgggacttagcccgttggtgtaaaagtataaatcaggtatttgtattaaattgattaaaatgtgtaaaatcaattttcgtttttatgtgttatagggtcaagttggtatctttttcaaagctctttaagatttttttggtttttagtttggaaatggctgtttttaattttgtctgatttttatttctaggttaattaacagcaagtgtttctttatggttttctttgtttgcatcttaattacatgtcataacgttgcttcattagtagcaaatagagcagagatacagcagagagaataaagaattagggcctccttttgggtttctgtgattattgagcataactgatgagagaatgacagtattggtgactagcttttttgtttttaaataacacactttaaaatgccacagtgttatttgaaagcttaaaggcattttctcatcttcagtatttgctttttatcagttgtagaaaagaaccttagtgttttcttctctacctatgtatgcttatgaaaccgctctacctacatatgaaacttctctacctatgtatgtttacgaaaagagatgtatttgccaagaaaatcttgattatataaaagacaaaaagattataaaagacagtttctgtttaagtaaaactgtctttgaaacttaagaaagcttaagttttaaaaaaatctcagttaaacatcattggtttatttgacttactgttaactcttgcttctctttgactccatggtgtttttagataaccatgtatgaactttatgttaatggtttgtgggatactaaaatagcttgaagatgacttgatgactgtgcattttatatagttttattctcctaaaatctcaggagggcagcaagtgctgtcaacgattatatagtgatgagatttttatgggaatgatttcttcttggtgcgttttacacatttgtactgatagcaaaactaaagtttaaagcagcaaagtttaagttctccttaaatcctacagaaaccaaccttttaaggacataatttcatctaaaacatgacgatatttagcacaccttttaatgtgggtatatatcaagtgtttaaggactggctagtatgtgatagagcaagacctgagactttataagtatttgctcgtgtctgttgacagacctctttctttcaaacttgttagaagagtggtaagacatatccaattggaaaataagatgcagtgttgtatagcacatacatttaaagtgcttgcgttaaaattagtttctcaataagataaaattattttaaaaatttggttcactttattacaatagtggcaatttagcttttcagtattacaggaatttaaaaattggtttcttgtaggggacatctcaactttgggaatatcttcacttaatttttaaaaaatattttcatgctttattgtccagctatacaatatgtcgcaaaatcctgacaagttcattgtattaaggtattaactattacatggaaagcaattctgttcatcttttgatgtttgtgttgaaaatgcttatctttgtgttttgatcttccaacagctgagagcttgaactgatttaaacatttgtcaatatacttaagaatgctttaagtaaagaaggggaaaattttaagtaagttttttcccttctaggaagaaaaactatgatgatgttaagaaaatgtcattatagagcttgctcaataatatgttctttaaatccacctccatttgtacattataggtatcattctgtttttgcttaaaataatctgcaaccatttcagatagttttacagcaaattgatctaaaagccactaataaattctagggtttgagtctagaagccaagcaaactgtcaccaatgtcagttgtaaattagaatgcaacatgaggcttcagactcatgacaatgatatacatgaaaacaaaaatataattgtgtctaccttcctactttcccttttgacatatgtagttggaattttacatagtcttaaaatccatatttagaatcttacctgtttctataataattagtaaaatgccaaagtagtgatagaatattgtggcattgaagtagccgaaaaattgttagttttagcatcaaaaaagtaaatagatgttgaaatgaatttttgtatgtgccaggttgaagagagtgtgccagtgacaggaagtagtctaaaaaattaacagttatggttttaataggatctgaaagacaatctttaaagaaatgggagaaattgggggtatcagtgaacctataccaacctctctttgtacataaatatggtgatgtagctagatataaaaatcagtgtcttactggcaccatttacagtttagaaaacaatctttttcttaaaaatgcccatctgatttctatttttaggagctacttggatttgtatgtattttttctacgtgaaaatatatgtactcttcacttttgttccagtactataattgctcatgcactctttctcccctttgagaacattcagtgaaatacaacttcatcaaagatttgctcaaaggagaagaatcgcatgagtgtgaaaagtagatgctcgtagccagaacagaaaaggttacacatgatcatggcacagaagataggaggtttgacttggtgggccataatgtttattatcctttttgaaataacagggaccagcagcagttttctcaggataaatgctctaccccacttctctatgaacaggtgtggggaggcttactttccattttcatatttatacacctctctacaaaagcaatttttaatgaaggttagtggaattgttaaaaatctgagaggaatgatgactggaggtgtttggggtttttttctgtattcattttttaatgagaaaagttttaaatgtagtacaggttagacccaactactaccttactattataggacgattctatgtttctgttaaagtattcaagtagctttctctgggggaaaaagtaccacttggacacttaaaggaattgggatttttgtctactttggataaggcagttgacttcttaagtaaaagcaatagtgtaaaatgtcattttgtttggaatgttaagtgagcaaataaaaaacatgttgaaattgtaaaaaaaaaaaaaaaa

SEQ ID NO: 6525 - DNA, 4311 bp, Homo Sapiens
  NM_153705
ggtccgcggcgctgccggcccctcctcgccgccgcggagctggaccgcagttgtgccccgccgaccatgcgccgcctcccgcgggccctgctgctgcagctgcgcctcgccctgctggtggccgcgggggccccggaggtgctggtcagcgcgccgcggagcctggtgtgggggcccgggctgcaggcggccgtcgtcctgccggtccgctatttctacctgcaggcggtcaactcggagggccagaacctcactcgctctcccgcaggtgaaacaccattcaaagtcgtagtcaaatctctttcacctaaagagttggtccggatacatgtccctaaacctttggacaggaatgatggaacatttttgatgagatataggatgtatgaaactgtcgatgaaggcctgaagatagaggtcctttatggtgatgaacatgtggctcagtctccctatattttgaaaggaccagtgtaccatgagtactgtgagtgtccggaagatcctcaggcctggcagaagactctttcttgtccaaccaaggaaccacagattgcaaaagattttgcttcctttcccagcatcaatctccagcaaatgctaaaagaagtccccaaaaggtttggggatgagagaggtgccattgttcattacacgattctcaataaccatgtttaccggagatctttagggaaatacacagacttcaagatgttctctgatgagattttgttatcattgacaagaaaggtccttctcccagatttagaattttatgttaatcttggagattggcccttggagcatcgaaaagtcaatggaacccctagccccatacctatcatttcatggtgtggctctctggattcaagagatgttgtccttccaacgtatgacatcacccactccatgcttgaagccatgcggggtgttacaaatgatctcctctctattcagggaaatacagggccttcctggatcaataaaacagagagagctttcttcagaggtagagacagccgagaggagaggctccagttggtacagctgtccaaagaaaatcctcagctactagatgcaggaattacaggatatttctttttccaagagaaagaaaaggagcttggaaaagccaagttgatgggtttctttgatttctttaagtacaagtatcaagtaaatgtggatgggaccgtggctgcttacagatatccatatctcatgctgggcgacagtctggttttaaagcaggactcgccatattatgaacatttctacatggcactagaaccttggaagcattatgttccaattaaaagaaatctgagtgatttattagagaaagttaaatgggctaaggaaaatgatgaagaagccaagaagattgcaaaagaaggacagttgatggctagggacctactacagccacacaggctttactgctactattaccaagtactgcagaaatatgccgagcgccagtccagcaaacccgaagtacgtgatggaatggaacttgttcctcagccagaagatagcacagccatctgccagtgccacaggaaaaagccttcaagagaagaactttgagtcagcccagaatcacactcctgtgtatcccggctacactttaaggaaagattgaatctaagctgtgaaggacagtatagaagactgcaccaagtggactagttctcccggtggctttatatatgtagatggatatagcagtactggttgagtatccctcatctgaaatgcttaggaccaggagtgtttcaggcttcagattttttaagatttgggaatatttgcatgtacataatgaggtatcttggggatgagatccaagtctaaacacaaaattcatttatattttatatataccttgttcacataccctgaaggtaattttatataatatttttaataatttgtgcatgaaacaaagtttgtatacattgaactgtcagaaagcaaaggtgtcactatcttagcgacccaagtggtggtgtcagcactcaaaaagttttggattttggggtatttcagattttagatttttgtatgaggaatgttcaacctgtatttgaacaagcattaccaaatatcattgaatattaatatcttttgcgtaaaaactgctattatcagcatcatagtttctctaaaaagaaaacttggggatcatagccgatagagagacttgctaaaatataaatcagcctctgcaaaactgtttacatatttattggtttacatattttattggtttatttctatcccctgttcactttttctcttccacttccaattatgaagagaaaatatttgttcagggttgtccccccgccccccgtcactgcataatttctcctcttacaagctgcttttggctttcattaataacagcttccttttagaaggtctgataaggatatttaaggaagaagagaatgactctgttattaaaggtggcatggagactgtggagggaatattttttaaagcactactcatatcctttaaactaaattttgccaaagcccgagacaacattaaggagaaattgtaccttaagttagtaattccaaatctatctgagttgtatacccatcaaagacaatacagttattaacatagatgaaggtatgctataggcatcattcattatctctatattgaataggtgaaagataactgtagtcaggtgaaaggcattcattatttttaagctgaaaaggggatccttgaaaacactgaaaacctctacaacaatcttcaggaagcctgctatcttgggattcactaataataggccaagaacaaaggcaagcatccattcctcactccaccacttttctatttcagtgggtgtcgttgctacgatgaagactttggaaatttcctttctcttttaggacagggtcaggatttaggactcatagcctgaaagctcattacatactccttgtaaccatcagtccaaggttcagttcactaaagtgcatgttctaaaacaagagctatcctcattccaaattttaaaatatgtactctggccggttgcagtggctcacgcctgtaatcccagcactttggcaggccgagatgggcggatcttttgaggtcaggagtttgagaccagcctggccaacatggtgaaaccccgtctctactaaaaatacaaaaattagccaggcatggtggcatttgcctgtaatcccagctactcgggaggctgaggcaggagaatcacttgaacctgggaggcagaggttgcagtgagctgagattacaccactgcactccagcctgggtgacagagtgagactccatctcaaaaactgaaaataaaaataaaaatatgtattctcctaactgaaatatttacttaatctggaaaacaatgtaactatttttaaagtggttacatctattcttgctgaagaacaataaacagaattttttgactaagcataaccaaatttcagaacagtctaatcaatgccaagtatccaaggcaaactctaatacccatccattgtgcaaaaccacaagcacgcaagtattaaataagagcaagctgtcctgagcccatacctaatgaatttgtgtcttaaatattgtacattgtgtttgaggcttgtcaaaactgggattatggcaagaaaggttgcctaactcatacctttctgcctcaaattccaggtgctaaaggctaatggcattttaaacatcttacatttttaaaaatttatattgcctctgccaaacaggcctaatagttaaaagcaagttgagacaaaccaggcagattcagtgtgtggaacaggaaggatgtgctttaaaaaaaggtggaatccctcaaaaaattctatagggagacagcagccttaatctacataattcttcatctcgccaattcagccgcagcctttaaagagttagtgttaatggctttctggtttgaaaacaaaaatgcatctatgtggttgaaagtttgggaggagattcaccaatatctgaggagaagatggagtgaagggaattcttactttttgctttatacctttctataatatttagatttttttttactgtaagtatggatcaaattgcaaaataaagaaaaatgccaaccttagaaaagacaataaatgcacaaaagatataaacaggaacagcaaatatttatattttttccattttgctctttttaaatctatgtttagaactttatatcttgggacttatgtatatatataccttttaaataaaataaattttctaaataaaaagttgaaaaag

SEQ ID NO: 6526 - DNA, 3435 bp, Homo Sapiens
  NM_153719
gtactacttctgcgcctgcgcgaccgtgattccccgctcgcgactccccaccccccagggctccctaaagagggccacgagctgcgaaagggcgggaaaggcagttggagaagaggtaagcggttactcactccatggctgcagcaaggagaggcggcggcggcctcggctgaagaaagaaggtgggagcggagagcgcaggcgtgccgaggtggatgtccgtcttttctctgttgcagaaacccaccttgtcccatccacatcaggacatcccagctggagttcaaccttcatcccttctgtggcagttaggagactgaatcaaggtccagagaaggtggaggaatcctgatactgagcgaaatcttcccaaggctgcagacaccgacggatttgctttgggagccagagtagctgccgccaccagagtccggagccatgagcgggtttaattttggaggcactggggcccctacaggcgggttcacgtttggcactgcaaagacggcaacaaccacacctgctacagggttttctttctccacctctggcactggagggtttaattttggggctcccttccaaccagccacaagtaccccttccaccggcctgttctcacttgccacccagactccggccacacagacgacaggcttcacttttggaacagcgactcttgcttcggggggaactggattttctttggggatcggtgcttcaaagctcaacttgagcaacacagctgccaccccagccatggcaaaccccagcggctttgggctgggcagcagcaacctcactaatgccatatcgagcaccgtcacctccagccagggcacagcacccaccggctttgtgtttggcccctccaccacctctgtggctccagctaccacatctggaggcttctcattcactggtggaagcacggcccaaccctccggtttcaacattggctcagcagggaattcagcccagcccacggcacctgccacgttgcccttcactccggccacgccagcagccaccacagcaggtgccacacagccagctgctcccacacccacagccaccatcaccagcactgggcccagcctctttgcgtcaatagcaactgctccaacctcatctgccaccactggactctccctctgtacccctgtgaccacagcgggcgcccccactgctgggacacagggcttcagcttaaaggcacctggagcagcttccggcacctccacaacaacatccaccgctgccaccgccaccgccaccaccaccagcagcagcagcaccaccggctttgccttgaatttaaaaccactggcgccagccgggatccccagcaatacagcagctgccgtgaccgctccacctggccctggcgcagctgcaggggcggctgccagctccgccatgacctacgcgcagctggagagcctgatcaacaaatggagcctggagctagaggaccaggagcggcacttcctccagcaggccacccaggtcaacgcctgggaccgcacgctgatcgagaatggagaaaagatcaccagcctgcaccgcgaggtggagaaggtgaagctggaccagaagaggctggaccaggagctcgacttcatcctgtcccagcagaaggagctggaagacctgctgagcccactggaggagttggtcaaggagcagagcgggaccatctacctgcagcacgcggatgaggagcgtgagaaaacctacaagctggctgagaacatcgatgcacagctcaagcgcatggcccaggatctcaaggacatcatcgagcacctgaacacgtccggggcccccgccgacaccagtgacccactgcagcagatctgcaagatcctcaatgcgcacatggactcactgcagtggatcgaccagaactcggccctgctgcagaggaaggtggaggaggtgaccaaggtgtgcgagggccggcgcaaggagcaggagcgcagcttccggatcacctttgactgagcgacagcagccctggggcccgcaggtccctagggagttcatgaggggaatgcgccctgttgtctgtagtttggggttgtggcaagatacttgtttgtttgtttctttctttcacatgactgcccttgacatgatcgctgtgtgctttgcgtttttccatttaggagggtattctgggccttctgcccaggcagcagcctcatgggtgtggcttctgtggctttcatttgagtatctttggccccttttcacctactgcgaccacccacctcatcctggctcagcctggtgatggagaagtgctgatggtcttggtcccagccagggtcgtgggggcagccactctctccaaagcatagtcataggtgtcatgaaaaaataccaaatgtaagagaacctccaagtcagggcgcagtggctcacccctgtaatctcagcactttgggtggccaaggcgggcagatgacttgaggtcaggagttcgagaccagcctggccaacatggtgaaaccccgtctctactaaaaatacaaaaattagtcaggtgtggtggacgcctgtgatctcaatctcagctactcgggaggctgaggcaggagaatcacttgaacccaggaggtgttgcagtgaaccaagatcacaccactgcactccagcctaggcaacagagactctgtctcaaaaaaaaaaaaaaaaaaaaagaaactcccaggagacagcagcctagttttcgagtgtgagcttgtgcttgtgaaagctaaccatgctaaccaccaaggcaaagcagcacagtgtgaatagaacagagcgggatcaagaatttcacagaagacaggtcagctgaggggcctgcacacacagggtgttgaggaaccacagatgggcgccgagaggcctgccttttgcctggcccaggctcacccccaccttgggcctcacctcctccaggaagccttcccagctacccgaagctcaggtggccttcttgcaggtccccgtagcaccctgagcctgtaccttgggtggcacttgttatgctatcctgtgctagccgtttgtgcctcgtctcgctgttagattgtgagttcccatgggcagagacccactgtcgttccccgtgtgtccccagcccggtccctgtcacatttgttaaatgaaagaacaatgaagcccagtgtaacgtcagtccacagaaatagccacagcttccagtggtggccgtagacttggctcggaacttagtggcaccagagtaactctagtcagttacagtaaaatccactgtgtgtggaaggcagaagctagcggttgtatcccaagcatcttttgtatttgtctttatactttgctgaattctctgaaatacctattactgtatgttgcttttctaaataaatgtattgtgaaaccaaaaaaaaaaaaaaaaaa

SEQ ID NO: 6527 - DNA, 1514 bp, Homo Sapiens
  NM_153747
cggacccggaagtgcttggccacagtcgcagccccggcgccccgaagcgggaaaaaggctgggtgccgccgtcccccagctgcgcaaccctaggaactctcgggaacttggctgtgttgtcctgcctcagagacaaattcatctattgtaggcctagcccctgcctttgaaaacaaggaaaggttggtagaacatcaacacagcatggaatttccagggaggtctcatttcaaaacttcataaagaacaagaaccacctggacttctgtgagggcgatgattaaactggcctgagtttgaatgaaaggataatgtatgctcaacctgtgactaacaccaaggaggtcaagtggcagaaggtcttgtatgagcgacagccctttcctgataactatgtggaccggcgattcctggaagagctccggaaaaacatccatgctcggaaataccaatattgggctgtggtatttgagtccagtgtggtgatccagcagctgtgcagtgtttgtgtttttgtggttatctggtggtatatggatgagggtcttctggccccccattggcttttagggactggtctggcttcttcactgattgggtatgttttgtttgatctcattgatggaggtgaagggcggaagaagagtgggcagacccggtgggctgacctgaagagtgccctagtcttcattactttcacttatgggttttcaccagtgctgaagacccttacagagtctgtcagcactgacaccatctatgccatgtcagtcttcatgctgttaggccatctcatcttttttgactatggtgccaatgctgccattgtatccagcacactatccttgaacatggccatctttgcttctgtatgcttggcatcacgtcttccccggtccctgcatgccttcatcatggtgacatttgccattcagatttttgccctgtggcccatgttgcagaagaaactaaaggcatgtactccccggagctatgtgggggtcacactgctttttgcattttcagccgtgggaggcctactgtccattagtgctgtgggagccgtactctttgcccttctgctgatgtctatctcatgtctgtgtccattctacctcattcgcttgcagctttttaaagaaaacattcatgggccttgggatgaagctgaaatcaaggaagacttgtccaggttcctcagttaaattaggacatccattacattattaaagcaagctgatagattagcctcctaactagtatagaacttaaagacagagttccattctggaagcagcatgtcattgtggtaagagaatagagatcaaaaccaaaaaaaatgaaccaaaggcttgggtggtgagggtgcttatcctttctgttattttgtagatgaaaaaactttctggggacctcttgaattacatgctgtaacatatgaagtgatgtggtttctattaaaaaaataacacatccaaaaaaaaaaaaaaaaaaaaaaaaaaaaaaaaaaaaaa

SEQ ID NO: 6528 - DNA, 1102 bp, Homo Sapiens
  NM_153750
agcggagaggtttcagcaacaccagtggcctacagagaaggagccttcctcctctccccagactccagactctaaagggcgacctcctcctgctcctgctcctggagcgcagccagcgcacagcgtttccgcaggaatcttgagaatggcaaggcccgcacacccgcggtggttcccaggcccgccccctctcgcagctgcagccccacctgccagtgcgtgccgcctccgagcgacttccgggagccgggcggccaccgcggtgcaggcgcgcgcccaaaggctttgcgaggctcactcggtctgagaggtcggaggctgcgagtgtcgctgctgaaggctgtggtggaccgggctggatcgcggattttggattagataatagatttgggatcgccgattgggggttggattgcggatttggggttggataggggatttggggctgggtcggcgggggcaggggcggggaggtgaaaaggtgacagggagctgcctcctctcaagagcagttggttgggagtctgagaagtcaccaccatgaagttgttcggcttcaggagccacaggggccagacggtcctgggcaccatagaccacctgtacacgggttccgggtaccgaatccggtactcggaactgcagaagatccacaaggcagctgtcaagggcgacgccgcggagatggagcgctgtctggcgcgcaggagcggagacctggacgccctggacaagcagcacagcagtgtgtccccaagaaagtgtcagagcctttacgtggaccttcccatggaaaaggaaacagaatagtcaatggaaaaggagaaggacctcctgcaaaacatccttccttgaagcctagcactgaaatggaagatcctgctgtgaaaggagcagtacaaagaaagaatgtacagacattgagagcagaaaaagccttaccagtggcttcagaggaagagcaacaaaggcgtgaaagaagtgaaaagaagcaaccacagctaattttagaacatgcactctgacagaaaagacatctgagaaacaaaacaagcaaatttgttttcctttttgcacctgccaaaaaaaaaaaaaaaaaaaa

SEQ ID NO: 6529 - DNA, 6216 bp, Homo Sapiens
  NM_153809
ccccgcctttattcagcttccggtagacgctggtagggtaagggagctaagtagatcacttccgggcgactgttgttttatttccggtttatgcgacccggctgcgatttgctgctgagggcagcagctaccgtcactgccgccatcatgtcagactcggacagcgaggaagattcatctggaggtggcccatttactttagcgggtatccttttcggcaacatcagtggagcggggcagctggagggggaaagcgtcttggatgatgagtgtaagaagcacttggcaggcttgggggctttggggctgggcagcctaatcactgaactcacggcaaatgaagaattgactgggactggcggtgccttggtaaatgatgaagggtggattaggagtacagaagatgctgtagactattcagacatcaatgaggtggcagaagatgaaagccaaagacaccagcagacgatggggagcttgcagcccctttaccactcggattatgatgaagatgactatgatgctgattgtgaagacattgattgcaagttgatgcctcctccacctccacccccgggaccaatgaagaaggataaggaccaagatgctattacctgtgtgtctgaaagtggagaagacatcatcttgccctccatcattgccccttcctttttggcctcagagaaagtggatttcagtagttactctgattcagaatctgagatgggacctcaggaagcaacacaggcagaatctgaggatggaaagctgacccttccattggctgggattatgcagcatgatgccaccaagctgttgccaagtgtcaccgaactttttccagaatttcgacctggaaaagtgttacgcttcctacatctttttggaccagggaagaatgtcccatctgtttggcggagtgctcggagaaagaggaagaagcatcgtgagctgatacaggaagagcagatccaggaggtggaatgctcagtagaatcagaagtcagccagaagtctttgtggaactatgactatgctccaccaccacccccagagcagtgtctcgctgatgatgaaatcacgatgatggttcctgtggagtccaaattttcccaatcaactggagatgtagataaagtgacagataccaaaccaagagtggctgagtggcgttatgggcctgcccgactgtggtatgatatgctgggtgtctccgaagatggcagtgggtttgactatggcttcaaactgagaaagacacaacatgaacctgtgataaaatctagaatgatggaggaatttaggaaacttgaggaaagcaatggcactgatcttctggctgacgaaaacttcctgatggtgacacagctgcattgggaggattctatcatctgggatggggaggatatcaaacacaaagggacaaaacctcagggtgcaagcctggcaggctggcttccttctattaagactaggaatgtaatggcttacaatgttcagcaaggttttgcacccactctggatgatgacaaaccttggtactccatttttcccattgacaatgaggatctggtgtatggacgctgggaggacaatatcatttgggatgctcaggccatgccccggctgttggaacctcctgttttggcacttgatcccaatgatgagaacctcattttggaaattcctgatgagaaggaagaggccacctctaactccccctccaaggagagtaagaaggaatcatctctgaagaagagtcgaattctcttgggcaaaacaggtgtcatcagggaggaaccacagcagaacatgtctcagccagaagtgaaagatccatggaatctctccaatgatgagtattatttccccaagcaacagggtcttcggggcacctttggagggaatattatccagcattcaattcctgctatggaattatggcagcccttctttcccacccacatggggcccatcaaaatccggcagttccatcgcccacctctgaaaaagtactcatttggtgcactctctcagccaggtccccattcagtccaacctttgctaaagcacatcaaaaaaaaggccaagatgagagaacaagagaggcaagcctcaggtggtggagagttgttttttatgcgcacacctcaggatctcacaggcaaagatggagatcttattcttgcagaatatagtgaggaaaatggacccttaatgatgcaggttggcatggcaaccaagataaagaactattataaacggaaacctggcaaagatcctggagcaccagattgtaaatatggggaaactgtttactgccatacatctcctttcttgggctctctccatcctggccaattactgcaggcacttgagaacaacctttttcgtgctccagtgtatcttcataagatgccagaaactgattttctgatcattcggacaagacagggttactatattcgggaattagtggatatttttgtggttggccagcagtgtcccttgtttgaagttcctgggcctaactccagaagggccaatatgcatattcgagactttctacaggtttttatttaccgccttttctggaagagtaaagatcggccacggaggatacgaatggaagatataaaaaaagcctttccttcccattcagaaagcagcatccggaagaggctaaagctctgcgctgacttcaaacgcacagggatggattcaaactggtgggtgcttaagtctgattttcgtttaccaacggaagaagagatcagagctaaggtgtcaccagagcagtgctgtgcttattatagcatgatagctgcaaagcaacgactgaaggatgctggctatggtgagaaatccttttttgccccagaagaagaaaatgaggaagatttccagatgaagattgatgatgaagttcacgctgctccttggaacaccacaagggccttcattgctgccatgaagggcaagtgtctcctagaggtgactggggtggcagatcccacagggtgtggtgaaggattctcctatgtgaagattccaaataaaccaacacagcagaaggatgataaagagccacaggcagtgaagaagacagtgacaggaacagatgcagaccttcgtcgcctttccctgaaaaatgccaagcaacttctacgtaaatttggtgtgcctgaggaagagattaaaaagttgtcccgctgggaagtgattgatgtggtgcgcacaatgtcaacagaacaggctcattctggagaggggcccatgagtaaatttgcccgtggatcaaggttttctgtggctgagcatcaagagcgttacaaagaggaatgtcagcgtatctttgacctacagaacaaggttctgtcatcaactgaggtcttatcaactgacacagacagcatctcagctgaagatagtgactttgaagaaatgggaaagaacattgagaacatgttgcagaacaagaaaaccagctctcagctgtcacgtgaatgggaggagcaggagcggaaggaactacggcgaatgctactggtagcaggctcagcagcatcaggaaacaatcacagagatgatgtcacagcttccatgactagccttaagtcttctgccactggacactgtctcaagatttatcgcacatttcgagatgaagaggggaaagagtatgttcgctgtgagacagtccgaaaaccagctgtcattgatgcctatgtgcgcatacggactacaaaagatgagaaattcattcaaaaatttgccctttttgatgaaaaacatcgggaagagatgcggaaagaacggcggaggattcaagagcaactgaggcggcttaagcggaaccaggaaaaggagaagcttaagggtcctcctgagaagaagcccaagaaaatgaaagagcgtcctgacctaaaactgaaatgtggggcatgtggtgccattggacatatgaggactaacaaattctgccccctctattatcaaacaaatgtgccaccttcgaaacctgttgccatgacagaagagcaggaggaggagttggaaaagacagtcattcataatgataatgaagaacttatcaaggttgaagggaccaaaattgtcttcgggaaacagctaattgagaatgtgcatgaggttcgcagaaaatctctggttctcaagtttcctaaacagcagcttcctccaaagaagaaacggcgagttggaaccactgttcattgtgactatttgaatatacctcataagtccatccaccgacgccgcacagaccctatggtgacgctgtcatccatcctggagtctatcatcaatgacatgagagatcttccaaatacacaccctttccacactccagtcaatgcaaaggttgtaaaggactactacaaaatcatcactcggccaatggacctacaaacactccgtgaaaatgtgcgtaaatgcctctacccatctcgggaagagttcagagagcatctggagctaattgtgaaaaacagtgcgacctacaatgggccaaaacattcattgactcagatctctcaatccatgctggatctctgtgatgaaaaacttaaagagaaagaagacaaattagctcgcttagagaaagctatcaaccccttgctggatgatgatgaccaagtggcattttctttcattctggacaacattgtcacccagaaaatgatggcagttccagattcttggccatttcatcacccagttaataagaagtttgttccagattattacaaaatgattgtcaatccagtggatttagagaccatacgtaagaacatctccaagcacaagtatcagagtcgggagagttttctagatgatgtaaaccttattcttgccaacagtgttaagtataatggacctgagagtcagtacactaagactgctcaggagattgtgaacatctgttaccagacaattactgagtatgatgagcatttgactcaacttgagaaggatatttgtacagctaaagaagcagctttggaggaagcagaattagaaagcctggacccaatgaccccagggccctacacatctcagcctcctgatatgtatgataccaacacatccctcagtacgtctcgagatgcctctgtatttcaagatgagagcaatttgtctgtcttggatatttccactgccactccagaaaaacagatgtgccagggccaaggtaggctgggtgaggaagactctgatgtggatgttgaagggtatgatgatgaggaggaggatgggaaacctaagcctccagccccagaagggggagatggtgatcttgcagatgaagaggaaggaactgtacaacaacctgaagccagtgtcctgtatgaggatttgcttatatctgaaggagaagatgatgaggaagatgctgggagtgacgaagaaggagacaatcctttctctgctatccagctgagtgaaagtggaagtgactctgatgtgggatatggtggaataagacccaaacaacccttcatgcttcagcatgcttcaggagaacacaaggatgggcacggaaaatgaagaaagcatgatgtcccatgagggagacggtggggaggcttcccatgatttggaggatagcaacatcagttatgggagctgtgaggagcctgatcccaagttgaacacccaagacacaagcttcagcagcatcggaaatttccagctgggcatggtggctcacacctgtaatctcagcactctgggaggccgaggcgggtggatcacctgaggtcagttcgagaccagcttggccaacatgtcgaaacttcatctctactaaaaatacaaaaattagccaggtgtggtggtgcacgcctgtaatccccagatactcgggaggctgaagcaggagaattgcttgaacccgggaggcagaggttgcagtgagtggagatcacgccactgcgctccagcctgggcgaaagagtgagactccatctcaaaaaaaaagaaaatttccaagcatggtatcatctcacttttctaatttacaggctggaacagatgagagccctcctgctgggacagagaattgggttctagtggactctgctacacttaaacctatgtgacaaaccgcccattattttattgtttatttaattatacaatgcctcgttcctatatggatttgaggcaaattaccataaattttgaaacagc

SEQ ID NO: 6530 - DNA, 3241 bp, Homo Sapiens
  NM_153813
gcggccgccgggagggcgcgcggcgccggagacatgtccaggcggaaacagagcaacccccggcagatcaagcgttccctcggagacatggaggccagagaggaggtgcagttggtgggtgccagccacatggagcaaaaggccacggcacctgaagccccgagccctcccagcgcagatgttaactcacccccaccgctgccgccccccacatccccaggaggccccaaggagctggaaggacaggaaccagaacccaggcccacggaggaagagccgggcagtccctggagcgggccagacgagctggagccggtggtgcaggatgggcagaggcgcatacgggcccgactcagcctcgccacgggcctgtcctggggcccgttccatgggagtgtccagaccagagcctcatcccccaggcaggcggagccgagcccagccctgaccctgctgctggtggacgaggcctgctggctgaggacgctgccccaggccctgactgaggccgaggccaacacagagatccacaggaaggatgacgcactctggtgcagggtcaccaagccggtgcctgcggggggactcctgagcgtgctcctcacggccgagccccacagcacccccggccaccctgtgaagaaggagccagcagagcccacgtgcccggcccctgcacacgacctccagctcctgccccagcaggccgggatggcctccatccttgccaccgcagtgatcaacaaagacgtcttcccctgcaaggactgtggcatctggtaccgcagcgagcgcaacctgcaggcgcacctgctctactactgcgccagccgccagggcaccggctccccggccgcagccgccacagacgagaagcccaaagagacctaccccaacgagcgcgtctgccccttcccccagtgccgcaagagctgccccagcgccagctccctggagatccacatgcgcagccacagcggagagcggcccttcgtgtgcctgatctgcctgtcggccttcaccaccaaggccaactgcgagcggcacctcaaggtgcacacggacacgctgagcggtgtctgccacagctgtggcttcatctccaccacaagggacatcctctacagccacttggtcaccaaccacatggtctgccagcctggctccaagggtgagatctactcgccaggggccggacacccagcaaccaagctgcccccagacagtctgggcagcttccagcagcagcacacggccctgcaaggccccctggcctccgcggacctgggcctggcgcccaccccatcgccaggactggacagaaaggccctggccgaggccaccaacggagaggccagagcggagcctctggcccagaatggaggcagcagcgagcccccggcggcccccaggagcatcaaggtggaggcggtggaggagccggaggcggcccccatcctgggccccggagagcctgggccccaggccccgtcgcggacgccgtcgccgcgcagccccgccccggccagggtcaaggccgagctgtccagccccacgccgggctccagcccggtgcccggcgagctgggcctggccggggccctgttccttccgcagtacgtgttcgggcccgacgcggcgccccccgcctcggagatcctggccaagatgtccgagctggtgcacagccggctgcagcagggcgcgggcgcgggcgccggcggcgcgcagaccgggctcttccccggggcccccaagggcgctacgtgcttcgagtgcgagatcaccttcagcaacgtcaacaactactacgtgcacaagcgcctctactgttcaggccgccgtgcgcccgaggacgcgcctgccgcgcgcaggcccaaggcgccccccggcccggcccgcgcgccccccggccagcccgccgaacccgacgcgccgcgctcgtccccgggccccggagcgcgcgaggagggggctgggggcgcggccacgcccgaggacggcgcgggcggccggggcagcgagggcagccagagcccgggtagctccgtggacgacgcggaggacgaccccagccgcacgctgtgcgaggcctgcaacatccgcttcagccgccacgagacctacaccgtgcacaagcggtactactgcgcctcgcgccacgacccgccgccgcgccgaccggccgcgcccccgggaccccctgggccggccgcgcccccggccccctctcccgccgcgcctgtgcgcacgcgcagacgccgcaagctctacgagctgcacgcggccggcgccccgccccccccgccgcccggccacgcccccgcgcccgagtcgccgcggcccggaagcggaagcggaagcggccccggcctcgcccctgcgcgctcgcccggccccgcggccgacggccccatcgacctgagcaagaagccgcggcgcccgctccccggagccccggcaccggcgctggccgactaccacgagtgcacggcctgccgcgtgagcttccacagcctcgaggcctacctggcgcacaagaagtactcgtgccccgctgcgccaccgcccggcgcgctcggcctgcccgccgccgcctgcccctactgccccccgaacggcccggtgcgcggggacctgctggagcatttccgcctggcgcacggcctgctgctcggcgcgcccctggccggcccgggggtcgaggcccggacgccggccgaccgcggcccctcgcccgctcccgcccccgccgcctccccgcagcccgggtcccgtggcccccgggacggcctcggcccggagccccaggagccgccgcccggcccgcccccgtccccggccgccgcgcccgaggccgtgccgcccccgccggcgcccccctcctactcggacaagggcgtccagactcccagcaagggcacgccggcgccgctgcccaacggcaaccaccggtactgccgtctttgcaacatcaagttcagcagcctgtccaccttcatcgcccacaagaagtattactgctcctcgcacgccgccgagcacgtgaagtgagcgcccacactacagccgcagacgctttgcacgccccgctgcgatgcggggagggggccgcccccaggccgcacggactgccgctcctgggaaccccgccacgcacaggcctcggcggagggggccgcagggggcagcgcccgcctggacccttggcacttaataaagaagttcagtttgatgagca

SEQ ID NO: 6531 - DNA, 3848 bp, Homo Sapiens
  NM_153837
ggcagcttctcaggtcagcctcctccgggcctctccccactctcctctgcccagttctctgtccttatccacaggcccctcagtgggcactggccatacccatgtccaggtgggcacaggcctggtgatatcctggtgagcaagctggggacccaccctccttccctttctggttggcagctccacatctggggcaatgtagagatctgtgcttttggaaggaggggcaatttaaattaagaagtggttaggcatgggtctcgaatcttagcttccccgcgaggtctgggacaagtgaagagaggtttcttttctggacctcagtttctcatctgtaaaatggggtgagtctgggaacctgcaccttggatggctgtcaggggctcagtagaggacctggcacacagtttgtgcttggcaatctggagcaggtgcagctcctttcagagtgacctggattggatcctggggacagcatgtctcagggccggagccagttcttggaggagactctgcgcagggcatggatcactgtggtgcccttttcctgtgcctgtgccttctgactttgcagaatgcaacaacagagacatgggaagaactcctgagctacatggagaatatgcaggtgtccaggggccggagctcagttttttcctctcgtcaactccaccagctggagcagatgctactgaacaccagcttcccaggctacaacctgaccttgcagacacccaccatccagtctctggccttcaagctgagctgtgacttctctggcctctcgctgaccagtgccactctgaagcgggtgccccaggcaggaggtcagcatgcccggggtcagcacgccatgcagttccccgccgagctgacccgggacgcctgcaagacccgccccagggagctgcggctcatctgtatctacttctccaacacccactttttcaaggatgaaaacaactcatctctgctgaataactacgtcctgggggcccagctgagtcatgggcacgtgaacaacctcagggatcctgtgaacatcagcttctggcacaaccaaagcctggaaggctacaccctgacctgtgtcttctggaaggagggagccaggaaacagccctgggggggctggagccctgagggctgtcgtacagagcagccctcccactctcaggtgctctgccgctgcaaccacctcacctactttgctgttctcatgcaactctccccagccctggtccctgcagagttgctggcacctcttacgtacatctccctcgtgggctgcagcatctccatcgtggcctcgctgatcacagtcctgctgcacttccatttcaggaagcagagtgactccttaacacgcatccacatgaacctgcatgcctccgtgctgctcctgaacatcgccttcctgctgagccccgcattcgcaatgtctcctgtgcccgggtcagcatgcacggctctggccgctgccctgcactacgcgctgctcagctgcctcacctggatggccatcgagggcttcaacctctacctcctcctcgggcgtgtctacaacatctacatccgcagatatgtgttcaagcttggtgtgctaggctggggggccccagccctcctggtgctgctttccctctctgtcaagagctcggtatacggaccctgcacaatccccgtcttcgacagctgggagaatggcacaggcttccagaacatgtccatatgctgggtgcggagccccgtggtgcacagtgtcctggtcatgggctacggcggcctcacgtccctcttcaacctggtggtgctggcctgggcgctgtggaccctgcgcaggctgcgggagcgggcggatgcaccaagtgtcagggcctgccatgacactgtcactgtgctgggcctcaccgtgctgctgggaaccacctgggccttggccttcttttcttttggcgtcttcctgctgccccagctgttcctcttcaccatcttaaactcgctctacggtttcttccttttcctgtggttctgctcccagcggtgccgctcagaagcagaggccaaggcacagatagaggccttcagctcctcccaaacaacacagtagtccgggcctcctggcctggaatcctcagcctctctggccgccagtagcctgaggctacggctcctgctagagagggtggcaggcctgctgctggaccccagaggccactgtgaccgccaaggggccttttccacttccacggcctctccaggcactgaggggaaggcattgctctacctctccctgacattttgctccggggcagatccaaccttacctggggcagcaaactttgtcctggtacctgggcccagctcgccagggatgtgggcagagcaccagcctgggcatcaggaagccaagtttcaaggactgtctttgagtctgtctgtatgaccttgggcctgccacttctcacagaccctaggtatccacagctgtgacatgggggcaagcggctttgtttcagcctaacccaggagcttagtaaaaattgcataagaccagggggaagagtgtcagcgtggggtgggaattcccgcggcctccacctgcttgctaggggcaggatctcattcaggctgccctggaagcacctgcttggccctgccaccttcctccaggggagggccagatggcatcctggcttggggcgggtgggacctacccaggctctgagactttactggcctatgcctgaggcctcttttcctttaactccctaaattatgatgactccaagtccaagcccacccttcccaaagattgggaggttccgccgttcccagaggctcctcctgcggtgctcccaagacttccatagaccatctggaccagtagcccatcccgcagttttcttgggggcagaggaaaacgcttctttctcctccagctgaatcagctggatcccagtgtcctggctgtttggtgattgggcaagattgaatttgcccaggtaggcgtgagagtgtgggttttaaattcgaagctcaggccatagtttcagagaatcacccttaccccagaccttcatgagacagtgctcatgaagccagtgcgtttcccagaacgaacactaggcggcaccgttggtccacactcagaggcccttggcgccaagactgcatctagaatcgctcaaacacctgtttgcagaccccatgcaccagctggaggggccgtaactgcaggactgcgcctactgagtgacccatttcctccaggaggaaaggcaagacacgcttacacggccatttgtctcttttcccaatgcggcggtgcactttcgctcttgggggctgcaccccagacatagctggcaccagagcagggtgctcaggtggtgggtgctcagggccctgccccaggccactgggccgttttgatgacctcgaaggtcacaggcagaaaataggagcaggatttcccctggggaaaagttctcctgggacatcttctgctcttctgtacatttctagatgcaaataactccttcaccaggcagtgagtggcgtaggctctggagccaggctgcctgggctccaatgccagctctgccacttgctagctgtgagactgtggacaaaccactcagcctctgtgtgcctcagttttcctatttgtaaaatagaggccatagtggtacctattttgaagactaagtaaaagaattcaaataaagagacttggcacagagtaagtgctcagtaaaaaaaaaaaaaaaaaaaaaaaaaaaaaaaaaaaaaaaaaaaaaaaaaaaaaaaaaaaaaaaaaaaaaaaaaaaaaaaaaaaaaaaaaa

SEQ ID NO: 6532 - DNA, 2634 bp, Homo Sapiens
  NM_170603
atccccgtgtgggggaggggggccttcggtctctccccagcctcttccttccccctggcctgagggtgggtggggaggggcagttcctctttccttcccaagcaccgaggaggccccagctccctaggggctgagaagctggagtcctgggcaaggggaggagctgagccctactcttgcaagacccccggcctcctcaccccacgcgggaagcatgaacagaaaagacagtaagaggaagtcccaccaggaatgcaccggaaaaataggagggcgaggccggccccgccaagtgcgccgccacaagacatgccccagccctcgggaaatcagcaaggtcatggcttccatgaacctgggcctgctgagtgagggcggctgcagcgaagatgagctgctggagaaatgcatccagtccttcgattcagctggcagcctgtgccacgaggaccacatgctcaacatggtgctggccatgcacagctgggtgctgccgtccgccgacctggctgcccgcctgctgacctcataccagaaggccacaggggacacccaggagctgagacggctgcagatctgtcacctggtcaggtactggctgatgcgacaccctgaggtgatgcaccaggatccccagctagaagaagtcataggtcgtttctgggccaccgtggcccgggagggcaactcagcccagagaagactgggagactcttctgacctcctgagccctggtggccctggccccccactcccaatgagcagcccaggcctgggcaaaaagcgcaaagtgtccttgcttttcgaccacttggagacgggggagctggctcagcacctcacctacctggagttccggtccttccaggctatcacgccccaggacctgcggagctacgttttgcagggctcagtacgaggctgcccggccctggagggctccgtaggtctcagcaacagcgtgtcccgctgggtgcaggtgatggtgctgagccgtcccgggcccctacagcgtgcacaggtgctggacaagttcattcacgtggcacagaggctccaccagctgcagaatttcaacacgctgatggcagtcacagggggcctgtgtcacagtgccatctccagactcaaggactcccatgcccacctgagccctgacagcaccaaggccctcctggagctcactgagctccttgcctcccacaacaactacgcccgctaccgccgcacctgggctggctgcgcgggtttccggctgcctgtactgggcgtgcacctcaaggacctggtgtccctgcatgaggcacagcccgacaggttgcctgacggccgcctgcacctacccaagctgaacaacctctacctgcggctgcaggagctggtggccctccaagggcagcatccaccctgcagcgccaatgaggatctgctgcacctgctcacgctctccctggacctcttctacacggaagacgagatctatgagctttcttatgcccgggagccgcgttgtcccaagagcctgccaccctcccccttcaatgcacctctggtggtggagtgggcccctggtgtgacacccaagccggacagggtcacactgggtcggcatgtggagcagctggtggagtctgtgttcaagaattatgaccctgaaggccgaggaacaatctctcaggaggactttgagcgactctcgggcaattttcccttcgcctgccatgggcttcacccacccccacgccaggggagaggatccttcagcagagaggagctgacagggtacctgctccgggccagcgccatctgctccaagttgggcctggccttcctgcacaccttccatgaggtcaccttccgaaagcctaccttctgcgacagctgcagtggcttcctctggggtgtcaccaagcaaggctaccgctgtcgggagtgcgggctgtgttgccacaaacactgcagagaccaggtgaaggtagaatgtaagaagaggccaggggccaagggcgatgcaggaccccccggagctcctgtcccatccacaccagctccccatgccagctgtggctccgaggaaaatcactcctacacgctatccctggagcctgagactgggtgccagcttcgccatgcctggacccagactgaatccccacacccttcctgggaaacagatacggtcccctgcccggtgatggacccaccatcaactgcatcctccaagctggattcctagacatctcttggtctcctctcttcctcactcccttcccccagtcagtcctgagtcctgccgtcagactctggcagggctcccagaggagcatcaactccaggagaacagggatttctatcaatgtcattcactgctgcatccccagtgcctagaacagggctggcaggtggtaggcgcctgacagatgcttgtctgatgcctgaatgtctccttacccatgcccacggcacaggatagatgtgctatagggcaaagaactttgagggtcgagcagcaggggcccattcagtcccagggagcagagacccccccaaccccttcacaaaccccaacacccctgacttggcccccacagagagaggtcctacagctgtcataaattaaatttattctctgga

SEQ ID NO: 6533 - DNA, 3235 bp, Homo Sapiens
  NM_170604
atccccgtgtgggggaggggggccttcggtctctccccagcctcttccttccccctggcctgagggtgggtggggaggggcagttcctctttccttcccaagcaccgaggaggccccagctccctaggggctgagaagctggagtcctgggcaaggggaggagctgagccctactcttgcaagacccccggcctcctcaccccacgcgggaagcatgaacagaaaagacagtaagaggaagtcccaccaggaatgcaccggaaaaataggagggcgaggccggccccgccaagtgcgccgccacaagacatgccccagccctcgggaaatcagcaaggtcatggcttccatgaacctgggcctgctgagtgagggcggctgcagcgaagatgagctgctggagaaatgcatccagtccttcgattcagctggcagcctgtgccacgaggaccacatgctcaacatggtgctggccatgcacagctgggtgctgccgtccgccgacctggctgcccgcctgctgacctcataccagaaggccacaggggacacccaggagctgagacggctgcagatctgtcacctggtcaggtactggctgatgcgacaccctgaggtgatgcaccaggatccccagctagaagaagtcataggtcgtttctgggccaccgtggcccgggagggcaactcagcccagagaagactgggagactcttctgacctcctgagccctggtggccctggccccccactcccaatgagcagcccaggcctgggcaaaaagcgcaaagtgtccttgcttttcgaccacttggagacgggggagctggctcagcacctcacctacctggagttccggtccttccaggctatcacgccccaggacctgcggagctacgttttgcagggctcagtacgaggctgcccggccctggagggctccgtaggtctcagcaacagcgtgtcccgctgggtgcaggtgatggtgctgagccgtcccgggcccctacagcgtgcacaggtgctggacaagttcattcacgtggcacagaggctccaccagctgcagaatttcaacacgctgatggcagtcacagggggcctgtgtcacagtgccatctccagactcaaggactcccatgcccacctgagccctgacagcaccaaggccctcctggagctcactgagctccttgcctcccacaacaactacgcccgctaccgccgcacctgggctggctgcgcgggtttccggctgcctgtactgggcgtgcacctcaaggacctggtgtccctgcatgaggcacagcccgacaggttgcctgacggccgcctgcacctacccaagctgaacaacctctacctgcggctgcaggagctggtggccctccaagggcagcatccaccctgcagcgccaatgaggatctgctgcacctgctcacgctctccctggacctcttctacacggaagacgagatctatgagctttcttatgcccgggagccgcgttgtcccaagagcctgccaccctcccccttcaatgcacctctggtggtggagtgggcccctggtgtgacacccaagccggacagggtcacactgggtcggcatgtggagcagctggtggagtctgtgttcaagaattatgaccctgaaggccgaggaacaatctctcaggaggactttgagcgactctcgggcaattttcccttcgcctgccatgggcttcacccacccccacgccaggggagaggatccttcagcagagaggagctgacagggtacctgctccgggccagcgccatctgctccaagttgggcctggccttcctgcacaccttccatgaggtcaccttccgaaagcctaccttctgcgacagctgcagtggcttcctctggggtgtcaccaagcaaggctaccgctgtcgggagtgcgggctgtgttgccacaaacactgcagagaccaggtgaaggtagaatgtaagaagaggccaggggccaagggcgatgcaggaccccccggagctcctgtcccatccacaccagctccccatgccagctgtggctccgaggaaaatcactcctacacgctatccctggagcctgagactgggtgccagcttcgccatgcctggacccagactgaatccccacacccttcctgggaaacagatacggtcccctgcccggtgatggacccaccatcaactgcatcctccaagctggattcctagacatctcttggtctcctctcttcctcactcccttcccccagtcagtcctgagtcctgccgtcagactctggcagggctcccagaggtaggcctccagaggcatccgccttcccatccacactgcctttagtggtacgtccgtcatctttttccctggaagtgactttcctcttttgcatcctggtggatgctaatcctgctccctttccctgcacttagtatctgtgcggctgtgtgttggatacatttagactcaggcctcattctaccaactccctacatctccatttctttttttttttgagacagagtcttgctctgtcacccaggctggagtgcaatgatgcaatctcagctcactgcaacttccgcctcctgggttcaagtgattcttctgcctcagcctcccaagtagctgggattacaggcacgcgccaccatgcccggctaatttttgtatttttagtagagacggggtttccccatgttggccaagatggtctcaaactcctgacctcatgatccaccagcctcagcctcccaaagtgctgggaatacaggcgtgagccaccacgcccagctcctgtttttctgcatagaatgtgctccctctgacagcctatactttttccctctttatctcgttgaacgtctgtctttcctcaacaggagcatcaactccaggagaacagggatttctatcaatgtcattcactgctgcatccccagtgcctagaacagggctggcaggtggtaggcgcctgacagatgcttgtctgatgcctgaatgtctccttacccatgcccacggcacaggatagatgtgctatagggcaaagaactttgagggtcgagcagcaggggcccattcagtcccagggagcagagacccccccaaccccttcacaaaccccaacacccctgacttggcccccacagagagaggtcctacagctgtcataaattaaatttattctctggaaaaaaaaaaaaaaaaaa

SEQ ID NO: 6534 - DNA, 3976 bp, Homo Sapiens
  NM_170662
ctgggtcctgtgtgtgccacaggggtggggtgtccagcgagcggtctcctcctcctgctagtgctgctgcggcgtcccgcggcctccccgagtcgggcgggaggggagagcgggtgtggatttgtcttgacggtaattgttgcgtttccacgtctcggaggcctgcgcgctgggttgctccttcttcgggagcgagctgttctcagcgatcccactcccagccggggctccccacacacactgggctgcgtgcgtgtggagtgggacccgcgcacacgcgtgtctctggacagctacggcgccgaaagaactaaaattccagatggcaaactcaatgaatggcagaaaccctggtggtcgaggaggaaatccccgaaaaggtcgaattttgggtattattgatgctattcaggatgcagttggaccccctaagcaagctgccgcagatcgcaggaccgtggagaagacttggaagctcatggacaaagtggtaagactgtgccaaaatcccaaacttcagttgaaaaatagcccaccatatatacttgatattttgcctgatacatatcagcatttacgacttatattgagtaaatatgatgacaaccagaaacttgcccaactcagtgagaatgagtactttaaaatctacattgatagccttatgaaaaagtcaaaacgggcaataagactctttaaagaaggcaaggagagaatgtatgaagaacagtcacaggacagacgaaatctcacaaaactgtcccttatcttcagtcacatgctggcagaaatcaaagcaatctttcccaatggtcaattccagggagataactttcgtatcacaaaagcagatgctgctgaattctggagaaagttttttggagacaaaactatcgtaccatggaaagtattcagacagtgccttcatgaggtccaccagattagctctggcctggaagcaatggctctaaaatcaacaattgatttaacttgcaatgattacatttcagtttttgaatttgatatttttaccaggctgtttcagccttggggctctattttgcggaattggaatttcttagctgtgacacatccaggttacatggcatttctcacatatgatgaagttaaagcacgactacagaaatatagcaccaaacccggaagctatattttccggttaagttgcactcgattgggacagtgggccattggctatgtgactggggatgggaatatcttacagaccatacctcataacaagcccttatttcaagccctgattgatggcagcagggaaggattttatctttatcctgatgggaggagttataatcctgatttaactggattatgtgaacctacacctcatgaccatataaaagttacacaggaacaatatgaattatattgtgaaatgggctccacttttcagctctgtaagatttgtgcagagaatgacaaagatgtcaagattgagccttgtgggcatttgatgtgcacctcttgccttacggcatggcaggagtcggatggtcagggctgccctttctgtcgttgtgaaataaaaggaactgagcccataatcgtggacccctttgatccaagagatgaaggctccaggtgttgcagcatcattgacccctttggcatgccgatgctagacttggacgacgatgatgatcgtgaggagtccttgatgatgaatcggttggcaaacgtccgaaagtgcactgacaggcagaactcaccagtcacatcaccaggatcctctccccttgcccagagaagaaagccacagcctgacccactccagatcccacatctaagcctgccacccgtgcctcctcgcctggatctaattcagaaaggcatagttagatctccctgtggcagcccaacgggttcaccaaagtcttctccttgcatggtgagaaaacaagataaaccactcccagcaccacctcctcccttaagagatcctcctccaccgccacctgaaagacctccaccaatcccaccagacaatagactgagtagacacatccatcatgtggaaagcgtgccttccagagacccgccaatgcctcttgaagcatggtgccctcgggatgtgtttgggactaatcagcttgtgggatgtcgactcctaggggagggctctccaaaacctggaatcacagcgagttcaaatgtcaatggaaggcacagtagagtgggctctgacccagtgcttatgcggaaacacagacgccatgatttgcctttagaaggagctaaggtcttttccaatggtcaccttggaagtgaagaatatgatgttcctccccggctttctcctcctcctccagttaccaccctcctccctagcataaagtgtactggtccgttagcaaattctctttcagagaaaacaagagacccagtagaggaagatgatgatgaatacaagattccttcatcccaccctgtttccctgaattcacaaccatctcattgtcataatgtaaaacctcctgttcggtcttgtgataatggtcactgtatgctgaatggaacacatggtccatcttcagagaagaaatcaaacatccctgacttaagcatatatttaaagggagatgtttttgattcagcctctgatcccgtgccattaccacctgccaggcctccaactcgggacaatccaaagcatggttcttcactcaacaggacgccctctgattatgatcttctcatccctccattaggtgaagatgcttttgatgccctccctccatctctcccacctcccccacctcctgcaaggcatagtctcattgaacattcaaaacctcctggctccagtagccggccatcctcaggacaggatctttttcttcttccttcagatccctttgttgatctagcaagtggccaagttcctttgcctcctgctagaaggttaccaggtgaaaatgtcaaaactaacagaacatcacaggactatgatcagcttccttcatgttcagatggttcacaggcaccagccagaccccctaaaccacgaccgcgcaggactgcaccagaaattcaccacagaaaaccccatgggcctgaggcggcattggaaaatgtcgatgcaaaaattgcaaaactcatgggagagggttatgcctttgaagaggtgaagagagccttagagatagcccagaataatgtcgaagttgcccggagcatcctccgagaatttgccttccctcctccagtatccccacgtctaaatctatagcagccagaactgtagacaccaaaatggaaagcaatcgatgtattccaagagtgtggaaataaagagaactgagatggaattcaagagagaagtgtctcctcctcgtgtagcagcttgagaagaggcttgggagtgcagcttctcaaaggagaccgatgcttgctcaggatgtcgacagctgtggcttccttgtttttgctagccatatttttaaatcagggttgaactgacaaaaataatttaaagacgtttacttcccttgaactttgaacctgtgaaatgctttaccttgtttacagtttggcaaagttgcagtttgttcttgtttttagtttagttttgttttggtgttttgatacctgtactgtgttcttcacagaccctttgtagcgtggtcaggtctgctgtaacatttcccaccaactctcttgctgtccacatcaacagctaaatcatttattcatatggatctctaccatccccatgccttgcccaggtccagttccatttctctcattcacaagatgctttgaaggttctgattttcaactgatcaaactaatgcaaaaaaaaaaaagtatgtattcttcactactgagtttcttctttggaaaccatcactattgagagatgggaaaaacctgaatgtataaagcatttatttgtcaataaactgccttttgtaaggggttttcacataacata

SEQ ID NO: 6535 - DNA, 4711 bp, Homo Sapiens
  NM_170672
ttgagctcaaagcttagcagcttcaatgttgttgttaggcataaacagcttgcaaatttcaattttttttctctcctcacttttgaactagatttgggcaatggaggtgatgacagcattttagaagacagaacaggaattctaggtgtttaggcacgttgaagagaaacttgctagaggtgatgaagtggaaagaaaaagacaattcactatagggatcaacattattgcagttctgcaaaggatattttcttttaaaacatccatatctcttctttgccatggaaactacacccaatctacctgaacctgcggcacccctctgatgacccatttggattctctgatttcactgccaagattctcagttctccaaaatacttatcattcaggttgaataaaccagttctacagactgcttcttccatgcatttcccaatgatgctagctgcccttaaaattctttcagatttggaactgtatctgtatggaaacaacagagttttcttgaagtacaactaaggacaggtcaccactaggcactaacatcgctgacttgcatgattatggagatggtctatctgatgctgaaaatgtctctagttttttgacaacggctaaataaccatgggatcaagtggccttgggaaagcagcaacattagatgaactgctgtgcacttgcattgagatgtttgatgacaatggagagctggataatagttatttgccaagaatagttctactgatgcaccgatggtatttatcttccactgaattggcagaaaaacttctctgcatgtatcgaaatgccactggagaaagctgcaatgaatttcgattaaagatctgctacttcatgaggtactggattctgaagtttcctgcagagtttaatttggatcttggtttgattcgtatgactgaggaatttcgggaagtagctagtcaactaggatatgaaaaacacgtcagcctcatcgacatatccagcattccttcctatgactggatgagaagagtcacacagaggaaaaaagtatccaagaagggaaaagcctgtctgctgtttgaccatctggagcccattgaattggctgagcacctcacttttctggagcataaatcttttagaaggatctcattcactgattaccaaagctatgtcatccatggctgcctggagaataatccaaccttggaaagatcgattgctttatttaatggaatctctaagtgggtccagttgatggttcttagcaaaccaaccccccagcaaagggcagaagtcatcacaaagtttatcaatgttgcaaagaagctccttcagctcaaaaattttaacaccctgatggcagtggtgggaggcctcagtcatagttccatttcacgcctcaaagagacccattctcatctttcttcagaagttacaaagaactggaatgaaatgacagagttggtctcctccaacggcaattactgcaattaccgcaaggcctttgccgactgcgatggcttcaaaatccccatccttggagtacacttgaaagacttgatagctgtccatgtcattttcccagactggacagaggagaacaaagtgaacattgtgaaaatgcaccagctctccgttaccctgagtgaactagtctccctgcagaatgcctctcaccacttagaacccaacatggatttgatcaacctgctcacgctttccctggacctctatcacactgaagatgatatttacaaactgtcactggtgctggagcctagaaattctaaatcgcagcctacctcccctacgacgcccaacaagcctgtggtacccctggagtgggcattaggggtgatgccaaagccagaccccacggtcatcaacaagcacataaggaaattagtggagtctgtatttagaaactatgatcacgaccatgatgggtacatttcccaagaggactttgaaagtatagctgccaattttcccttcttggattccttctgtgttctggacaaagatcaggatggcctaattagtaaagatgaaatgatggcttacttcctgagagctaaatcccaactacactgtaaaatgggaccaggatttatccataattttcaggagatgacctatctcaagccaaccttctgcgaacactgtgcgggatttctctggggcataatcaagcaaggatacaaatgcaaagactgtggagccaattgtcacaaacagtgcaaagacctcctggttctggcctgcaggagatttgcccgggcgccctccttgagcagtggtcatgggtcactgcctggaagcccctcgctgcccccagcgcaggatgaggtgtttgagttccctggagtcactgctggacacagggatttagacagcagagccatcacactggttacaggctcttctcgcaagatctctgtgaggctacagagggccaccaccagccaggccacccagactgaacctgtctggtcagaggctggctggggggactcggggtcccacaccttccctaaaatgaaatccaagttccatgacaaagcagcaaaggacaaaggctttgccaaatgggaaaatgagaagcccagggtgcatgctggtgtggatgttgtagaccggggcacggagtttgaacttgaccaggatgaaggagaagagaccagacaggatggtgaggatggctgacttcaggctgcggaaactgaaggcaataatgttggcttttggaaggggcaagacgagaaactctgaagaaagctctgactctcaggaagttatctggaaagatacctggatgtttactgccttgggacactgtgggatctccatgtttggactatgggacagagaattgaccctaactaactaactatgaactatttatttcctcctcccctacccctagttaagtgccacaaagactgtgttatgtagtcagtacttttttctcatgtatctttctctagaccatttatatacgggtgaaatgaaagcttttttgcatgtacttgatactcagtctgtaaactcagacttcgctttttttgtgagactatcctttcaatatttttataaacttttgtgtgtgctgtggcagggaacagttaacaaggagtttatttagaggggtttttttcattttttgtttttcttgttttgttttgttttgttttgttcttcttggtgtgctttttggatgggaccagaacttaacattttcctgaggactaggaagctcatcagacactggaatgcagtgattcttctaatgatggtcaactgcaaggagaaactgtttacatccttcccactacacagttgctatgatatgtaacaagtcacacatgtatatatcacacaagtcttaccaattctgcgtcactaggaagctatagcatggtcgtgaaagctctcctaatacttacttaaatagccatggaagaaaattatgcttgtcccttctgactgggttaagccatctttcttaagattcctgaagtagaaatagcaattaagaaattaattcaagttttgacggttaacatttagcagaaaaacaaaccattgaataagctactaggtgaaatgcaaaacaaccatcaatttttttaaactcaataattttgtgaaaaaaaaaaccaccaccaaacttttggttgtaaaagagaacccttgttcccttcctaagaaactgccttccacaattaaagaatactcatagaaagaaaataatcataaatcatatttgattaacatttcatttaagcttttaaaatatcaattttttaaatagctcccatttacccaaaataactagttatgggtctatttcttccatgattagaggagagagaacttgattcaagatactgaaaaatagagctgggactgagcctgtgaatgacaggaatgatctattaccaggtgactagtcggaaactacacagacgtgcactggtctgcatttgggggctaaagtgtatatattccatttaaaatggaatttgtttgtatttggggcagtcttcagtaaagcctttctcctttcttttctccattgaggacagttctgctcagcaaaattgttgagtacctgttctgggcaggtcccacgctatatgcacaaagttaagaaaaacttggtcttagcccttgggagctgacagcccatgggcattaaggcaaagtagttccagtgatttaaaatacggttccaaatacgctaaaaccaacttgtgccaaccagatttacagattggaaatactgcagatgatgtgaagttatcagttggaggagctgtgattaagctggataataagagaacgtgccatctgtaaagcactcagaaggcagccatccctagatgttggtttcatgtatattacactatctactactatccataaatgcaataatatgcatgttaacaacattaaaaacagcaaacagcaatctaagtacagaaaagctttttgtgtgtttaaaaaaattgaagaaaattcaggaagaaacgtgttaataaacattgtactgttcttttgcttctcaaaggaattattcacttgccactttggttatttttgagttttcgtacataggaagttttatattgccagccttcctgtgataaagatattaaatgtaacttgagtaaaaaataaaaaagaataactatgtaaaaaaaaaaaaaaaaaa

SEQ ID NO: 6536 - DNA, 5445 bp, Homo Sapiens
  NM_170686
aaagcgccagctgaggggccgctgcgggtggagtgcggcggagtcggcctcgcgaccccagcttgatccgccgcctgctgcaccgcgcctccgccgcgttcctgcgcgtcccgagccccgacggccgcgtgagtcccgtccgtgcggggaaggcagggccgggtcggcgccgcctgtggagaggacccggcggccgggcctgcttggagccgggcgcggtggcagcggcggcagcggcggcgacttccgaggcccgggctagacagcgcagggccatggctgaggcggccccggccccgacatctgaatgggactccgagtgccttacatccctgcagccccttcctcttcctacacccccagcagcaaatgaggcacacctgcagacagcagctatctctctgtggacagtggtggccgccgtgcaggctatagagaggaaggtggagatccacagccggcgactcctacacctggaaggtcggacagggacagcagagaagaaactagccagctgtgaaaagacagttaccgagcttgggaaccagctggagggcaagtgggccgtgctgggaaccctgctgcaggagtacgggctgctgcagaggcggctggagaacttggagaacctgctgcgcaacaggaacttctggatcctgcggctccctccaggtattaagggagatatcccaaaggtgcctgtggcatttgatgatgtctccatctacttttccactccagagtgggaaaaattagaagaatggcaaaaggaactttacaagaatatcatgaagggcaactacgagtctctcatctccatggattatgctataaatcaacctgatgtcttatctcagattcaaccagaaggggaacataatacagaggaccaggcagggccagaggaaagtgagattcccacagaccccagtgaagagcctggtatttcaacatcagatattctgtcttggattaaacaagaagaagagcctcaggttggggccccaccggagtccaaggagagtgacgtgtacaaaagcacttatgctgatgaagagcttgtcatcaaagctgaaggccttgctagatcctcgttgtgccctgaggttccagtccctttctcttctccaccagcagcagcaaaggatgctttttcagatgtggctttcaaaagccagcagtctacatccatgacaccttttggacgtccagccactgacctgcctgaagcctctgagggacaagtgacttttactcagttgggtagctatcccctcccacctccagttggcgagcaggtgttctcatgccaccactgtggcaagaatctcagccaagacatgttgctgacccaccaatgtagccatgctactgagcaccccttaccctgtgcccagtgccctaagcactttactccacaggcggacctcagcagcacctcccaggaccatgccagcgagacaccccccacctgcccacactgtgccaggacttttactcacccatcaagacttacctaccatcttcgggtccataacagcactgagcgtcctttcccctgtcctgattgccccaagcgctttgctgaccaggctcgactcaccagccaccggagagctcatgcaagcgaaaggcccttccgctgtgcccagtgcggcaggagcttcagcttgaaaatcagcctcctgctccaccagcggggtcatgcacaagagcgccctttctcctgccctcagtgtggcattgacttcaacggccactcggccctgatccgccaccagatgatccacacaggcgagcgtccttacccctgcactgactgcagtaagagcttcatgcgcaaggagcacctgctgaaccaccggcggctgcacacaggcgagcggcccttcagttgtcctcactgtggcaagagcttcatccgcaagcaccacctaatgaaacaccagcgcatccacaccggggagcggccctacccctgctcctactgtggcaggagcttccgctacaaacagacactcaaggaccacctccgttcaggccacaatggaggctgtgggggtgatagtgacccatcaggtcagccacccaacccaccaggtcccctcataactgggcttgaaacttctggcctgggtgtcaacactgaaggtctagagaccaaccagtggtatggggaagggagtggagggggagttttgtaaatccaaatctctgtggcttcatgcttgtatatgctcacagcagggcacaaaatccaagagaaggtctgtgagccccatccaacacccacagtaattattatctggcacatcaatgaatttggggtcctatacacttgactagagacatgcttgtgttttggaatttcacacccttacaagaataccacattttgaaacccagaaagacctggaaaggagcccagcatgtccatcttttcaaagatacaacaaaagcagaagttacaagaatattgcggagaggttggaaagcaggatttaacctctagttctcttgttctcagagaacagcaggttgatagtagattatgtctctaggtagagacagatacatgagaagagcctccaaaactggaagcccatcataaggcatgagaatgtttaactataaagccttttattagttctttgatagctaagatggttgttggagaaagtgcttaagccactgtttatgttgctgcctcctctctcaaaaccagccaagatctgttcacacacctctgtggctgtctttccctgaaacatggtaactcaagactgcctgcctaggtttcttagattaattattcacataaattttgtttaatattggttgaacaagaaatctgactttaaaagattattaaggagaatattccttaactatactggcttgatttgaaacaggctcttattgccatttaaactgccagaaatctttgccaaggtcctggttaaaaaaattggaaacggttttcttagccccagctttaaaagctagagatctcagagaaatagctggcttaacaatgacagaacagcttaaaatttgtgcctacaccatgttctgagagtcgttcacatcaaattcttatcttttccaagccagtaagttggcttctccattcctggtgtctgatattcttgacaatcatcagcaacaaagatcacagcactttccagaagcatggagcttcagaaagtgccagtgaactcttggtcctcagtagtgagatgataacagtgttataatgcagcttccttgagccatcagagagagtgtatgttcaccctatctggctgtatcccattggcagtggacagattgaggaaattcctagatcactgagagctaagcaccatgcatagacaacagtttgttcttgcctgtgttgcttttagggactttgactaccacatgttcttttcttggggtgatttaatcacctgggagcatctgagtctgctcctaagtggctttgcaactgggcctaagttctgtttcctttatggatctcaaattttcatctgcacaatgaggctgttgaaaggaaaaaaagtgagcctctaggaattattcaaaaaaagtctgtgatacattccttttcctgccaaagttctgtctctgtctttggcttctgtccaggcaaagctaaataagacagcaaagtcaaagcagataaattcttgttgaaacttgactaaaatttatttgatttgttgttttactcccacttggaatcctgaggtagaagacagaatgcagaagtcttacatcttgggcaggaaactggtttattcctatactcttgtttcctctgcttcttcctgaggtctagaacaaggtctggaaatgtttagacaggatattttcttgatgaagtgataaggaaaggacccatttttttgctcatcacctagcccatccttcactctctctagttatgcataacaacactagaagaaggtgttagcccagctaactttgcttctgggaaggctatgtctgaacatgttgctctgtaggataatcacacttagaaaacatctgctccatgacattcacaataccagggaccatgggagacacaagaaatgtgtgtctgctgtcataacttacagtgaaaaagcccaataatacagaacaagacatgatgggcaataccctagcatattgggattaagagctttctagccagaatctggacctataccatgggaaaatttaggggtgctgggaatcccaaagccaaggttctggcttcattggcaacccactaggaacttgaatgtgagattcagctctagtttgcaccttgatttccccagtgaaaagggagaagagccaaagtattgtctaggtgctgagttcccttttctgagtggatttcaagcatttgccagggtatgctggaggagggactcctaaagtaggtgagatgtgggactaggtaacactttaaatacttttttactcaaagatttgccaagaacacagcttattagtgaaagagacctgtggattgaaatggctgcagatagatcccgcagtcccttctgaaaggaactgtgtagccagcagggacctaaactttggcaaaaagtgaacacaattcaaatacgaatgaaggaagagccctcagatggaacgaaaggcgatgtgcaaggccatcccagagagacggaagcaggtgcgatactaagcctcagcccaagaataaaagagagttcaactgttactcttttctttcatcaatcccctatcagttagaactgcaggccagttccaaagagtgtttgcttaagattcaaaagtgggtaagtaaaatggatcagtgggaaggataaggtgtccaacagaaagtgtggaggagaaactcttggcctatcaagtgctcctgagagaaaccatgcaatttaacacttcagttaaagaaatacatgagaactgcttgtcatgaccagacaagataggaaaggggaaaccccagaaacgtgctcttcatctgtcagccttttggaccaagaagctgtcactatcacacataagcaccattcccttagagtggatccaggtgttgactataaccagatttactctttgcttactaggttttccattgtcaccattggatgaacctctggtttagccacagttgtgaaaataaatggaagttggttgattgtctagaaagtgcaagaagatggccctgctccttttctgctgaacatttagtattggaaactcctacttcccttttcattaataatgtgtgcaagtttcctattagcggggaaggtgtggggctctgctgggcttctcttgagcatatctgagaagtgatgttcatgtctatctcaaccaggaccagaccctgtgacttactcggtaataacagtccacacaagcctcgttgatattaaaaaaaaaaaaaaaaaa

SEQ ID NO: 6537 - DNA, 1346 bp, Homo Sapiens
  NM_170694
tggaactgcaggatacactcccctcctgctacctaggcaggcgtgagggtgtgacggccgcgcattcgccagacgagagcgatggctgagaacgccgcaccaggtctgatctcagagctgaagctggctgtgccctggggccacatcgcagccaaagcctggggctccctgcagggccctccagttctctgcctgcacggctggctggacaatgccagctccttcgacagactcatccctcttctcccgcaagacttttattacgttgccatggatttcggaggtcatgggctctcgtcccattacagcccaggtgtcccatattacctccagacttttgtgagtgagatccgaagagttgtggcagccttgaaatggaatcgattctccattctgggccacagcttcggtggcgtcgtgggcggaatgtttttctgtaccttccccgagatggtggataaacttatcttgctggacacgccgctctttctcctggaatcagatgaaatggagaacttgctgacctacaagcggagagccatagagcacgtgctgcaggtagaggcctcccaggagccctcgcacgtgttcagcctgaagcagctgctgcagaggcagagaacagcattgacttcgtcagcagggagctgtgtgcgcattccatcaggaagctgcaggcccatgtcctgttgatcaaagcagtccacggatattttgatccaagagagaattactctgacaaggagtccctgtcgttcatgatagacacaatgaaatccaccctcaaagaggactacttcggatacaatcacagcaaccctggcctcggccctgccctgtccctgccatgcaacttcacaactcagctggcctagacccctgggaggcctccaagtccctaagcggttccagtttgtggaagtcccaggcaatcactgtgtccacatgagcgaaccccagcacgtggccagtatcatcagctccttcttacagtgcacacacacgctcccagcccagctgtagctctgggcctggaactatgaagacctagtgctcccagactcaacactgggactctgagttcctgagccccacaacaaggccagggatggtggggacaggcctcactagtcttgaggcccagcctaggatggtagtcaggggaaggagcgagattccaacttcaacatctgtgacctcaagggggagacagagtctgggttccagggctgctgtctcctggctaataatctccagccagctggaggaaggaagggcgggctgggcccacctagcctttccctgctgcccaactggatggaaaataaaaggttcttgtattctca

SEQ ID NO: 6538 - DNA, 2076 bp, Homo Sapiens
  NM_170695
acattctttcagacccggcccgctgcggggcgttcctggggggtagcctcaaggccagcggggttccttcggctgcgtttctgtgggaggccctgaaacgcgcggagcttccctctgcctccaggctttcccagcgagagtgaaattaaacttgaaactcggatcaactggcagtcgttgttggtagaacgccctaaggacccctccccgcgggacggagggaggactcgggacagggaattggccctgggagaaaacgcgcggggggcgtccgagacgccccgtgaaagccgtgccgacccttgggaggactgacaggtctagagacacgcgctgtctgttgtggtgggcctcccgggaataagtgaggggctctgtgtttcgaggatggttctagcgcagagccgggtgtctgccggggtgggctccccgcattgttcgggctccggcgggggcggctctgattcctttccatggcccgcctcccaccccgggaatccccagtgctccttttccacggcttttctggcgtccccccgactctcccgcggcactttggcctaccttcccccagcgccgtggtcctccctggcgaccccctctgcgctcctggggtcctcctgcgccccccctcctccaccggcgcgctgcccacagccgcgtgccctctccccggagctggggaccaaggctgggccccgccggccgcatcggtgggaacttccgcggtccccatcccagggcgcacagggtccagctcctcggcgccgactcctggaaacaatgaaaggtattgttgcagcatctggcagtgagactgaggatgaggacagcatggacattcccttggacctttcttcatccgctggctcaggcaagagaaggagaaggggcaacctacccaaggagtctgtgcagattcttcgggattggctgtatgagcaccgttacaatgcctatccttcagagcaagaaaaagcgttgctgtcccagcaaacacacctgtctacgctacaggtctgtaactggttcatcaacgcccgccgcaggctcctccctgacatgctgagaaaggatggcaaagatccaaatcagttcacaatttcccgccgtggggccaagatttctgaaacgagctctgtggagtccgtgatgggcatcaaaaacttcatgccagctctagaggagaccccatttcattcctgtacagctgggccaaacccaaccctagggaggccactgtctcctaagccgtcatccccgggatcagttttggctcgtccatcagtgatctgccataccactgtgactgcattgaaagatgtccctttctctctctgccagtcggtcggtgtgggacaaaacacagatatacagcagatagcggccaaaaacttcacagacacctctctcatgtacccagaggacacttgtaaatctggaccaagtacgaatacacagagtggtcttttcaacactcctccccctactccaccggacctcaaccaggacttcagtggatttcagcttctagtggatgttgcactcaaacgggctgcagagatggagcttcaggcaaaacttacagcttaacccattttcaagcaaaacagttctcagaaatgtcatgattgccggggtgaaggcaagagatgaattgcattattttatatattttttattaatatttgcacatgggattgctaaaacagcttcctgttactgagatgtcttcaatggaatacagtcattccaagaactataaacttaaagctactgtagaaacaaagggttttcttttttaaatgtttcttggtagattattcataatgtgagatggttcccaatatcatgtgattttttttttcctccccttccctttttttgttattttttcagactgtgcaatacttagagaacctatagcatcttctcattcccatgtggaacaggatgcccacatactgtctaattaataaattttccattttttttcaaacaagtatgaatctagttggttgatgccttttttttcatgacataataaagtattttctttaaaaaaaaaaaaaaaaa

SEQ ID NO: 6539 - DNA, 1402 bp, Homo Sapiens
  NM_170699
gagaacccagacgggcagagcctgggtaggagagcctggccccgctgtccccactgggtggagacaccatgcacttggtccacttgtgctcttcagccaggacaccagacatggtccaaaccgctgcagggctggctgcagcaactccctgacactcaggaaggcccaggctgggcaggcaatacctgctcccaacagccatgcatgccggctgccgctccaggactcccctgtccccaggaccaagatgacgcccaacagcactggcgaggtgcccagccccattcccaagggggctttggggctctccctggccctggcaagcctcatcatcaccgcgaacctgctcctagccctgggcatcgcctgggaccgccgcctgcgcagcccacctgctggctgcttcttcctgagcctactgctggctgggctgctcacgggtctggcattgcccacattgccagggctgtggaaccagagtcgccggggttactggtcctgcctcctcgtctacttggctcccaacttctccttcctctccctgcttgccaacctcttgctggtgcacggggagcgctacatggcagtcctgaggccactccagccccctgggagcattcggctggccctgctcctcacctgggctggtcccctgctctttgccagtctgcccgctctggggtggaaccactggacccctggtgccaactgcagctcccaggctatcttcccagccccctacctgtacctcgaagtctatgggctcctgctgcccgccgtgggtgctgctgccttcctctctgtccgcgtgctggccactgcccaccgccagctgcaggacatctgccggctggagcgggcagtgtgccgcgatgagccctccgccctggcccgggcccttacctggaggcaggcaagggcacaggctggagccatgctgctcttcgggctgtgctgggggccctacgtggccacactgctcctctcagtcctggcctatgagcagcgcccgccactggggcctgggacactgttgtccctcctctccctaggaagtgccagtgcagcggcagtgcccgtagccatggggctgggcgatcagcgctacacagccccctggagggcagccgcccaaaggtgcctgcaggggctgtggggaagagcctcccgggacagtcccggccccagcattgcctaccacccaagcagccaaagcagtgtcgacctggacttgaactaaaggaagggcctctgctgactcctaccagagcatccgtccagctcagccatccagcctgtctctaccgggccccacttctctggatcagagaccctgcctctgtttgaccccgcactgactgaataaagctcctctggccgttaaaaaaaaaaaaaaaaaaaa

SEQ ID NO: 6540 - DNA, 2274 bp, Homo Sapiens
  NM_170711
cgcgcggtgaccgttggcgccgaggggaggaggcagccgccgccgccgccgccgccgccgccgccgccgccgccgccgttgcgcagatccgggccgcggctgtggggagggcgacggagcgggtgaccttccggaggcgggagcgagcgaggaggcccgggagcgccgagcgtcgccgccgccgccgccatgaacaactcgggcgccgacgagatcgggaagctcttcgtgggcggtcttgactggagcacgacccaagagactctgcgcagctacttttcccaatatggagaagtcgtagattgtgttatcatgaaagataaaaccaccaaccagtctcgaggctttgggtttgtcaaatttaaagacccaaactgtgtggggacggtgctggccagcagaccgcacacgctagatggccgaaacatcgaccccaagccatgcacaccccgggggatgcagccggagagaacacggccgaaggaaggatggcagaaaggacccaggagcgataacagtaaatcaaataagatatttgtcggtggaattcctcacaattgtggtgagacagagctcagggaatacttcaagaagttcggagtggtcacggaggtagtcatgatctatgacgccgagaagcagaggccccgaggttttggatttattactttcgaggacgaacaatcagtggaccaggctgtcaacatgcattttcacgacatcatgggcaaaaaagtggaagttaaacgagctgagcctcgggacagcaagagccaagcgccgggacagccaggtgccagccagtgggggagccgggttgtgcccaacgctgccaatggctgggcaggccagcccccgcccacgtggcagcaaggatatggcccgcaaggaatgtgggtgccggcaggacaggcgattggtggctatggaccgccccctgcaggaagaggagcccccccgccacccccaccgttcacctcctacatcgtgtccacccctcctggaggctttccccctccccagggcttccctcagggctacggtgccccgccacagttcagttttggctacgggcctccacctccaccgccagatcagtttgcccctccgggggttcctcctccaccagccactcccggggcagcacctctggctttcccaccgcctccgtctcaggctgccccggacatgagcaagcccccgacagctcagccagacttcccctatggtcagtatggcctgggttcctattctccagccccgccgggctgcggcccacactttgtttacagtcttatggtcaggctgagcagtgatgtggcctagcaggttacgggcaggacttgagtggcttcggacagggcttctcagaccccagccagcagcctccttcctacgggggtccctccgtgccagggtcggggggcccccccgccggcggcagcggctttggacgagggcagaaccacaacgtgcaagggttccacccctaccgacgctagcccgcggcgccgcgacgtctgcacggcccagacccaggattccaaacttgtgaactcgtgacaatcacaaacttggcggcaaagtggcgactcaaccttgggggggggggcggggggagggcgcgaggcttttggagcggctgtgggtgtcgtctggactgaggtttttaaatatttctttctctaacccatcagcacaataaaaaaaagtcactggttcaacaacagggtttaaaaaaaatgtcttcagctttaattcaaaacttcaggtttctttttcttccttttttttggaaattattttcctgagccttttgttttacggtatattgtaaacttttatgttaaagaaaaaatatacatttacaaattgtgagatttttaagagaaattttctacgatgtatactggcttattttttaatttaaaacggggtttccgtcggcactggtggagggggtgcgctgttagtcccctcgctcctggctttgggggttgggacttggtggtccagaaactctgggagcttctagaagaaatctactgagtgtatttctgttttttgtttaattccttgcttttgtcgactgacctgcttggtagtgtctgaggtgaactgtgggggttgcgcacagccagccgcgtggatcccacgcagcgctgaaccgaaccgagtaggaagcctttctccccaggcacgtggcttcagggcgtttcccattgaccagtttgaccctggtttgaataaagagaagtgcgtttggattagaaa

SEQ ID NO: 6541 - DNA, 1676 bp, Homo Sapiens
  NM_170712
caactgttgagcaggcctctctgcctgtggccttccggccggtttccagacgcccaggtggccaacattagagtccgcgtagcagtgtgagattgcaagttcacctgccactaccgctgccgcgcgctcgtctgcctggactgttgcgggccccgggacctgggctgggaacccgcggtggagcgggacacgaacgtggacgagcctgtggagtgggagacacctgacctttctcaagctgagattgagcagaagatcaaggagtacaatgcccagatcaacagcaacctcttcatgagcttgaacaaggacggttcttacacaggcttcatcaaggttcagctgaagctggtgcgccctgtctctgtgccctccagcaagaagccaccctccttgcaggatgcccggcggggcccaggacggggcacaagtgtcaggcgccgcacttccttttacctgcccaaggatgctgtcaagcacctgcatgtgctgtcacgcacaagggcacgtgaagtcattgaggccctgctgcgaaagttcttggtggtggatgacccccgcaagtttgcactctttgagcgcgctgagcgtcacggccaagtgtacttgcggaagctgttggatgatgagcagcccctgcggctgcggctcctggcagggcccagtgacaaggccctgagctttgtcctgaaggaaaatgactctggggaggtgaactgggacgccttcagcatgcctgaactacataacttcctacgtatcctgcagcgggaggaggaggagcacctccgccagatcctgcagaagtactcctattgccgccagaagatccaagaggccctgcacgcctgcccccttgggtgacctcttgtacccccaggtggaaggcagacagcaggcagcgccaagtgcgtgccgtgtgagtgtgacagggccagtggggcctgtggaatgagtgtgcatggaggccctcctgtgctgggggaatgagcccagagaacagcgaagtagcttgctccctgtgtccacctgtgggtgtagccaggtatggctctgcacccctctgccctcattactgggccttagtgggccagggctgccctgagaagctgctccaggcctgcagcaggagtggtgcagacagaagtctcctcaatttttgtctcagaagtgaaaatcttggagaccctgcaaacagaacagggtcatgtttgcaggggtgacggccctcatctatgaggaaaggttttggatcttgaatgtggtctcaggatatccttatcagagctaagggtgggtgctcagaataaggcaggcattgaggaagagtcttggtttctctctacagtgccaactcctcacacaccctgaggtcagggagtgctggctcacagtacagcatgtgccttaatgcttcatatgaggaggatgtccctgggccagggtctgtgtgaatgtgggcactggcccaggttcataccttatttgctaatcaaagccagggtctctccctcaggtgttttttatgaagtgcgtgaatgtatgtaatgtgtggtggcctcagctgaatgcctcctgtggggaaaggggttggggtgacagtcatcatcagggcctggggcctgagagaattggctcaataaagatttcaagatcctcaaaaaaaaaaaaaaaaa

SEQ ID NO: 6542 - DNA, 1770 bp, Homo Sapiens
  NM_170713
gcgatctacgtttcagtcttaacggttgcggcgcggctctggcccgggcgcacgcgcacactgacacgcgtacacgcacgcacgcgaccggggcggtggttggcggctacggacgcgcaggactgggggacgggcgggtacggctatgggcgaggcggaggcgccttctttcgaaatgacctggagcagcacgacgagcagtggctactgcagccaagaggactcggactcggagctcgagcagtacttcaccgcgcgaacctcgctagctcgcaggccgcgccgggaccaggacgagcctgtggagtgggagacacctgacctttctcaagctgagattgagcagaagatcaaggagtacaatgcccagatcaacagcaacctcttcatgagcttgaacaaggacggttcttacacaggcttcatcaaggttcagctgaagctggtgcgccctgtctctgtgccctccagcaagaagccaccctccttgcaggatgcccggcggggcccaggacggggcacaagtgtcaggcgccgcacttccttttacctgcccaaggatgctgtcaagcacctgcatgtgctgtcacgcacaagggcacgtgaagtcattgaggccctgctgcgaaagttcttggtggtggatgacccccgcaagtttgcactctttgagcgcgctgagcgtcacggccaagtgtacttgcggaagctgttggatgatgagcagcccctgcggctgcggctcctggcagggcccagtgacaaggccctgagctttgtcctgaaggaaaatgactctggggaggtgaactgggacgccttcagcatgcctgaactacataacttcctacgtatcctgcagcgggaggaggaggagcacctccgccagatcctgcagaagtactcctattgccgccagaagatccaagaggccctgcacgcctgcccccttgggtgacctcttgtacccccaggtggaaggcagacagcaggcagcgccaagtgcgtgccgtgtgagtgtgacagggccagtggggcctgtggaatgagtgtgcatggaggccctcctgtgctgggggaatgagcccagagaacagcgaagtagcttgctccctgtgtccacctgtgggtgtagccaggtatggctctgcacccctctgccctcattactgggccttagtgggccagggctgccctgagaagctgctccaggcctgcagcaggagtggtgcagacagaagtctcctcaatttttgtctcagaagtgaaaatcttggagaccctgcaaacagaacagggtcatgtttgcaggggtgacggccctcatctatgaggaaaggttttggatcttgaatgtggtctcaggatatccttatcagagctaagggtgggtgctcagaataaggcaggcattgaggaagagtcttggtttctctctacagtgccaactcctcacacaccctgaggtcagggagtgctggctcacagtacagcatgtgccttaatgcttcatatgaggaggatgtccctgggccagggtctgtgtgaatgtgggcactggcccaggttcataccttatttgctaatcaaagccagggtctctccctcaggtgttttttatgaagtgcgtgaatgtatgtaatgtgtggtggcctcagctgaatgcctcctgtggggaaaggggttggggtgacagtcatcatcagggcctggggcctgagagaattggctcaataaagatttcaagatcctcaaaaaaaaaaaaaaaaa

SEQ ID NO: 6543 - DNA, 2151 bp, Homo Sapiens
  NM_170721
gctttccttttagcttttgtaagttacacgtcaaaatggccgatctgacatcggtgctcacttctgttatgttttctccctctagtaaaatgtttatcggtggactgagctggcagacctcaccagatagccttagagactattttagcaaatttggagaaattagagaatgtatggtcatgagagatcccactacgaaacgctccagaggcttcggtttcgtcacgttcgcagacccagcaagtgtagataaagtattaggtcagccccaccatgagttagattccaagacgattgaccccaaagttgcatttcctcgtcgagcgcaacccaagatggtcacaagaacaaagaaaatatttgtaggcgggttatctgcgaacacagtagtggaagatgtaaagcaatatttcgagcagtttggcaaggtggaagatgcaatgctgatgtttgataaaactaccaacaggcacagagggtttggctttgtcacttttgagaatgaagatgttgtggagaaagtctgtgagattcatttccatgaaatcaataataaaatggtagaatgtaagaaagctcagccgaaagaagtcatgttcccacctgggacaagaggccgggcccggggactgccttacaccatggacgcgttcatgcttggcatggggatgctgggatatcccaacttcgtggcgacctatggccgtggctaccccggatttgctccaagctatggctatcagttcccagactatttgccggtttcacaagacataatttttatcaactagctcttaagagaggcatagcaaagtgggggttgctaccatttctagagagagaggacacagtcccggcctgggctgcccccgctccagtcaatgctcactgaaagtctgtcttagctgcctgtttgaatgactgttctttttctcatttttaattcttggactcatgtcctcattgcttcactcaattaaaaaaaaattattctccagtcccctcccactttgcttcttgtatgcattgtgaccgaccccacttcctcagaatgtaacggggccagagggaaacttctcacaaacttcgtagagcctcctcaggggaagctaggaagaagacatcaaatgtttttaagtcatgaccaaacaggcttgttggggacatatcatggggtgagctttgaagtgctggtggtccagaggggttgcagatacgtgacttggagcacccgtgtcttacgatggacagtgataaaggtgaacacacagagacagactattctctaagaatgtgagaaacctgatctggaagaggagctatataaacactatctgactatctttgtcttttggggccagtggctgttggcataatcacaagcctgtctgtcttcgagaagggacagtggagtcatccaggtgctgccacatgacaggcacggtgggcaccgatccacagtgggccccgccttccccagctcgcctccctgcctgtgctggcctggccttgcctgctggcaccattggagtaggagggggtggaacacagggggcccatcctgatcaggccccatctcaaggttggcactcctgcccatcacccttagaaggatcttttcccatggcttgacttccttcatttccctaactgaaatacacccactctcttggaataatgacgtaccactcagttggaccctcaagagtcactgctttgtctgtgctggtagtttgtgagaagtgacccgcacgcttccatttgatgcatttgatgtgagtgaatccatacatttgaatgtcattgtccttgagaccctacatgtgcagtttggctcatctcattaaagatgcttgatgtaataattggttagtttccttttattttcctgcaggcttttccatgagtattatttttttcaaagaacaaatctgtatggcttttccccatctccatattttgttttgctatgaattgctttgctttggtgaacttgtcctagtatgcttgcctcacaaacgttttagccattgtgaattttcttcatctctgtaaatagttcatctgtgcttctccctgatgacgttttattttttttcccctgtaagcaaccgaggtagaaaaataaattgtttaccatggaaaaaaaaa

SEQ ID NO: 6544 - DNA, 2919 bp, Homo Sapiens
  NM_170736
ctcctctgcccaatgtctcccaatctctttcctttctctcttcagttcctccaggtaattcttactcaaacttgtaccaacttgtttttgactgacagtgaacagtgagagagttttcttcattttgaggaaccctaaacacctatctttcccaaggcaacctgtctggactgagcatttctctgacttgacataacttcccatccagccaggagtctgcactcttcagtctttgcaggcagtagcagaatcccatggtagccaggtgggtgaaggggagcgaggacgttctacctgccttgaagaagacacctgacctgcggagtgagtgaccagtgtttccagagcctggcaatggatgccattcacatcggcatgtccagcacccccctggtgaagcacactgctggggctgggctcaaggccaacagaccccgcgtcatgtccaagagtgggcacagcaacgtgagaattgacaaagtggatggcatatacctactctacctgcaagacctgtggaccacagttatcgacatgaagtggagatacaaactcaccctgttcgctgccacttttgtgatgacctggttcctttttggagtcatctactatgccatcgcgtttattcatggggacttagaacccggtgagcccatttcaaatcataccccctgcatcatgaaagtggactctctcactggggcgtttctcttttccctggaatcccagacaaccattggctatggagtccgttccatcacagaggaatgtcctcatgccatcttcctgttggttgctcagttggtcatcacgaccttgattgagatcttcatcaccggaaccttcctggccaaaatcgccagacccaaaaagcgggctgagaccatcaagttcagccactgtgcagtcatcaccaagcagaatgggaagctgtgcttggtgattcaggtagccaatatgaggaagagcctcttgattcagtgccagctctctggcaagctcctgcagacccacgtcaccaaggagggggagcggattctcctcaaccaagccactgtcaaattccacgtggactcctcctctgagagccccttcctcattctgcccatgacattctaccatgtgctggatgagacgagccccctgagagacctcacaccccaaaacctaaaggagaaggagtttgagcttgtggtcctcctcaatgccactgtggaatccaccagcgctgtctgccagagccgaacatcttatatcccagaggaaatctactggggttttgagtttgtgcctgtggtatctctctccaaaaatggaaaatatgtggctgatttcagtcagtttgaacagattcggaaaagcccagattgcacattttactgtgcagattctgagaaacagcaactcgaggagaagtacaggcaggaggatcagagggaaagagaactgaggacacttttattacaacagagcaatgtctgatcacaggggcgccatccaggtttaaccctgcaagctgtttccacatcagaactcccttcaaacacaaagattgctgtgaaaacgaaaatgtgtagacgcactctcaaaaactgcacggacatacaaaatcaatcttttcctttgatcttgtggctaaaccagcatttctgtgtttgagagatttcctgttaggtgcttcgtctgaaagtgaactctcataattcaaattgtataaaataaagctacatttctaagagcttggtgtagggcaattggaataatgtcctgttagataaacagacatttagcaatcctgacattaaaaggaaatgtatttctatacaagattattagctgtaatacaagatatttatttaaccaatgaccttatggctgagagttgaattgtggttcagtattcattgatctcactgctttaaaacatgctctttttgttcaagcaggaaaaatattatatctaattatgtctatgtggtaatacctaaaaagaggtagagagactctatgttcacaaaatatagtaatttcatttttacctttcttcagtggactgaattgtatggaaggaaattgatcagatctgtaattcacaactgtggaaacctacacaaatggggctgatgccattgtttcctctattttattttatttatttttgaatccactatctctttccattcaaaatatttccattcaaaatgtggttcacagacccgccacatcagcaccatccgagagcttattagtaatgtgtagattctcatgtcccagccagacttacagaattggggtctgtatcttaacaagaaccccagatgatttgtgtacaaatgaaagttcgaaagctgtgctctggacagtgttctcaaagcaactttctgaagccgtgtggaaaactgactctgtgtgggtcccgtatccctgtggcatccagacctggcctctcttcatttcattattattggccaatatttctttcagccatttcatttcttatctattaaaatggcttgcccataaaggaactgcataggattatcccctgacattccaagagcaaaataaagctcttgagagtaattgttgtctcagtcatgcttgctgattacagttagcacaaaagaaaaattcagctgcctgacaatacaggaaatgttctcagatgctgatgtttgtaaggtccggtggggccatgaggaagaagaggagctgaaggtaagaaactcataaacaagatgactctttgatgcatgaacaagatttgaaaatctcaagcctgtaaagaatacccctgctatttaaataaagctcataccaagaggtaacattttgccccgggccaaattcaggggtctagtgccctgcattcctttgaggcaaaaaataaatgggctatgactggttaaatgtccaaaa

SEQ ID NO: 6545 - DNA, 2732 bp, Homo Sapiens
  NM_170737
cagatctctgggatcttcagctgagattgggccccagcacctggactcaaggcagtagcagaatcccatggtagccaggtgggtgaaggggagcgaggacgttctacctgccttgaagaagacacctgacctgcggagtgagtgaccagtgtttccagagcctggcaatggatgccattcacatcggcatgtccagcacccccctggtgaagcacactgctggggctgggctcaaggccaacagaccccgcgtcatgtccaagagtgggcacagcaacgtgagaattgacaaagtggatggcatatacctactctacctgcaagacctgtggaccacagttatcgacatgaagtggagatacaaactcaccctgttcgctgccacttttgtgatgacctggttcctttttggagtcatctactatgccatcgcgtttattcatggggacttagaacccggtgagcccatttcaaatcataccccctgcatcatgaaagtggactctctcactggggcgtttctcttttccctggaatcccagacaaccattggctatggagtccgttccatcacagaggaatgtcctcatgccatcttcctgttggttgctcagttggtcatcacgaccttgattgagatcttcatcaccggaaccttcctggccaaaatcgccagacccaaaaagcgggctgagaccatcaagttcagccactgtgcagtcatcaccaagcagaatgggaagctgtgcttggtgattcaggtagccaatatgaggaagagcctcttgattcagtgccagctctctggcaagctcctgcagacccacgtcaccaaggagggggagcggattctcctcaaccaagccactgtcaaattccacgtggactcctcctctgagagccccttcctcattctgcccatgacattctaccatgtgctggatgagacgagccccctgagagacctcacaccccaaaacctaaaggagaaggagtttgagcttgtggtcctcctcaatgccactgtggaatccaccagcgctgtctgccagagccgaacatcttatatcccagaggaaatctactggggttttgagtttgtgcctgtggtatctctctccaaaaatggaaaatatgtggctgatttcagtcagtttgaacagattcggaaaagcccagattgcacattttactgtgcagattctgagaaacagcaactcgaggagaagtacaggcaggaggatcagagggaaagagaactgaggacacttttattacaacagagcaatgtctgatcacaggggcgccatccaggtttaaccctgcaagctgtttccacatcagaactcccttcaaacacaaagattgctgtgaaaacgaaaatgtgtagacgcactctcaaaaactgcacggacatacaaaatcaatcttttcctttgatcttgtggctaaaccagcatttctgtgtttgagagatttcctgttaggtgcttcgtctgaaagtgaactctcataattcaaattgtataaaataaagctacatttctaagagcttggtgtagggcaattggaataatgtcctgttagataaacagacatttagcaatcctgacattaaaaggaaatgtatttctatacaagattattagctgtaatacaagatatttatttaaccaatgaccttatggctgagagttgaattgtggttcagtattcattgatctcactgctttaaaacatgctctttttgttcaagcaggaaaaatattatatctaattatgtctatgtggtaatacctaaaaagaggtagagagactctatgttcacaaaatatagtaatttcatttttacctttcttcagtggactgaattgtatggaaggaaattgatcagatctgtaattcacaactgtggaaacctacacaaatggggctgatgccattgtttcctctattttattttatttatttttgaatccactatctctttccattcaaaatatttccattcaaaatgtggttcacagacccgccacatcagcaccatccgagagcttattagtaatgtgtagattctcatgtcccagccagacttacagaattggggtctgtatcttaacaagaaccccagatgatttgtgtacaaatgaaagttcgaaagctgtgctctggacagtgttctcaaagcaactttctgaagccgtgtggaaaactgactctgtgtgggtcccgtatccctgtggcatccagacctggcctctcttcatttcattattattggccaatatttctttcagccatttcatttcttatctattaaaatggcttgcccataaaggaactgcataggattatcccctgacattccaagagcaaaataaagctcttgagagtaattgttgtctcagtcatgcttgctgattacagttagcacaaaagaaaaattcagctgcctgacaatacaggaaatgttctcagatgctgatgtttgtaaggtccggtggggccatgaggaagaagaggagctgaaggtaagaaactcataaacaagatgactctttgatgcatgaacaagatttgaaaatctcaagcctgtaaagaatacccctgctatttaaataaagctcataccaagaggtaacattttgccccgggccaaattcaggggtctagtgccctgcattcctttgaggcaaaaaataaatgggctatgactggttaaatgtccaaaa

SEQ ID NO: 6546 - DNA, 1532 bp, Homo Sapiens
  NM_170738
cttgacctctggcccaagatggtggcgcccagagcttcgctcttgctgctcccctgaggtgaactgaagccagcagccccgcatcatgtcaaagctcggccgggccgcccggggcctcaggaagcccgagagaggcgtttccatcaaccagttttgcaaggagttcaatgagaggacaaaggacatcaaggaaggcattcctctgcctaccaagattttagtgaagcctgacaggacatttgaaattaagattggacagcccactgtttcctacttcctgaaggcagcagctgggattgaaaagggggcccggcaaacagggaaagaggtggcaggcctggtgaccttgaagcatgtgtatgagattgcccgcatcaaagctcaggatgaggcatttgccctgcaggatgtacccctgtcgtctgttgtccgctccatcatcgggtctgcccgttctctgggcattcgcgtggtgaaggacctcagttcagaagagcttgcagctttccagaaggaacgagccatcttcctggctgctcagaaggaggcagatttggctgcccaagaagaagctgccaagaagtgacccttgccccaccaactcccagatttcaaaggaggtagttgcaaaagctgtgcccaaggggaggaaggaggtcacaccaatatgatgatggttttcatgactttgaatgatatatttttgtacatctagctgtatcgaggcatcaggcctgaataaacatcctttcttacccactgtcatcttctatcttgggacctcagggaagggaaccagtactggtggtagccaatatgggcagacattaggaaattggggtcttcatactgcttctcagatgtgcaaactgaggttcagccaagcaaagtaacttgcccaggtccttttttttcttttttaagttataattttgttttattgcccaggttctgaattggtgccagaggtaggaatagaacccaggccttctcatttgaaatcctgtgttcttcccctccccagggtgggaactatggttgctagggctgaggtgtattgcttacttcttccatcaaaaatctcttttatctctgaacaacttgccacctctgcagaaacaagtccctgtggagatctcagttcagccccaggcagggttactacatggagtacccagatcccaggggctacttcaggcccttctactaagctcctgaccctggctctgggtcagatgttggctgaacatgaactattgtagggctgacagctacagaccacagaaagagcaaagcttcagtaggttcctgcctgatggagaagtcctcgggaagcccttggccttctatttcctcattgtcctttcagagaagagagcaggagttgggggagaaaggagattcgcatttactgaccatctgttatgtgctagacacttcattttacactgagaaaatatggaaagcatagataaacacctaaaagaaaataaaaacctcatgttatcccaccaaaaaaaaaaaaaaaaaaa

SEQ ID NO: 6547 - DNA, 4549 bp, Homo Sapiens
  NM_170743
cggcaggaaggccatggcggggcccgagcgctggggccccctgctcctgtgcctgctgcaggccgctccagggaggccccgtctggcccctccccagaatgtgacgctgctctcccagaacttcagcgtgtacctgacatggctcccagggcttggcaacccccaggatgtgacctattttgtggcctatcagagctctcccacccgtagacggtggcgcgaagtggaagagtgtgcgggaaccaaggagctgctatgttctatgatgtgcctgaagaaacaggacctgtacaacaagttcaagggacgcgtgcggacggtttctcccagctccaagtccccctgggtggagtccgaatacctggattacctttttgaagtggagccggccccacctgtcctggtgctcacccagacggaggagatcctgagtgccaatgccacgtaccagctgcccccctgcatgcccccactggatctgaagtatgaggtggcattctggaaggagggggccggaaacaagaccctatttccagtcactccccatggccagccagtccagatcactctccagccagctgccagcgaacaccactgcctcagtgccagaaccatctacacgttcagtgtcccgaaatacagcaagttctctaagcccacctgcttcttgctggaggtcccagaagccaactgggctttcctggtgctgccatcgcttctgatactgctgttagtaattgccgcagggggtgtgatctggaagaccctcatggggaacccctggtttcagcgggcaaagatgccacgggccctggacttttctggacacacacaccctgtggcaacctttcagcccagcagaccagagtccgtgaatgacttgttcctctgtccccaaaaggaactgaccagaggggtcaggccgacgcctcgagtcagggccccagccacccaacagacaagatggaagaaggaccttgcagaggacgaagaggaggaggatgaggaggacacagaagatggcgtcagcttccagccctacattgaaccaccttctttcctggggcaagagcaccaggctccagggcactcggaggctggtggggtggactcagggaggcccagggctcctctggtcccaagcgaaggctcctctgcttgggattcttcagacagaagctgggccagcactgtggactcctcctgggacagggctgggtcctctggctatttggctgagaaggggccaggccaagggccgggtggggatgggcaccaagaatctctcccaccacctgaattctccaaggactcgggtttcctggaagagctcccagaagataacctctcctcctgggccacctggggcaccttaccaccggagccgaatctggtccctgggggacccccagtttctcttcagacactgaccttctgctgggaaagcagccctgaggaggaagaggaggcgagggaatcagaaattgaggacagcgatgcgggcagctggggggctgagagcacccagaggaccgaggacaggggccggacattggggcattacatggccaggtgagctgtcccccgacatcccaccgaatctgatgctgctgctgcctttgcaaggactactgggcttcccaagaaactcaagagcctccgtacctcccctgggcggcggaggggcattgcacttccgggaagtccacctagcggctgtttgcctgtcgggctgagcaacaagatgcccctccctcctgtgacccgccctctttaggctgagctataagaggggtggacacagggtgggctgaggtcagaggttggtggggtgtcatcacccccattgtccctagggtgacaggccagggggaaaaattatccccggacaacatgaaacaggtgaggtcaggtcactgcggacatcaagggcggacaccaccaaggggccctctggaacttgagaccactggaggcacacctgctatacctcatgcctttcccagcagccactgaactcccccatcccagggctcagcctcctgattcatgggtcccctagttaggcccagataaaaatccagttggctgagggttttggatgggaagggaagggtggctgtcctcaaatcctggtctttggagtcatggcactgtacggttttagtgtcagacagaccggggttcaaatcccagctctgctgttcactggttgtatgatcttggggaagacatcttccttctctgcctcggcttcctcatctgcagctacgcctgggtgtggtgagggttctaggggatctcagatgtgtgtagcacggagcctgctgtgtcctgggtgctctctacgtggtggccggtagaattctccatctatccaggctccaggagacccctgggcatctcccacctgtggcccctaaacccagagtgactgagagcacttaacattcagcttgtctcatccccagtctacctccttccttctaccctcactgcctcccagtcaggagagtgagctctcagaagccagagccccacccaaggggaccctggtctctccgccttcacctagcaatgggaaccctgcttcccaggggaggaaccaactgctccaccttctagggacccagtttgttggagtaggacagtaacatggcaggaatcggacttctgggcctgtaatcccagtttggatggcacgttagactcttggttgaccgttgtggtccttagaagtcccattctcccttccagttatgagaaaccaatgccttctagattcaggtgactatccttacctgggggtgctgatgcatcctcagttaacctacacccacctgaatatagatgagcgtagctgagttttcacccgtaggaccgaagtgttttgtggtggagtatctgaacaaccttggctctgtggccattcaacctgccaggactaacatttctggatttgtgaagaagggatcttcaaagccattgaacccacagagctgtgttgctttaaagccaccacaagggtacagcattaaatggcagaactggaaaagcttcttagggcatctcatccagggattctcaaaccatgtcccccagaggccttgggctgcagttgcagggggcgccatggggctataggagcctcccactttcaccagagcagcctcactgtgccctgattcacacactgtggctttccacgtgaggttttgtttagagggatccactactcaagaaaaagttagcaaaccactccttttgttgcaaaggagctgaggtcaagggtggcaaaggcacttgtccaaggtcgcccagcagtgctgctctgatgacttgtgcacatccccaagggtaagagcttcgatctctgcacagccgggccaacctctgaccccttgtccatgtcagtaaaatatgaaggtcacagccaggatttctaagggtcaggaggccttcaccgctgctggggcacacacacacacatgcatacacacatacgacacacacctgtgtctccccaggggttttccctgcagtgaggcttgtccagatgattgagcccaggagaggaagaacaaacaaactacggagctggggagggctgtggcttggggccagctcccagggaaattcccagacctgtaccgatgttctctctggcaccagccgagctgcttcgtggaggtaacttcaaaaaagtaaaagctatcatcagcatcatcttagacttgtatgaaataaccactccgtttctattcttaaaccttaccatttttgttttgttttgtttttttgagtcggagttttgttctttttgcctaggctggagtgcagtggtacaatctcggctcactgcaacctccacctcccgggttcaagtgattctcctgcctcagcctcccaagtagctgggattacaggcacccgccaccacacctggctaatttttttgtatttttagtagagacggggtttcaccatgttggccaggctggtctcgaactcctgacctcaggtgatccgcccgcctcggcctcccaaagtgctgggattacaggcgtgagccaccgcgcccagccaaaccttactatttttttaaagaattttttccagagtttaatttctgacatagcttaagttttccagtaactctaaactccatctcctttatcgtcattaagtcattcacaaaaagccaggagaagcatttggaaagggcatgataatcagtataataatttgccttgtgtggtcagcacttaactgtttacaaagccctttcacgtgcacagcaggtgggaactgcgcggtgtgggctgggcctgcgctggaagcatatcccgtgaaaagtgttagtgccttaggtgaaagcaacatgtatccctttagactactaacggtatatgttgttcttatgtatttgtatttatttctattttttctatgtttatgtcatatttaaacgatatcctactgcttgttggtattaccctaaactgtttaaataaagagctctatttttaaagaaaaaaggtacaattga

SEQ ID NO: 6548 - DNA, 1294 bp, Homo Sapiens
  NM_170746
aaaagattgcgcgaagcgaggctagcagtcggacctagtctccgccccttcctgctgtgttcaccatcccagcgtcccctgtcccctccacccgaagcgatgggtggttccgtcaggcgcttcccgcaccttcccgctccctgcttgcaaagtggttgtgccccaaggtccgcctccaggccacgtgggtgctgcgggccaagctttcccttcctttgagagaggtttccgctgtaggagcagagcttccgggctgcgctcttcgttgcccagtttccgctcagtggtcgcgtctccgccccccacccaccagtcccgctgcattctcggccgggctctaggcgccatggctccccgcgggaggaagcgtaaggctgaggccgcggtggtcgccgtagccgagaagcgagagaagctggcgaacggcggggagggaatggaggaggcgaccgttgttatcgagcattgcactagctgacgcgtctatgggcgcaacgccgcggccctgagccaggcgctgcgcctggaggccccagagcttccagtaaaggtgaacccgacgaagccccggaggggcagcttcgaggtgacgctgctgcgcccggacggcagcagtgcggagctctggactgggattaagaaggggcccccacgcaaactcaaattccctgagcctcaagaggtggtggaagagttgaagaagtacctgtcgtagggagatttgggtagaagccctcatgctgagctttgtgtccctggtgatgttggaacattaatgatggaacatggccaaacttcagtcatgatcctgaagccatggtttcttccctgccagaaatgaaggttcagttatgaggcaaccctctagtaaggcattgtaaaagttactggatttggtttaataaaagttgaaataaagtatttgagtaatagagtaaaacttaatcttaagggatggacaaagccagccttgtggagttggtagtccttgtgtttttcatagcccaagatagccatgtgacctggaacttttaaaaaaaaatttttttttaagagccagagtctcactttgtcacccatgctggagtatagtggtgctatctcggctcactgcaaccattgtctcccaggttcaagcgatactcctgcctcagtctcctgagtagctgggatcacaggtgcacaccaccacgcctggctaatttttttatttttatttttagtaaaggcggggtttcaccatgttggccaggctggtctcaaactcctgacctcaagtgatatgcctgccttg

SEQ ID NO: 6549 - DNA, 5223 bp, Homo Sapiens
  NM_170773
gtggctagtgaggcccagcctgtatatttctaacagggcgccccatgccccagcaccctccccactgggaccactcctcatagaatagccccactccaaagcatttatgacttgaaccttctgaccaaagctctctgaatcttgggggaacctagaagaggaaaaggaatgtcaggctctgtcagagtcagccaagcgagatcagccaggggtctgctccctgcagaccatacggggagccagggtttgcaatgagtctaaactggaatcttaccctgcaaaacgaatggccactattagagttttccaaaaccactctgaagcccctgactgtgcccaaagttcagatctcagaggtggatgccccgccggagggtgaccagatgccaagctccacagactccaggggcctgaagcccctgcaggaggacaccccacagctgatgcgcacacgcagtgatgttggggtgcgtcgccgtggcaatgtgaggacgcctagtgaccagcggcgaatcagacgccaccgcttctccatcaacggccatttctacaaccataagacatccgtgttcacaccagcctatggctctgtcaccaacgtccgcatcaacagcaccatgaccaccccacaggtcctgaagctgctgctcaacaaatttaagattgagaattcagcagaggagtttgccttgtacgtggtccatacgagtggtgggcccatgtgagcagatctccaaagtgttcctaatggagaaggaccaggtggaggaagtcacctacgacgtggcccagtatataaagttcgagatgccggtacttaaaagcttcattcagaagctccaggaggaagaagatcgggaagtaaagaagctgatgcgcaagtacaccgtgctccggctaatgattcgacagaggctggaggagatagccgagaccccagcaacaatctgagccatgagaacgaggggatctgggcaccccaggaaccgccattgcccataagacccccaggaagctaggcactttctttccatggaaacatttagacacaaacctccccagctccggccaagccatcatttgctacctggagctggatgtagaagtcagcagacagctccctatccctggacccctgccctccttttttctgctcacaaggacttttgattttagttataaggaggacccaaaatgtgtgtgtgtacatgtgtgtgcacacatggtacgtgtccatgtgcctacctgatactttcacatgtaattaaattccaggcaaccagcacaagagccgtgagcttggcacatgtgctgctcgtgagcaggaaaatcagaggagccactgatctgagtggtatttaggttgaaggaaagatttctcctctcaagtgccagggagcagccacacgtctgtctgtgtttagagagggaagagggttctccaggttcaccatttgggttgtttatatgttggtagaaattctccctgtatgcctagaaggatcagtgaatgtaagagccttggaaattaacaaaataacagccacataaccttgcggcaagtctgatggaaagaaaaagataaaccatccgtggggtagatgcaataagcccacgtatttttacactggaaacgttgattgttttaaatgacaaagacatatgtgatgttctatgtggaaacctgtgaagagtggattctgcctccatctctgcctccatggctacctttaggagacagagaagatcctgtgtgtttctctgtacccagctgacagcctgtctctatggcgcttccttgagtggaaggaaatgtctcaagaaacaaagatctcgctggtgcgtacacagtgctgaccagctagtgtggccagggcctggtggcctggtggccaggaagtttcaggttgaagggaaatgtcgaggctacctgcagatatgacaggtgccttgaacgcagcccatcttcatgtcatcaaaggtcttcctgcacttgaagctggggcgatgtttgcagtcaagaccattctttccaacctctgggttcttgcaagttgccctcaccttgtgtgtggagatgcattccaagaatgaagcctcatcttgctactgagtgtggggttcagggaagctctttaggccacctggtgaaggtgcatggggaggatggagcttctcctcagctcctctgagcagccacctatgtgatctttaaatccaaccccaatgggagaaaagggcaagaacagtctgtgccctgggactcctatcaggaagcttgacaggcagctgggcatcagtgcagctgatatcgtttgaggagggagacagatgcttggacctgggtgcctggctatggagattgaccaagcaagatcaggagctcctgatagcaggcgtctttgagcctagctggggtagaggcactgcccatctcttctccaccttctctccacagaatgtttgcagagctgggcagttgaggaaaggacagcccctggttggtgcctccaaaggaaggtggacttttttggtggagacgtttctgccctgggcaccctcctgcccccgattcatacctatggcttcttgagaaggctcacagctgtggtcttaacgtagactgcagaaagatggcatgcggcccctggcatttcgccaagggttttatagcaagtctccttcctccatagggacagcagcaccagccctgtggggcatggagtggaagcccagaagggcttctgcaagctgcacagaactggggtaagaagacaaagagtagccaccgggagaggcttcctttgttacagctgggaaagaacagttctgtgaatgcaaacacctcctgagttttgcaattgagaaaatgatttggagaacttctcttctggtaatttttattttgaatgttcagggccttagttggccccagtaattctccttggaggacttgggagaagaatttccacaaagcaaactactaaccactagctcttactggacagcgatttctggcttataagagttctctttgatttgcactagcactacgatagtgttagatggggaaatactgcaacatgtccagttggccagatcactttccaagggagcgatactaaggcagactcagctttttaaagatgggaggtcaggaggtggaagtgagaggagatcccatctcacacaacacacttccacgtaatgcagaccacacttttccattttgtcctgccctcttgagaggtcatttctcacgtcctaagaacctgatcagaaattttggaagggttctttgaaatagcagcagttgaaacagagacactttgccacagtgtggagcagattttctcactggtatcacatggtcttgcagttttgaactcttcgaccgatttgtgggagtttatgtaattgcgtgcaatgaacctgaaattgtgtaaaggacaaaagaccagtttatagggttgggttttttttccaacttgtgaaaagcagtttagctgcatctgtctccccaccacccccaccccgggaggggcttatgttacaaggtgatcaagtgaaggaaaaacctgagcctatctggctgggatggtggaattaagcacaaggtcacattctctgtgatcacatgagagggaaggtgatgacttaaatggcagggggtggggattatcttggggagaggctgaaaagcacaaaagatagtcttccctgtacgtattggtgaagaacgtgcacaaggctggatggacttcaacttggagttgagttgaggcaagaggatttctggatattagtcacccatctgcaagaaaaatgctgaggcctcgggtcaagattttgatctgagacatgctgatgcttcaaggagaaatattttcacaatcctctcttccctcaccagaagagaacagtactctctcctagaaacctctaggtaaacacattttatcctaatatcggtagcatataatgccccccccaaaatatctgttttccatgcaaaaaagtctcaacaagaagtctgtggagttgagtggttacttcaaagtgtcaggagagtgaagaaattggccacagaagagcaagaagctctcttaagaaaagggaattctctttaaagaaaccaccaccaacaacaaaacaaccaaaaaccatgttttatgtcaaagctctgtagcacagagaatgtggtgtcacagatacatcgccgagagaggtttctttctttcttttttttttttttgagacagagtctggttctgtttcccaggctggagtgcagtggtgggatctcagctcactgcaacatccgcctctggggttcaagtgattctcctgtctcagcctcccaagtagctggaattacagggacccgccaccacgcccggctaatttttttgtgtggttttagtagaggtggggtttcaccatcttggccaggctggtcttgaactcctgacctcgtgatccacccgcctaggcctcccaaagtgttgggattacaggcgtgagccactgtgcccagccaaaagagaaatttctacatgaacaaggcaatttcagtgtcttacagcggccaaaccatgacgtgaagaatgagataggagacaggagatcaccataagcgtccctgatatagcagcacacattttcacgtttccacttaaatcgttttgcacaaagtcttgcttcgctcagatgagatgagatatgatttcctagagatgtaaaaataagaatgaatgtggcgcccccttcttccagatgtaatagaaagctctgccctatcacaaggggggtgttgaagcgccccttgtgttttaactgtatttaactgagcacaagatgcacaagctgtggtgggaaaccctcagtttacctttggagtcttccctgcagatcgcagacctgtttccaggctgatgtttctggtgtgtaattgctagcgtttctgaagggttttcccaattgttttagccttgtgaagtattcttaattataacttgcctttcagcgatggtacatgacttgattcaacgtttggttctgaacttacacactgatgcgtttactcatctaacataatctgacagggcctcagcaagggagccatacatttttgtaacattttgatatgttttaatgcatctgacttagatcttactgaaataaagcacttttcaaagagaaaaaaaaaaaaaaaaaaaaaaa

SEQ ID NO: 6550 - DNA, 2676 bp, Homo Sapiens
  NM_170776
agagtggtggggctgcagggtgggggcaggccagctcagcagagcctggggccagagggccagacagccacagagctcctggcgtgggcaaggctggccaaggatggcgacgcccaggggcctgggggccctgctcctgctcctcctgctcccgacctcaggtcaggaaaagcccaccgaagggccaagaaacacctgcctggggagcaacaacatgtacgacatcttcaacttgaatgacaaggctttgtgcttcaccaagtgcaggcagtcgggcagcgactcctgcaatgtggaaaacttgcagagatactggctaaactacgaggcccatctgatgaaggaaggtttgacgcagaaggtgaacacgcctttcctgaaggctttggtccagaacctcagcaccaacactgcagaagacttctatttctctctggagccctctcaggttccgaggcaggtgatgaaggacgaggacaagccccctgacagagtgcgacttcccaagagcctttttcgatccctgccaggcaacaggtctgtggtccgcttggccgtcaccattctggacattggtccagggactctcttcaagggcccccggctcggcctgggagatggcagcggcgtgttgaacaatcgcctggtgggtttgagtgtgggacaaatgcatgtcaccaagctggctgagcctctggagatcgtcttctctcaccagcgaccgccccctaacatgaccctcacctgtgtattctgggatgtgactaaagggaccactggagactggtcttctgagggctgctccacggaggtcagacctgaggggaccgtgtgctgctgtgaccacctgacctttttcgccctgctcctgagacccaccttggaccagtccacggtgcatatcctcacacgcatctcccaggcgggctgtggggtctccatgatcttcctggccttcaccattattctttatgcctttctgaggctttcccgggagaggttcaagtcagaagatgccccaaagatccacgtggccctgggtggcagcctgttcctcctgaatctggccttcttggtcaatgtggggagtggctcaaaggggtctgatgctgcctgctgggcccggggggctgtcttccactacttcctgctctgtgccttcacctggatgggccttgaagccttccacctctacctgctcgctgtcagggtcttcaacacctacttcgggcactacttcctgaagctgagcctggtgggctggggcctgcccgccctgatggtcatcggcactgggagtgccaacagctacggcctctacaccatccgtgatagggagaaccgcacctctctggagctatgctggttccgtgaagggacaaccatgtacgccctctatatcaccgtccacggctacttcctcatcaccttcctctttggcatggtggtcctggccctggtggtctggaagatcttcaccctgtcccgtgctacagcggtcaaggagcgggggaagaaccggaagaaggtgctcaccctgctgggcctctcgagcctggtgggtgtgacatgggggttggccatcttcaccccgttgggcctctccaccgtctacatctttgcacttttcaactccttgcaaggtgtcttcatctgctgctggttcaccatcctttacctcccaagtcagagcaccacagtctcctcctctactgcaagattggaccaggcccactccgcatctcaagaataggaaggcacggccctgcaatatggactcagctctggctctctgtgtgaccttgggcagctccgtgcctctctctgtactccctcagtttccttctctgtacaatgtggctggggagggagaggatgggaccaggttggaccacgtggcatcagaggtcccatccagatccaactataggtccaagagtccacgtaagcaggtttgcaaggctctaaagttcctatagtcctgagaccccctgccagcaaagagtgacagtcacctccatgccctgccctcattgcaaagccctcactcaccttctggtctcagcaagggaggagagtctgttgctggcatagccctggaaggagcccccagcctctcccctcctcctccttgtcactggcctcccacaactccccttctggctgcctgtaaccttgaggggcattcaggaggccagcgttccctcaggcactgggggtttgttttggggggtgggagttgatcctcccacccagtctgcccctggtctctgcccatccaatcagagcccaccctcctggaagagacccccgtgttcagagtgctggcagccctgcacgtgtccagggacactgcatttcaaagaaccactgagtgggtgagctaccttgggcaaaccccccactcctgactctgactgccacgtgggtggcccgacctctgacctgctgtcatcgtagaggtagaaagcaaacaatctggggctcagcacacctgggggtgctcccactcattcagtgtgtggggcccctgagcagaggctgggcattgccactaggacctgagctcctagagaacaaggacctgggtggcctcgcttactgttccagcccaggccaagcacagggtctggctcgtggcaaaccttgaataaatatttgttggctgaaaaaaaa

SEQ ID NO: 6551 - DNA, 2540 bp, Homo Sapiens
  NM_170784
cctcgcgcgacgcgaaggttgtcgggatccgcggcagcagcggctgcttgagatctgtttctggggcctctggcggtggcggcctggggcggcgcgacggctggtgcgcaggtacactgatgctgaagtactatgagccttcggaacttgtggagagactacaaagttttggttgttatggtccctttagttgggctcatacatttggggtggtacagaatcaaaagcagccctgttttccaaatacctaaaaacgacgacattcctgagcaagatagtctgggactttcaaatcttcagaagagccaaatccaggggaagtagcaggcttgcaatcttcaggtaaagaagcagctttgaatctgagcttcatatcgaaagaagagatgaaaaataccagttggattagaaagaactggcttcttgtagctgggatatctttcataggtgtccatcttggaacatactttttgcagaggtctgcaaagcagtctgtaaaatttcagtctcaaagcaaacaaaagagtattgaagagtgaagtaaaataaatatttggaattactaatttgtcattaaatcattctatgctgattagcttcataaacattgaactttttgattttatagccacaatgctgcatattcatactttaattcctaaagaataatttttaatgttaaaacgtgataatgcaataaatagaaaaatgtggtttacaaaataaaaacggtcttcactagttaccacctgaagtaagatgtctcgtttggaagctaagaagccatcattgtgtaagagtgaaccactgacaactgagagagtcaggaccacactttctgtcttgaaaagaattgtaacatcatgctatggcccctcaggtaggctgaagcagctgcacaatggctttggaggttacgtgtgtacaacctcacagtcctcagctctgctcagtcaccttttggtcacacatcccattttaaagatcctgacagcctccatacagaatcatgtgtcaagcttcagtgattgtggcttattcacagctattctttgctgcaacctgattgaaaatgttcagagattaggcttgacacccaccactgtcattagattaaataaacatcttttgagtctttgcatcagttatctcaagtctgagacctgtggttgtcgaatcccagtggactttagtagtactcagatcctcctttgtttggtgcgtagtatattaacaagtaaacctgcctgtatgctcaccagaaaggaaacagagcatgtcagtgctttgatcctgagagcctttttgcttacaattccagaaaatgctgaaggccacatcattttaggaaagagtttaattgtacctttaaaaggtcaaagagttatagattccactgtattacctgggatactcattgaaatgtcagaagttcaattaatgaggctattacctatcaaaaaatcaactgccctcaaggtggcactcttttgtacaactttatccggagacacttctgacactggagaaggaactgtggtggtcagttatggggtttctcttgaaaatgcagtcttggaccagctgcttaacctaggaaggcagctaatcagtgaccacgtagatcttgtcctgtgccaaaaagttatacatccatctttgaagcagtttctcaatatgcatcgtattattgccatagacagaattggagtgactctgatggaacccctgactaaaatgacaggaacacagcctattggatccctaggctcaatatgtcctaatagttatggaagtgtgaaagatgtgtgcactgcaaaatttggctccaaacatttttttcatcttattcctaatgaagcaacaatctgcagcttgcttctctgcaacagaaatgacactgcctgggatgagctgaagctcacgtgtcagacggcactgcatgtcctgcagttaacactcaaggaaccatgggctttgttgggaggtggctgtactgaaactcatttggctgcatatatcagacacaagactcacaacgacccagaaagcattctcaaagatgatgaatgtactcaaacagaacttcaattaattgctgaagcattttgcagtgccctagaatctgttgttggctctttagaacatgatggaggtgaaattctcactgacatgaagtatggacacctttggtcagttcaggcagattctccctgtgttgctaactggccagatttgctttcacagtgtggctgtggattatacaatagccaggaagaactcaactggtctttcttaagaagcacacgtcgtccatttgtgccacaaagctgccttccacatgaagctgtgggctcagccagcaacctgaccttggactgtttgactgcaaagcttagtggcctacaggtggctgtagagacagccaatttgattttggatctttcatatgttattgaagataaaaactaagagaatagcatgttcgtattacaagagaaacaaataaactagtctgttggcaattgagaaaaaaaaaa

SEQ ID NO: 6552 - DNA, 2924 bp, Homo Sapiens
  NM_171827
agcacccaagggctggtcaaccaagctgggggttgaatttccatccagcaatgcaggccatgggaggctgcagcagtgacgctgtcagatcccctttgtgagaataataatttttataacaacgtggctggaggactgatcaggagagagactggtgtgaattgaaggctgttgcaatggctccaagaagagatgaggctgtgtggtgagtttagccgctggatgaaaggccggaagaatgaggtcagcagcgcactgacaccgacacccaaagcttcggctgctgccgctctcatggaaatctcctgggggaagggagagggtccttcctcggtgaaaactggggctgctctagcgagttcctcagaagcgggcaggtcgctagttcctcttccttttcagccctcagtgcccattttgccaataaaaagtcccaaggtgacagtacaagagacgcctttagtgaaggcaaaggaagggacactcccctcctttgctgcctactctcgccctcacttcttgaaatctttggtctcccttcacccactctgtcactctcacaagacaaccatttccaaggactatttccaagcccttttcctcatccccaaacccgcagttttcagctgcccccagttgcctggccaggctgcctcgacggccctattcacgggccccagcctcctcgccgggctggaaggcgacaaccgcgaaaaggagggtgactctcctcggcgggggcttcgggtgacatcacatcctccaaatgcgaaatcaggctccgggccggccgaagggcgcaactttcccccctcggcgccccaccggctcccgcgcgcctcccctcgcgcccgagcttcgagccaagcagcgtcctggggagcgcgtcatggccttaccagtgaccgccttgctcctgccgctggccttgctgctccacgccgccaggccgagccagttccgggtgtcgccgctggatcggacctggaacctgggcgagacagtggagctgaagtgccaggtgctgctgtccaacccgacgtcgggctgctcgtggctcttccagccgcgcggcgccgccgccagtcccaccttcctcctatacctctcccaaaacaagcccaaggcggccgaggggctggacacccagcggttctcgggcaagaggttgggggacaccttcgtcctcaccctgagcgacttccgccgagagaacgagggctactatttctgctcggccctgagcaactccatcatgtacttcagccacttcgtgccggtcttcctgccagcgaagcccaccacgacgccagcgccgcgaccaccaacaccggcgcccaccatcgcgtcgcagcccctgtccctgcgcccagaggcgtgccggccagcggcggggggcgcagggaaccgaagacgtgtttgcaaatgtccccggcctgtggtcaaatcgggagacaagcccagcctttcggcgagatacgtctaaccctgtgcaacagccactacattacttcaaactgagatccttccttttgagggagcaagtccttccctttcattttttccagtcttcctccctgtgtattcattctcatgattattattttagtgggggcggggtgggaaagattactttttctttatgtgtttgacgggaaacaaaactaggtaaaatctacagtacaccacaagggtcacaatactgttgtgcgcacatcgcggtagggcgtggaaaggggcaggccagagctacccgcagagttctcagaatcatgctgagagagctggaggcacccatgccatctcaacctcttccccgcccgttttacaaagggggaggctaaagcccagagacagcttgatcaaaggcacacagcaagtcagggttggagcagtagctggagggaccttgtctcccagctcagggctctttcctccacaccattcaggtctttctttccgaggcccctgtctcagggtgaggtgcttgagtctccaacggcaagggaacaagtacttcttgatacctgggatactgtgcccagagcctcgaggaggtaatgaattaaagaagagaactgcctttggcagagttctataatgtaaacaatatcagactttttttttttataatcaagcctaaaattgtatagacctaaaataaaatgaagtggtgagcttaaccctggaaaatgaatccctctatctctaaagaaaatctctgtgaaacccctatgtggaggcggaattgctctcccagcccttgcattgcagaggggcccatgaaagaggacaggctacccctttacaaatagaatttgagcatcagtgaggttaaactaaggccctcttgaatctctgaatttgagatacaaacatgttcctgggatcactgatgactttttatactttgtaaagacaattgttggagagcccctcacacagccctggcctctgctcaactagcagatacagggatgaggcagacctgactctcttaaggaggctgagagcccaaactgctgtcccaaacatgcacttccttgcttaaggtatggtacaagcaatgcctgcccattggagagaaaaaacttaagtagataaggaaataagaaccactcataattcttcaccttaggaataatctcctgttaatatggtgtacattcttcctgattattttctacacatacatgtaaaatatgtctttcttttttaaatagggttgtactatgctgttatgagtggctttaatgaataaacatttgtagcatcctctttaatgggtaaacagcatccgaaaaaaaaaaaaaaaaaaaaaaaaaaaaaaaaaaaaaaaaaaaaaaaaaaaaaaaaaaaaaaaaaaaaaaaaaaaaaaaaaaaaaaaaaaaaaaaaaaaaaaaaaaaaaaaaaaaaaaaaaaaa

SEQ ID NO: 6553 - DNA, 1421 bp, Homo Sapiens
  NM_171846
cttccctccgccccgcgccgcggctggcagggtgtgcgtgagtttggtggcggccggctgtgcagagacgccatgtaccggctcatgtcagcagtgactgcccgggctgccgcccccgggggcttggcctcaagctgcggacgacgcggggtccatcagcgcgccgggctgccgcctctcggccacggctgggtcgggggcctcgggctggggctggggctggcgctcggggtgaagctggcaggtgggctgaggggcgcggccccggcgcagtcccccgcggcccccgaccctgaggcgtcgcctctggccgagccgccacaggagcagtccctcgccccgtggtctccgcagaccccggcgccgccctgctccaggtgcttcgccagagccatcgagagcagccgcgacctgctgcacaggatcaaggatgaggtgggcgcaccgggcatagtggttggagtttctgtagatggaaaagaagtctggtcagaaggtttaggttatgctgatgttgagaaccgtgtaccatgtaaaccagagacagttatgcgaattgctagcatcagcaaaagtctcaccatggttgctcttgccaaattgtgggaagcagggaaactggatcttgatattccagtacaacattatgttcccgaattcccagaaaaagaatatgaaggtgaaaaggtttctgtcacaacaagattactgatttcccatttaagtggaattcgtcattatgaaaaggacataaaaaaggtgaaagaagagaaagcttataaagccttgaagatgatgaaagagaatgttgcatttgagcaagaaaaagaaggcaaaagtaatgaaaagaatgattttactaaatttaaaacagagcaggagaatgaagccaaatgccggaattcaaaacctggcaagaaaaagaatgattttgaacaaggcgaattatatttgagagaaaagtttgaaaattcaattgaatccctaagattatttaaaaatgatcctttgttcttcaaacctggtagtcagtttttgtattcaacttttggctataccctactggcagccatagtagagagagcttcaggatgtaaatatttggactatatgcagaaaatattccatgacttggatatgctgacgactgtgcaggaagaaaacgagccagtgatttacaatagagcaaggtaaatgaataccttctgctgtgtctagctatatcgcatcttaacactattttattaattaaaagtcaaattttctttgtttccattccaaaatcaacctgccacattttgggagcttttctacatgtctgttttctcatctgtaaagtgaaggaagtaaaacatgtttataaagtaaaaaaaaaaaaaaaaaaaaaaaaaaaaaaaaaaaaaaaaaaaaaaaaaaaaaaa

SEQ ID NO: 6554 - DNA, 4227 bp, Homo Sapiens
  NM_171982
ctcgggtcgcgggcgttggcagccgggcgggtgggaggggccggagcaaaagttccgggcgcccgagccggctgctcgtgccatggagcggagtcccgacgtgtcccccgggccttcccgctccttcaaggaggagttgctctgcgccgtctgctacgaccccttccgcgacgcagtcactctgcgctgcggccacaacttctgccgcgggtgcgtgagccgctgctgggaggtgcaggtgtcgcccacctgcccagtgtgcaaagaccgcgcgtcacccgccgacctgcgcaccaaccacaccctcaacaacctggtggagaagctgctgcgcgaggaggccgagggcgcgcgctggaccagctaccgcttctcgcgtgtctgccgcctgcaccgcggacagctcagcctcttctgcctcgaggacaaggagctgctgtgctgctcctgccaggccgacccccgacaccaggggcaccgcgtgcagccggtgaaggacactgcccacgactttcgggccaagtgcaggaacatggagcatgcactgcgggagaaggccaaggccttctgggccatgcggcgctcctatgaggccatcgccaagcacaatcaggtggaggctgcatggctggaaggccggatccggcaggagtttgataagcttcgcgagttcttgagagtggaggagcaggccattctggatgccatggccgaggagacaaggcagaagcaacttctggccgacgagaagatgaagcagctcacagaggagacggaggtgctggcacatgagatcgagcggctgcagatggagatgaaggaggacgacgtttcttttctcatgaaacacaagagccgaaaacgccgactcttctgcaccatggagccagagccagtccagcccggcatgcttatcgatgtctgcaagtacctgggctccctgcagtaccgcgtctggaagaagatgcttgcatctgtggaatctgtacccttcagctttgaccccaacaccgcagctggctggctctccgtgtctgacgacctcaccagcgtcaccaaccatggctaccgcgtgcaggtggagaacccggaacgcttctcctcggcgccctgcctgctgggctcccgtgtcttctcacagggctcgcacgcctgggaggtggcccttggggggctgcagagctggagggtgggcgtggtacgtgtgcgccaggactcgggcgctgagggccactcacacagctgctaccacgacacacgctcgggcttctggtatgtctgccgcacgcagggcgtggagggggaccactgcgtgacctcggacccagccacgtcgcccctggtcctggccatcccacgccgcctgcgtgtggagctggagtgtgaggagggcgagctgtctttctatgacgcggagcgccactgccacctgtacaccttccacgcccgctttggggaggttcgcccctacttctacctggggggtgcacggggcgccgggcctccagagcctttgcgcatctgccccttgcacatcagtgtcaaggaagaactggatggctgagctggcccggggctgccccggtcttgtgccacagcactgttttctttctgccctcttcctaatgcccacactgcttgggcactattgcgcccctgcctccttgccaggctcttcctcctgtcctgcctggtccttttccatgactccaggctgtgcctctctccatgtttggtcccttctgtgcccatggtcaggagctattcgggtggcacctcgctggccaggctctcccgagtcgtggcacctccacaatgtgaattttctgaatccctattccaggatttctgggaataatgtttacttctagaatgggcctgttgtaaaccatctcatcgaggtgtggtaaagccattggatgaggaggggactgccatggaaaggagagtttgttacttacggttctgagaggaggggccacataggaaagccccacggtgggtcagaaggcggaaggagggaggggaacgtgtgggcaagagacttcctctggtttcctcaggaggaaatgggcaaggcagagtaagcaggggagacaggtttaagggtagctggcttgagtaatttcagtggctctcaggataggggctgccctttttgtctgatacctggccccgggatagtcaggacaggtgaatgttggcctggggtgtgacagccctgggagagccatgtgaaggaggcagctggcgccatcgctccggattagttggtttccataggaaaggcatgctttcagccagatgcttgccatctctagggattgggggattggctagcctgggaggatcagtctgtccaggtcagcgaggccccagataccagagcatcaagagtacaggaaatacagttaatgcagggcctctgtgtggctggatcctccgtctccatcagatcagctctgattgatctattcttgcacgatttcctctgaacacagggttccagagtacttaaacacaacattttttaaatcgtgatttcggcctatttccttgccaggcctgtttccccaccaggaaatgagataggaggactggatgaggatgtcctgttatagttgctgtggaggaagttcctctggttaattctcatcagcgtctgcagaaaagaaggaaagagggcacccttttcagttgggaagaaaggagaggggtggcgccatggacgtggccctaaacgctgtgggagagggaagaggaggctgggcctcgctgccctcttgtctctgctgacttcagcctggtcatgcttgctctgccacttgcgatttcatccctaatttcttcctccaccatgcctgcagacttttccctgggcttgttttttctcgcacatctctgaagagtttttaatcttcagctcatcatgtcccaggaagtggcatcataaaaggaaatatttttttttcctaggagcagtgttaaaatctgggtcacattcctgaccaaggacagcatcctgccttctgcccatccccttcagttcacaaaagctgacattttaaacaaatcatgactcacacgtattaattggttataaatatgttgtgtacactggttagataaaacttaaggccacaaggagggcccaggtaggcgatgtcagtgtgtgaaggggctggattgggcgtggtgaggatgttggcaaaccagtgcatgcacctggttggaagatgctcagcctcacaaaagctccaagccctttgggagccaaagtgtctgagagtgtgaccctctcctgtaaagtatttatcccacccattaatataatttctgtataataaacttgacctgaaattatttcattctttatattaaacttttaaaaatgttttttattttcaccttagatatgggaagagttttttttttttttttttttttaacaggataacttgagcaggctaggcctcttaaaaaaaaatttgagctaaaactcatttttcttttggcattttcttttcaatgttcttataagcaaagttcatccatgttgtagcatgtgttcaactttattttttcatcgggtaatattccattgtatggaatggtagtactacattttatttatcatgcatcgattggtggacatttggatcgtttctacttcttgactattatacataatgctgctaggaacttttgtgtatgagtttttgtgtggacatatgttttcatttctctttggtatatgcctgggagcagatttgctggatcatatgaaactctatttaacccttgagggactcccaaactgttttccaatgtggtgacacaattttatatcccatcaacagggcatgagggttctgatgactccacatccctcagtgctttttattatctatcttttaacttagccatcctagtaggggtaatgtggcatctcattgtgattttggtttgcatttccctgatggcgaatgatattgagcatcttttcatgagcttattggccatttgcatatcttcttaggacagctatctttagatcacttgctcattttttaattgggttatttgtctttttattattgagttgtaagagtccttttatagcctggcacaagtccctttaactggtatatgattataaaatttttctccgtgagctgtttcatttccttgatgatgtcctttgaaatactaaagcttttaattttg

SEQ ID NO: 6555 - DNA, 1974 bp, Homo Sapiens
  NM_172028
ggcggggcggggctgagcgtgtttacatccgccgggtgcgcggcttcgccgcccgaggtcgttcggctcgggtaccatcctccgcgccatggacaccagcgacctgttcgccagctgcaggaagggggatgtgggccgagtgcggtacctgctggagcagcgagacgtggaggtactatgcctgcttgtgtgggcacgaggagctggtactctaccttctggccaatggagcccgctgcgaggccaacaccttcgatggtgagcgctgcctctatggggcactgagtgaccccatccgccgggctctacgcgattacaagcaggtcacggcttcctgcaggaggcgggattactatgacgacttcttgcagcggcttctagagcagggcatccacagtgacgtggtctttgtagtacacgggaagccattccgggtgcatcgctgcgtcctgggtgcacgtagtgcctactttgccaacatgctggacaccaaatggaagggcaagagtgtcgtggttctcaggcacccactgatcaaccccgtggcctttggggccctgctgcagtacctgtacacaggccgcctggacattggcgtagagcatgtgagtgactgtgagcgcctggccaagcaatgccagctgtgggacctgctcagcgacctggaggccaagtgcgagaaggtgtctgagtttgtggcgtctaagccaggcacgtgtgtgaaggtgctgaccatcgagcccccacctgcagacccccgcctccgggaggacatggcgctgctggccgattgtgccctgccccccgagctccgaggtgatctttgggagctgcccttcccttgtcctgacggcttcaacagctgccctgacatctgcttccgagtggctggctgcagcttcctctgccacaaggcctttttctgtggccgcagtgactacttccgagccctgctggatgaccacttccgagagagcgaggagccagcgacctcagggggccccccagccgtcaccctgcatggcatctcacccgacgtcttcactcacgtgctctactacatgtacagcgaccacactgagctgtcccccgaggcagcctatgatgtgctgagcgtcgccgacatgtacctgctgccaggcctgaagaggctgtgcggccgcagcctggctcagatgctagacgaggacactgtggtgggtgtgtggcgcgtggccaagctcttccgcctggcgcggcttgaggaccagtgcactgagtacatggccaaggtcattgagaagctggtggagcgggaggacttcgtggaggcggtgaaggaggaggcagcggctgtggcagcccggcaggagacggactctatcccgctggtggacgacatccgcttccacgtggccagcacggtgcagacctacagcgccatagaggaggcgcagcagcgtctgcgggcactcgaggacctgctcgtgtccatcggtctggactgttgagcccctggctgggcagccccaggggccaggagctctcttggagacaagcatgtgtatgcgtttgtgtgcagctcttcttcctgctccctgcacattgagggcttcatggggggtgcgaggggctcagtggggcttctcttccctccatgagcctggagaccccaggggaggatccatttgggatgagccccctccccccaatgcacaagccagcccccaagaccctgggggtggacaccactcagggaaacctggggtgggggtgggctttggtcttagcactttccttctccagatcccccctacccaccccagtcccaaatccagtcctctggcccttgcctagccctgaattgcttctctaagctggtgttcccatgcacagggccattcaggaagggctgggggagtgtgtgtggcaataaagcttgaaggcaccgtgggaaaaaaaaaaaaaaaaaaaaaaaaaaaaaaaaaaaaaaaa

SEQ ID NO: 6556 - DNA, 2112 bp, Homo Sapiens
  NM_172088
ccggaaccctgtgtgctggggaggaatcccgcagtggccggggggcttgaggccgctgctttgtctcttcgtccagagccttatgtaagagcttttctcgggaaacaggaagtcctgcttgccaatttcagcacagggagtagtgcaggccttattccaacacacccggcccagccttaaccccagaactcagccagtttcttgcttccgtgcccctggttctcctccccatcgagcccacccctcctttcccaccttcagtcacccctagtgaactgccccagcgatctctgctgtgcttgaccccgagggtcttccaccctcgccctgaccctggacactgcccagcttggccccccatcctgctcctggcacaatgccctctagccagccaaccttccctcccccaaccctggggccgccccagggttcctgcgcactgcctgttcctcctgggtgtcactggcagccctgtccttcctagagggactggaacctaattctcctgaggctgagggagggtggagggtctcaaggcaacgctggccccacgacggagtgccaggagcactaacagtacccttagcttgctttcctcctccctcctttttattttcaagttcctttttatttctccttgcgtaacaaccttcttcccttctgcaccactgcccgtacccttacccgccccgccacctccttgctaccccactcttgaaaccacagctgttggcagggtccccagctcatgccagcctcatctcctttcttgctagcccccaaagggcctccaggcaacatggggggcccagtcagagagccggcactctcagttgccctctggttgagttggggggcagctctgggggccgtggcttgtgccatggctctgctgacccaacaaacagagctgcagagcctcaggagagaggtgagccggctgcaggggacaggaggcccctcccagaatggggaagggtatccctggcagagtctcccggagcagagttccgatgccctggaagcctgggagaatggggagagatcccggaaaaggagagcagtgctcacccaaaaacagaagaagcagcactctgtcctgcacctggttcccattaacgccacctccaaggatgactccgatgtgacagaggtgatgtggcaaccagctcttaggcgtgggagaggcctacaggcccaaggatatggtgtccgaatccaggatgctggagtttatctgctgtatagccaggtcctgtttcaagacgtgactttcaccatgggtcaggtggtgtctcgagaaggccaaggaaggcaggagactctattccgatgtataagaagtatgccctcccacccggaccgggcctacaacagctgctatagcgcaggtgtcttccatttacaccaaggggatattctgagtgtcataattccccgggcaagggcgaaacttaacctctctccacatggaaccttcctgggactttgattttacggatatcttgcttctgttccccatggagctccgaattcttgcgtgtgtgtagatgaggggcgggggacgggcgccaggcattgtccagacctggtcggggcccactggaagcatccagaacagcaccaccatctagcggccgctcgagggaagcacccgccggttggccgaagtccacgaagccgccctctgctagggaaaacccctggttctccatgccacacctctctccaggtgccctctgcctcttcaccccacaagaagccttatcctacgtccttctctccatctatcggaccccagtttccatcactatctccagagatgtagctattatgcgcccgtctacagggggtgcccgacgatgacggtgccttcgcagtcaaattactcttcgggtcccaaggtttggctttcacgcgctccattgccccggcgtggcaggccattccaagcccttccgggctggaactggtgtcggaggagcctcgggtgtatcgtacgccctggtgttggtgttgcctcactcctctgagctcttctttctgatcaagccctgcttaaagttaaataaaatagaatgaatgataccccggcaaaaaaaaaaaaaaaaa

SEQ ID NO: 6557 - DNA, 856 bp, Homo Sapiens
  NM_172140
aattaccttttcactttacacacatcatcttggattgcccattttgcgtggctaaaaagcagagccatgccgctggggaagcagttgcgatttagccatggctgcagcttggaccgtggtgctggtgactttggtgctaggcttggccgtggcaggccctgtccccacttccaagcccaccacaactgggaagggctgccacattggcaggttcaaatctctgtcaccacaggagctagcgagcttcaagaaggccagggacgccttggaagagtcactcaagctgaaaaactggagttgcagctctcctgtcttccccgggaattgggacctgaggcttctccaggtgagggagcgccctgtggccttggaggctgagctggccctgacgctgaaggtcctggaggccgctgctggcccagccctggaggacgtcctagaccagccccttcacaccctgcaccacatcctctcccagctccaggcctgtatccagcctcagcccacagcagggcccaggccccggggccgcctccaccactggctgcaccggctccaggaggcccccaaaaaggagtccgctggctgcctggaggcatctgtcaccttcaacctcttccgcctcctcacgcgagacctcaaatatgtggccgatgggaacctgtgtctgagaacgtcaacccaccctgagtccacctgacaccccacaccttatttatgcgctgagccctactccttccttaatttatttcctctcaccctttatttatgaagctgcagccctgactgagacatagggctgagtttattgttttacttttatacattatgcacaaataaacaacaaggaattgga

SEQ ID NO: 6558 - DNA, 2787 bp, Homo Sapiens
  NM_172166
agcggttaggagggcggggcgcgtgcgcgcgcacctcgctcacgcgccggcgcgctccttttgcaggctcgtggcggtcggtcagcggggcgttctcccacctgtagcgactcagagcctccaagctcatggcctccttaggagcgaacccaaggaggacaccgcagggaccgagacctggggcggcctcctccggcttccccagcccggccccagtgccgggccccagggaggccgaggaggaggaagtcgaggaggaggaggagctggccgagatccatctgtgtgtgctgtggaattcaggatacttgggcattgcctactatgatactagtgactccactatccacttcatgccagatgccccagaccacgagagcctcaagcttctccagagagttctggatgagatcaatccccagtctgttgttacgagtgccaaacaggatgagaatatgactcgatttctgggaaagcttgcctcccaggagcacagagagcctaaaagacctgaaatcatatttttgccaagtgtggattttggtctggagataagcaaacaacgcctcctttctggaaactactccttcatcccagacgccatgactgccactgagaaaatcctcttcctctcttccattattccctttgactgcctcctcacagttcgagcacttggagggctgctgaagttcctgggtcgaagaagaatcggggttgaactggaagactataatgtcagcgtccccatcctgggctttaagaaatttatgttgactcatctggtgaacatagatcaagacacttacagtgttctacagatttttaagagtgagtctcacccctcagtgtacaaagtggccagtggactgaaggaggggctcagcctctttggaatcctcaacagatgccactgtaagtggggagagaagctgctcaggctatggttcacacgtccgactcatgacctgggggagctcagttctcgtctggacgtcattcagttttttctgctgccccagaatctggacatggctcagatgctgcatcggctcctgggtcacatcaagaacgtgcctctgattctgaaacgcatgaagttgtcccacaccaaggtcagcgactggcaggttctctacaagactgtgtacagtgccctgggcctgagggatgcctgccgctccctgccgcagtccatccagctctttcgggacattgcccaagagttctctgatgacctgcaccatatcgccagcctcattgggaaagtagtggactttgagggcagccttgctgaaaatcgcttcacagtcctccccaacatagatcctgaaattgatgagaaaaagcgaagactgatgggacttcccagtttccttactgaggttgcccgcaaggagctggagaatctggactcccgtattccttcatgcagtgtcatctacatccctctgattggcttccttctttctattccccgcctgccttccatggtagaggccagtgactttgagattaatggactggacttcatgtttctctcagaggagaagctgcactatcgtagtgcccgaaccaaggagctggatgcattgctgggggacctgcactgcgagatccgggaccaggagacgctgctgatgtaccagctacagtgccaggtgctggcacgagcagctgtcttaacccgagtattggaccttgcctcccgcctggacgtcctgctggctcttgccagtgctgcccgggactatggctactcaaggccgcgttactccccacaagtccttggggtacgaatccagaatggcagacatcctctgatggaactctgtgcccgaacctttgtgcccaactccacagaatgtggtggggacaaagggagggtcaaagtcatcactggacccaactcatcagggaagagcatatacctcaaacaggtaggcttgatcacattcatggccctggtaggcagctttgtgccagcagaggaggccgaaattggggcagtagacgccatcttcacacgaattcatagctgcgaatccatctcccttggcctctccaccttcatgatcgacctcaaccaggtggcgaaagcagtgaacaatgccactgcacagtcgctggtccttattgatgaatttggaaagggaaccaacacggtggatgggctcgcgcttctggccgctgtgctccgacactggctggcacgtggacccacatgcccccacatctttgtggccaccaactttctgagccttgttcagctacaactgctgccacaagggcccctggtgcagtatttgaccatggagacctgtgaggatggcaacgatcttgtcttcttctatcaggtttgcgaaggtgttgcgaaggccagccatgcctcccacacagctgcccaggctgggcttcctgacaagcttgtggctcgtggcaaggaggtctcagacttgatccgcagtggaaaacccatcaagcctgtcaaggatttgctaaagaagaaccaaatggaaaattgccagacattagtggataagtttatgaaactggatttggaagatcctaacctggacttgaacgttttcatgagccaggaagtgctgcctgctgccaccagcatcctctgagagtccttccagtgtcctccccagcctcctgagactccggtgggctgccatgccctctttgtttccttatctccctcagacgcagagtttttagtttctctagaaattttgtttcatattaggaataaagtttattttgaagaaagaaaaaaaa

SEQ ID NO: 6559 - DNA, 8065 bp, Homo Sapiens
  NM_172217
ggactcatgaagtggcagctaagccctgtccagtggccacccgtcagccaagggccagagaccaggaaaggaagaaaggcagcttcacttcctctttgaggatggagtcgcacagccgcgctggaaagagcagaaaatctgcaaaatttcggtccatctccaggtccctgatgctctgtaatgctaagaccagtgatgatggctctagccctgatgagaaatatcctgatccctttgagatttccttggcccagggcaaggagggaattttccactcatctgtgcagctggcagacacatcggaggctgggcccagcagtgttcctgatctagcactggcctcggaggctgctcaactccaagcagctgggaatgatcgaggcaagacctgtaggaggatattcttcatgaaggaatcttccacagcttcctctcgagaaaagcctggaaaactagaagcacaaagtagtaacttcctgtttcctaaagcctgccaccaaagggcacgcagcaactcaaccagtgttaatccctattgcacaagagaaattgattttccaatgaccaagaaatctgcagcgcccacggacaggcagccttactctctctgcagtaacaggaagtccctctctcaacaattggactgtccagcaggaaaggctgcgggaacttcgagaccaacacggtccctgagcacagctcagctcgtgcagccatctgggggcctccaggcttcagtcatctccaacatcgtgctgatgaagggccaggctaagggtctgggcttcagcatcgttgggggaaaagacagcatttatggccccattgggatttacgtcaaaaccatttttgcagggggagcagcagcagccgatggaaggctacaggaaggtgatgaaattctggagctcaatggtgaatcaatggctggactaacacatcaggatgctttgcagaagttcaagcaagccaaaaaggggctcctcaccctcaccgtgagaacccgcctgacggcgcctccttccctgtgcagccacctgtctcccccactgtgccgctccctgagctccagcacttgtatcaccaaggacagcagctccttcgccttggaaagcccctcggctcccatcagcaccgccaagcccaattacagaatcatggtggaggtttctctgcagaaagaggccggcgtgggcctgggcatcggcctgtgcagcgttccctacttccaatgcatctctggcattttcgtccacacgctgtcaccaggatccgtggcgcacctggacggacgtctccggtgtggggacgagattgtggaaatcagtgattcccctgtgcactgcctgacgctcaatgaagtctacacgatcctgagtcactgtgatcccggtccagtccccatcattgttagccgacatccagacccacaggtctctgaacagcaactcaaagaagctgtggcccaggctgtggaaaacaccaagtttggaaaggagaggcatcagtggagtctggaaggtgtcaaaaggctggaaagcagttggcacgggcggcccaccttggagaaggaacgagagaagaactcagcacccccgcatcgcagggctcagaaggtcatgatccgctccagcagtgacagcagctacatgtctgggtccccagggggaagtcctgggagtggcagtgctgagaagccgtcctctgacgtggacatcagcacacacagccccagcttgcctctggcacgggagccagtggtgctttctatagcatcctccaggctgccccaggagagcccacccctcccagagagccgggacagccacccgccgctgagactgaagaaatcctttgagattttggtgagaaagcctatgtcctccaagcccaagcctccacccagaaaatactttaaaagtgacagtgaccctcagaagagtctggaagagagagagaactcctcatgctcttctgggcacaccccacccacctgtggccaggaagcgagagagctgctgccactgctgctaccacaggaagacacagcagggagaagccctagtgcctctgccggctgcccaggacctggtatcggcccacagaccaagtcctccacagagggcgagccagggtggagaagagccagcccagtgacccaaacatccccgataaaacacccactgcttaagaggcaggctcggatggactatagctttgataccacagccgaagacccttgggttaggatttctgactgcatcaaaaacttatttagccccatcatgagtgagaaccatggccacatgcctctacagcccaatgccagcctgaatgaagaagaagggacacagggccacccagatgggaccccaccaaagctggacaccgccaatggcactcccaaagtttacaagtcagcagacagcagcactgtgaagaaaggtcctcctgtggctcccaagccagcctggtttcgccaaagcttgaaaggtttgaggaatcgtgcttcagacccaagagggctccctgatcctgccttgtccacccagccagcacctgcttccagggagcacctaggatcacacatccgggcctcctcctcctcctcctccatcaggcagagaatcagctcctttgaaacctttggctcctctcaactgcctgacaaaggagcccagagactgagcctccagccctcctctggggaggcagcaaaacctcttgggaagcatgaggaaggacggttttctggactcttggggcgaggggctgcacccactcttgtgccccagcagcctgagcaagtactgtcctcggggtcccctgcagcctccgaggccagagacccaggtgtgtctgagtcccctcccccagggcggcagcccaatcagaaaactctcccccctggcccggacccgctcctaaggctgctgtcaacacaggctgaggaatctcaaggcccagtgctcaagatgcctagccagcgagcacggagcttccccctgaccaggtcccagtcctgtgagacgaagctacttgacgaaaagaccagcaaactctattctatcagcagccaagtgtcatcggctgtcatgaaatccttgctgtgccttccatcttctatctcctgtgcccagactccctgcatccccaaggaaggggcatctccaacatcatcatccaacgaagactcagctgcaaatggttctgctgaaacatctgccttggacacagggttctcgctcaacctttcagagctgagagaatatacagagggtctcacggaagccaaggaagacgatgatggggaccacagttcccttcagtctggtcagtccgttatctccctgctgagctcagaagaattaaaaaaactcatcgaggaggtgaaggttctggatgaagcaacattaaagcaattagacggcatccatgtcaccatcttacacaaggaggaaggtgctggtcttgggttcagcttggcaggaggagcagatctagaaaacaaggtgattacggttcacagagtgtttccaaatgggctggcctcccaggaagggactattcagaagggcaatgaggttctttccatcaacggcaagtctctcaaggggaccacgcaccatgatgccttggccatcctccgccaagctcgagagcccaggcaagctgtgattgtcacaaggaagctgactccagaggccatgcccgacctcaactcctccactgactctgcagcctcagcctctgcagccagtgatgtttctgtagaatctacagcagaggccacagtctgcacggtgacactggagaagatgtcggcagggctgggcttcagcctggaaggagggaagggctccctacacggagacaagcctctcaccattaacaggattttcaaaggagcagcctcagaacaaagtgagacagtccagcctggagatgaaatcttgcagctgggtggcactgccatgcagggcctcacacggtttgaagcctggaacatcatcaaggcactgcctgatggacctgtcacgattgtcatcaggagaaaaagcctccagtccaaggaaaccacagctgctggagactcctaggcaggacatgctgaagccaaagccaataacacacagctaacacacagctcccataaccgctgattctcagggtctctgctgccgccccacccagatgggggaaagcacaggtgggcttcccagtggctgctgcccaggcccagaccttctaggacgccacccagcaaaaggttgttcctaaaataagggcagagtcacacgggggcagctgatacaaattgcagactgtgtaaaaagagagcttaatgataatattgtggtgccacaaataaaatggatttattagaatttcatatgacattcatgcctggcttcgcaaaatgtttcaagtactgtaactgtgtcatgattcacccccaaacagtgacatttatttttctcatgaatctgcaatgtgggcagagattggaatgggcagctcatctctgtcccacttggcatcagctggcgtcatgcaaagtcatgcaaaggctgggaccacgtgagatcattcactcatacatctggccgttgatgttggctgggaactcacctggggctgctggcctgaatgcttataggtggcctctccttgtggcctgggcctcctcacaacatggtgtctggattcccaggatgagcatcccaggatcgcaagagccatgtagaagctgcatcttgtttatacctttgccttggaagttgcatggcatcacctccaccatactccatcagttagagctgacacaaacctgcctgggtttaaggggagaggaaatattgctggggtcatttatgaaaaatacagtttgtcacatgaaacatttgcaaaattgtttttggttggattggagaagtaatcctagggaagggtggtggagccagtaaacagaggagtacaggtgaagcaccaagctcaaagcgtggacaggtgtgccgacagaaggaaccagcgtgtatatgagggtatcaaataaaattgctactacttacctaccacatgccaagcactgtgctcagggctaaacgggcattgcctttagtgatcacagcagcttctacggtgtatggttctgtgccaatgtattgataagagggcacacactgtgtacagtaaatggcttatccagctggtgagtgatgcggcagattgagttttcttctgtgattcggtggagactatcagcccaagatgctttaagtgcacaacattacagggaatgcctgagtgcctggccaaagggatatttggtttggccatctctggatgcctgattgccaagctcaggaccaggcaatgtgactttgcatcagcaacaaccagcatcccttgaccaggcctgggccagagtattggtctcctctcagcccctgatcctgtgaagtaaggatgtgggggaagacctggcaaggacacagatgaaacacaaacaatagtaattctcaggccatcatcagtggagccatgttaatgtaatctgatggcttctccagggtccacaggaagtgaagaatctgtttcccagcagtggactcaaaacccatctgggctcctaaccttcctgtaaacccctttagtggcttcattagagcaggcgttcagctcactgttctattcatctcaaggaataatgggcttagagcagtttctgtcctgctggttaacttgtttggcctattccattctggattttgtcaagcagtagacaagcaattagacaagaacttggaggcaccatttgtatccactttttagacttaatagaaacattgaagatgaacataatctaccaacgaaagacgtgattcaattcaacactcccttcccatgacccaggctgggcaaggaggccacgtgatgtggagggcacattccttgcctgcacaaactcaccatctgtgcacgcagtggccttccctaaaatcagggaattgttttaagtcttatcaagcagccaagggatgaaagagaaggtgggttttcatcaagactggaaggtggggacagggatgagcatggagctggccgtgggcctggggtaccaagagactccttgagagaccaggcaaagcaagtgattgggacagaggttatctgtcccaggttatctgggcatagatgcaggtgagcccatggccctcccagtacctcctgtctctggcctgttttagaaggttctctcctccccaaggagacacaacaactcctagggccactgaagatataactattgcccaggtttctggtctctaggctggggaagtcctctgggtaggaatcagcaagaagatcctaaaacaaaagctcatccatttgcgttccatgatgctgggatttacacttgaggcttagctttgctctgccaacttcttcagagctgacacaggatgaaggcaatgccatcctcaaacactgcaggcatcacagctaacaattgtgaagtcgtcttaactcaccataaaaaggaatccactcccaggcagccctacttctttgctttgcccagcattttactgattcatacattatctcacttgtgccaacactcaagaagcaggctacactgacactggtattcctgcctccatattttctttaaaagacaaatcaaagcagatatattaagtgactgttcaagagcacacttggcccaagtggcagagcttggactggatgcatgttttccagctcctcatccagggctctgaccagtttaacctgatgcagtcacgtggaggagcagtgcaggcacagtatgtcccataggcccagtgagatgcattcttggttggctggccttccacttggctacacagggatgtacaaggcgatcccatcttgataagaccaccacctcagagtatggagctcagagagggcaggcatgaagtttccttggctggtgcacctagaattggctgaactcatgagaagttgatatagaacagtgcttgccacagagcggggactcggtaagcacttaatgaatgaatgaattctaagtcaatccaagagtctgatgatttcttgaaaagggtgttagctaaaggatcttaggcatgactgtagaatttgtagttgcaatagaacagagaaagaggaagctttctgtctccttaacactgagctgtcatgttttaaagcttgctcacatcttggcacatttaagagacagtcaccccaggactcaaaaatagggaagtaacagtaacgcaggggaaacgttttctgtttggaggagcaaaggctgagaacactgtgaaaacattttgcgcgcacaatagtaacctgggtaaatgcagcgtgaagggattttagtcacacgtggtctttcttacaaggaaggtggtgggggtgcagatgaggttgctagagaatgttagaggatccctctctggattggagatagggaaagaaagttgcacggctgctgaggccccttctaggtggcaaggctgtgctccctggttctgatgatgtgcctgggtggacatggcccctgtgagtttgtacagtcttgcagcaggatctagaggggggatttccagccagggctgctagacggaggcctactcttccatctttcctgatggcaggatggcctggccagggcctggaagacagagacctcctgcctccgcctcagtaagacgacaaggaaaggcaaatgcccaagggaaagaaaaggaaggctcttctccccagagttccccatgcagacatgagtgcgtgctcagttcagaatcacttctgagaactcatccctaatgctgcagatttgggctggaacagattcacactgtctggtttcaccgaggacatgaaactccaccttgcggggataaagagagaaaaacaaattcatcaaatggaagacacattgaaagtgtttttccttaatgcttatcctgtttttaaaccattatttccaagttgacaccttttttaaggaaaaataaatattttgcggcattaaagccatata

SEQ ID NO: 6560 - DNA, 3251 bp, Homo Sapiens
  NM_172240
atcgatcacaggctcacaacgcccttccattcatcgctcttattccagtcctggttactaccccacttcctgacatcaaaccagggagaacgcgagtgttagttaacatggcttggtgtgtggccacagctgacccggcgcatacctcccgtcctctctttacagggctggcggtgtctcggggctcggctggccatgcctggagcgcggggtttgactgggccgccgttgttgtagtgaccgggaggcgctgccgctctgggcagacggttccgggagccgcacggtcccctctccttccccatcctctcccctcccctctccgggttcccccacccacaggagccttgggccgaccactcccccgatggcctcagccacggaggaccccgttctggagcgttatttcaaaggccacaaagctgcgatcacctccttggacctcagccccaacggcaagcaacttgctactgcttcttgggatacctttctcatgctatggaatttcaagccacatgctagagcttacagatatgtgggtcacaaggatgttgtaaccagcgtgcagttttctccacatggaaacttattggcgtctgcctcacgagacagaaccgtgagactctggattcctgataagagaggaaaattctcagaatttaaagctcatacagctccagttcgaagtgtagacttttcagctgatggccagtttctagctacagcttctgaagacaaatccataaaagtatggagcatgtatcgccagcgcttcctgtattccttgtatcgacatacacactgggtacgctgtgccaaattttcacccgatggaagactaattgtgtcatgtagtgaggataaaactattaaaatttgggataccacaaataagcaatgtgttaataacttctcagattccgttggatttgcaaattttgtggactttaaccctagtggtacatgcatagcttcagcaggttctgatcaaactgtgaaagtctgggatgtaagagtgaacaaattactacagcattaccaagttcacagcggtggagttaattgcatatcattccatccttcgggtaactatctcatcacagcttcttcagatggtacccttaagattctggacctcttagaaggaaggctcatctatacacttcaaggacatacgggacctgtctttactgtttcattttcaaaaggtggagagctatttgcatcaggaggtgcagacacacaggtcttattatggaggactaactttgatgaattgcattgtaaaggtcttaccaaaagaaatctcaaaagattacattttgattcaccaccacatcttcttgatatctacccaagaacaccacatccccatgaggaaaaagttgagactgtagaaattaatccaaagcttgaggtaatcgatttgcagatctctactccccctgttatggatatcctttcttttgattctaccacaacaacagaaaccagtggtaggactctgccagacaagggtgaagaggcctgtggatatttcttgaacccttccttaatgtcaccagaatgtttgccaacaaccacgaaaaagaaaacagaagacatgagtgacctcccctgtgaaagtcaaaggagcatacctctcgctgtgactgatgctttagagcatattatggaacaactcaatgttttgacacagactgtttcaatcttggagcagcgactgactttgacagaggataagctgaaagactgccttgaaaatcagcaaaagcttttcagtgctgtccaacagaaaagctgaataaaaaattcattttcatttgttgggcagaggcccaataaatgaacaaatgtacatacactcaggaaggtagtacaagatactccatacaacacaaccatgtgctatttatcatggcatttcttaaaagggtgagcaacagaacaaaaggcagaaaaggcatacctaaggactaatttaaacacatatcaatgtgaaggactaatttaaattactatcatttatgattgcagtaataaagtgataagcattcaagcaactctgtattttccccatattattttaaatgtccattttcatttataggccaaatcctgccaggaaagtaaccagatctctggatttcactgttaagtcatttcagattgaccatattcagacagtcatggggtgaaataattcacttacctccaaaatagcatcctatatgccaataatgagttattgatctgactagttgtatgtctttctgttcaaaatagaaattatcctttcttactaatgccttgaaagaatgaacaaataaaaattcccagaccacagaatttccacagcaagaatacacttattttaattaacaatagcacagatatagcatagggcagtgggttttttagttaatttatggcgtactttgtttatccattggccaacctgaaggaaatgaaactcacctatctttctatcacagatgaatgtgctagatgaatgatttgggttgtatctgatcatggttcacaaaaattatgttagtgtgttttcagtatgctaaaaagtcagagtgatacaaaagtgatatttaaaaatatacacacatgtatgtacacatgcttcagaaatattgttgcttagggtgatttgggcagctaaatagtaagtactttttaaaatttttgcatcatcatcttcctatttaatgaattgtgatttaaaacaaaatgaaaataagccaggtattctaaaagatcctggatacaaattaagaattttgctttattttaaaccaaattgagattaaattgaagaaaagcaagcaaattaatttcagcttgattatcaacctgtatcaagaacaaaaatgggaggaggtgtccacatttatggtgtgtataggtaacatggggaaaatgctattctgtgttttggaaaagaagaaatagtgccgtcctatttatttctatatttagaaatttttctcaaagaaatttcaattgtatctatgagatgggtttctaagtatcttattgtgtgttataagtgccttttaatatcatactaagtgtgagcttctggacattttcaagagcttacaaaaactaagtggcattgtatttttataaccccattgagaagactaagtaagaaatgaaatgtcctatcaattttattttgtcatgcttcaaacaataaagacatttctgctttaaaagaaaaaaaaaaaaaaaaa

SEQ ID NO: 6561 - DNA, 1831 bp, Homo Sapiens
  NM_172245
ctctgaagggagctactcagaagcgggagtctccgagagaagaaaagcaggtggaaggagaggaagcggatgccgtggggtttacagcaggaaaatccgtggagacagcagatccgagaagcggcgatgtttgcgtagaaccctctcttcccttctctctgaccagcaccatgcttctcctggtgacaagccttctgctctgtgagttaccacacccagcattcctcctgatcccagagaaatcggatctgcgaacagtggcaccagcctctagtctcaatgtgaggtttgactccaggacgatgaatttaagctgggactgccaagaaaacacaaccttcagcaagtgtttcttaactgacaagaagaacagagtcgtggaacccaggctcagtaacaacgaatgttcgtgcacatttcgtgaaatttgtctgcatgaaggagtcacatttgaggttcacgtgaatactagtcaaagaggatttcaacagaaactgctttatccaaattcaggaagggagggtaccgctgctcagaatttctcctgtttcatctacaatgcggatttaatgaactgtacctgggcgaggggtccgacggccccccgtgacgtccagtattttttgtacatacgaaactcaaagagaaggagggagatccggtgtccttattacatacaagactcaggaacccatgtgggatgtcacctggataacctgtcaggattaacgtctcgcaattactttctggttaacggaaccagccgagaaattggcatccaattctttgattcacttttggacacaaagaaaatagaacgattcaaccctcccagcaatgtcaccgtacgttgcaacacgacgcactgcctcgtacggtggaaacagcccaggacctatcagaagctgtcgtacctggactttcagtaccagctggacgtccacagaaagaatacccagcctggcacggaaaacctactgattaatgtttctggtgatttggaaaatagatacaactttccaagctctgagcccagagcaaaacacagtgtgaagatcagagctgcagacgtccgcatcttgaattggagctcctggagtgaagccattgaatttggttctgacgacgggaacctcggctctgtgtacatttatgtgctcctaatcgtgggaacccttgtctgtggcatcgtcctcggcttcctctttaaaaggttccttaggatacagcggctgttcccgccagttccacagatcaaagacaaactgaatgataaccatgaggtggaagacgagatcatctgggaggaattcaccccagaggaagggaaaggctaccgcgaagaggtcttgaccgtgaaggaaattacctgagacccagagggtgtaggaatggcatggacatctccgcctccgcgacacgggggaactgttttcttgatgatgctgtgaacctttatatcattttctatgtttttatttaaaaacatgacatttggggccaggcgcggtggctcacgcctgtaatcccagcactttgggaggccaaggcaggcggatcacctgaggtcaggagttcaagaccagcctgcccaacatggtgaaaccccatctggactaaaaatgcagaaatttacccaggcacggcggcggacgcccatcatcccagctacttgggaggctgaggcaggagaattgcttgaacccgtgaggcggaggttgtagtgagccaagatcgcaccattgcacaccaacctgcgtgacagagcaagattgcatctcaaaacaaacaataataataaataataaaaacctgatatttggctgggcaa

SEQ ID NO: 6562 - DNA, 1458 bp, Homo Sapiens
  NM_172249
ctctgaagggagctactcagaagcgggagtctccgagagaagaaaagcaggtggaaggagaggaagcggatgccgtggggtttacagcaggaaaatccgtggagacagcagatccgagaagcggcgatgtttgcgtagaaccctgtacgtgcttccttcggcctgtcgctcttcccttctctctgaccagcaccatgcttctcctggtgacaagccttctgctctgtgagttaccacacccagcattcctcctgatcccagagaaatcggatctgcgaacagtggcaccagcctctagtctcaatgtgaggtttgactccaggacgatgaatttaagctgggactgccaagaaaacacaaccttcagcaagtgtttcttaactgacaagaagaacagagtcgtggaacccaggctcagtaacaacgaatgttcgtgcacatttcgtgaaatttgtctgcatgaaggagtcacatttgaggttcacgtgaatactagtcaaagaggatttcaacagaaactgctttatccaaattcaggaagggagggtaccgctgctcagaatttctcctgtttcatctacaatgcggatttaatgaactgtacctgggcgaggggtccgacggccccccgtgacgtccagtattttttgtacatacgaaactcaaagagaaggagggagatccggtgtccttattacatacaagactcaggaacccatgtgggatgtcacctggataacctgtcaggattaacgtctcgcaattactttctggttaacggaaccagccgagaaattggcatccaattctttgattcacttttggacacaaagaaaataggttccttaggatacagcggctgttcccgccagttccacagatcaaagacaaactgaatgataaccatgaggtggaagacgagatcatctgggaggaattcaccccagaggaagggaaaggctaccgcgaagaggtcttgaccgtgaaggaaattacctgagacccagagggtgtaggaatggcatggacatctccgcctccgcgacacgggggaactgttttcttgatgatgctgtgaacctttatatcattttctatgtttttatttaaaaacatgacatttggggccaggcgcggtggctcacgcctgtaatcccagcactttgggaggccaaggcaggcggatcacctgaggtcaggagttcaagaccagcctgcccaacatggtgaaaccccatctggactaaaaatgcagaaatttacccaggcacggcggcggacgcccatcatcccagctacttgggaggctgaggcaggagaattgcttgaacccgtgaggcggaggttgtagtgagccaagatcgcaccattgcacaccaacctgcgtgacagagcaagattgcatctcaaaacaaacaataataataaataataaaaacctgatatttggctgggcaa

SEQ ID NO: 6563 - DNA, 628 bp, Homo Sapiens
  NM_172251
gaaacgtgcacttgcaagctgcccgcaatacgtcatggcgaccaaacgccttttcggggctacccggacgtgggccggctggggggcctgggagctcctaaaccccgccacttccggaagactcctggcccgggattatgccaagaaaccagttatgaagggggccaaatcgggaaaaggtgcagtgaccagcgaggccctcaaggaccccgacgtatgcacagatcctgtccagctcaccacatatgccatgggcgtcaacatctacaaggaagggcaggatgtacccctgaaaccggatgctgagtaccctgaatggctgttcgagatgaacttgggtcccccaaagaccctggaggagctggaccccgagagccgggagtactggcggcggctgcggaaacagaacatctggcgccacaaccggctgagcaagaacaagaggttgtagcatggagggcccggcatcgctgacccccacgccgagggcttgccgttttcccggaggacgtggacttttgtgagacaagaggcggctccccagcctgggtttccatgtgaccccacagtggggctggaccagggccctggaggccaataaagagctttctgggtagaccctaaaaaa

SEQ ID NO: 6564 - DNA, 2999 bp, Homo Sapiens
  NM_172313
gagtactgtgaagatgtggtccccaaggctagagctgaaaagaggcttagggccgggtgagccttccagccagggcctgcctccaagtgatgctcccccagggcagggggcataaggatggcacccagccaggtgggagcctgggccctgcccagcctcaaagctttgagctcaggaaatccggaggcaggggagggggacatcgttgccacattccccagccctttaagacccccaaggcaggaaggctgcccgggcctcaccagcttccctcacaggctccttcctgggaggaaggggctgcctgtgccctcgaaggcgcaagggagggcaggagggaggctcggaaggtgttgcaatccccagcccccgggcctgtcagaggctgagccattaacgacagagctcggggagagaagctggactgcagctggtttcaggaacttctcttgacgagaagagagaccaaggaggccaagcaggggctgggccagaggtgccaacatggggaaactgaggctcggctcggaaaggtgaagtaacttgtccaagatcacaaagctggtgaacatcaagttggtgctatggcaaggctgggaaactgcagcctgacttgggctgccctgatcatcctgctgctccccggaagtctggaggagtgcgggcacatcagtgtctcagcccccatcgtccacctgggggatcccatcacagcctcctgcatcatcaagcagaactgcagccatctggacccggagccacagattctgtggagactgggagcagagcttcagcccgggggcaggcagcagcgtctgtctgatgggacccaggaatctatcatcaccctgccccacctcaaccacactcaggcctttctctcctgctgcctgaactggggcaacagcctgcagatcctggaccaggttgagctgcgcgcaggctaccctccagccataccccacaacctctcctgcctcatgaacctcacaaccagcagcctcatctgccagtgggagccaggacctgagacccacctacccaccagcttcactctgaagagtttcaagagccggggcaactgtcagacccaaggggactccatcctggactgcgtgcccaaggacgggcagagccactgctgcatcccacgcaaacacctgctgttgtaccagaatatgggcatctgggtgcaggcagagaatgcgctggggaccagcatgtccccacaactgtgtcttgatcccatggatgttgtgaaactggagccccccatgctgcggaccatggaccccagccctgaagcggcccctccccaggcaggctgcctacagctgtgctgggagccatggcagccaggcctgcacataaatcagaagtgtgagctgcgccacaagccgcagcgtggagaagccagctgggcactggtgggccccctccccttggaggcccttcagtatgagctctgcgggctcctcccagccacggcctacaccctgcagatacgctgcatccgctggcccctgcctggccactggagcgactggagccccagcctggagctgagaactaccgaacgggcccccactgtcagactggacacatggtggcggcagaggcagctggaccccaggacagtgcagctgttctggaagccagtgcccctggaggaagacagcggacggatccaaggttatgtggtttcttggagaccctcaggccaggctggggccatcctgcccctctgcaacaccacagagctcagctgcaccttccacctgccttcagaagcccaggaggtggcccttgtggcctataactcagccgggacctctcgtcccactccggtggtcttctcagaaagcagaggcccagctctgaccagactccatgccatggcccgagaccctcacagcctctgggtaggctgggagccccccaatccatggcctcagggctatgtgattgagtggggcctgggcccccccagcgcgagcaatagcaacaagacctggaggatggaacagaatgggagagccacggggtttctgctgaaggagaacatcaggccctttcagctctatgagatcatcgtgactcccttgtaccaggacaccatgggaccctcccagcatgtctatgcctactctcaagaaatggctccctcccatgccccagagctgcatctaaagcacattggcaagacctgggcacagctggagtgggtgcctgagccccctgagctggggaagagcccccttacccactacaccatcttctggaccaacgctcagaaccagtccttctccgccatcctgaatgcctcctcccgtggctttgtcctccatggcctggagcccgccagtctgtatcacatccacctcatggctgccagccaggctggggccaccaacagtacagtcctcaccctgatgaccttgaccccagaggggtcggagctacacatcatcctgggcctgttcggcctcctgctgttgctcacctgcctctgtggaactgcctggctctgttgcagccccaacaggaagaatcccctctggccaagtgtcccagacccagctcacagcagcctgggctcctgggtgcccacaatcatggaggaggatgccttccagctgcccggccttggcacgccacccatcaccaagctcacagtgctggaggaggatgaaaagaagccggtgccctgggagtcccataacagctcagagacctgtggcctccccactctggtccagacctatgtgctccagggggacccaagagcagtttccacccagccccaatcccagtctggcaccagcgatcaggctgggcctcccaggcgatctgcatactttaaggaccagatcatgctccatccagccccacccaatggccttttgtgcttgtttcctataacttcagtattgtaaactagtttttggtttgcagtttttgttgttgtttatagacactcttgggtgtaaaaaaaaaaa

SEQ ID NO: 6565 - DNA, 5343 bp, Homo Sapiens
  NM_172364
agaggagaggccagcggattaaagggtttcatgttgccacagcctctcccccagtccctgtctccgaggcctgcttgctaggtggggcgactcttctgtgagctgcagctgtggggcagagagaagccctccccacccaggactgagaggctggagaccccaggctcgccaaggcacggaagacaaaggcctggggcgtcctggggtctgggaggaaggcagacagagctcatggtctgtggctgctctgccctccttcccctccccaaccccaggcccaccatgcctgcaactcccaacttcctcgcaaaccccagctccagcagccgctggattcccctccagccaatgcccgtggcctgggcctttgtgcagaagacctcggccctcctgtggctgctgcttctaggcacctccctgtcccctgcgtggggacaggccaagattcctctggaaacagtgaagctatgggctgacaccttcggcggggacctgtataacactgtgaccaaatactcaggctctctcttgctgcagaagaagtacaaggatgtggagtccagtctgaagatcgaggaggtggatggcttggagctggtgaggaagttctcagaggacatggagaacatgctgcggaggaaagtcgaggcggtccagaatctggtggaagctgccgaggaggccgacctgaaccacgaattcaatgaatccctggtgttcgactattacaactcggtcctgatcaacgagagggacgagaagggcaacttcgtggagctgggcgccgagttcctcctggagtccaatgctcacttcagcaacctgccggtgaacacctccatcagcagcgtgcagctgcccaccaacgtgtacaacaaagacccagatattttaaatggagtctacatgtctgaagccttgaatgctgtcttcgtggagaacttccagagagacccaacgttgacctggcaatattttggcagtgcaactggattcttcaggatctatccaggtataaaatggacacctgatgagaatggagtcattacttttgactgccgaaaccgcggctggtacattcaagctgctacttctcccaaggacatagtgattttggtggacgtgagcggcagtatgaaggggctgaggatgactattgccaagcacaccatcaccaccatcttggacaccctgggggagaatgacttcattaatatcatagcgtacaatgactacgtccattacatcgagccttgttttaaagggatcctcgtccaggcggaccgagacaatcgagagcatttcaaactgctggtggaggagttgatggtcaaaggtgtgggggtcgtggaccaagccctgagagaagccttccagatcctgaagcagttccaagaggccaagcaaggaagcctctgcaaccaggccatcatgctcatcagcgacggcgccgtggaggactacgagccggtgtttgagaagtataactggccagactgtaaggtccgagttttcacttacctcattgggagagaagtgtcttttgctgaccgcatgaagtggattgcatgcaacaacaaaggctactacacgcagatctcaacgctggcggacacccaggagaacgtgatggaatacctgcacgtgctcagccgccccatggtcatcaaccacgaccacgacatcatctggacagaggcctacatggacagcaagctcctcagctcgcaggctcagagcctgacactgctcaccactgtggccatgccagtcttcagcaagaagaacgaaacgcgatcccatggcattctcctgggtgtggtgggctcagatgtggccctgagagagctgatgaagctggcgccccggtacaagcttggagtgcacggatacgcctttctgaacaccaacaatggctacatcctctcccatcccgacctccggcccctgtacagagaggggaagaaactaaaacccaaacctaactacaacagtgtggatctctccgaagtggagtgggaagaccaggctgaatctctgagaacagccatgatcaatagggaaacaggtactctctcgatggatgtgaaggttccgatggataaagggaagcgagttcttttcctgaccaatgactacttcttcacggacatcagcgacacccctttcagtttgggggtggtgctgtcccggggccacggagaatacatccttctggggaacacgtctgtggaagaaggcctgcatgacttgcttcacccagacctggccctggccggtgactggatctactgcatcacagatattgacccagaccaccggaagctcagccagctagaggccatgatccgcttcctcaccaggaaggacccagacctggagtgtgacgaggagctggtccgggaggtgctgtttgacgcggtggtgacagcccccatggaagcctactggacagcgctggccctcaacatgtccgaggagtctgaacacgtggtggacatggccttcctgggcacccgggctggcctcctgagaagcagcttgttcgtgggctccgagaaggtctccgacaggaagttcctgacacctgaggacgaggccagcgtgttcaccctggaccgcttcccgctgtggtaccgccaggcctcagagcatcctgctggcagcttcgtcttcaacctccgctgggcagaaggaccagaaagtgcgggtgaacccatggtggtgacggcaagcacagctgtggcggtgaccgtggacaagaggacagccattgctgcagccgcgggcgtccaaatgaagctggaattcctccagcgcaaattctgggcggcaacgcggcagtgcagcactgtggatgggccgtgcacacagagctgcgaggacagtgatctggactgcttcgtcatcgacaacaacgggttcattctgatctccaagaggtcccgagagacgggaagatttctgggggaggtggatggtgctgtcctgacccagctgctcagcatgggggtgttcagccaagtgactatgtatgactatcaggccatgtgcaaaccctcgagtcaccaccacagtgcagcccagcccctggtcagcccaatttctgccttcttgacggcgaccaggtggctgctgcaggagctggtgctgttcctgctggagtggagtgtctggggctcctggtacgacagaggggccgaggccaaaagtgtcttccatcactcccacaaacacaagaagcaggacccgctgcagccctgcgacacggagtaccccgtgttcgtgtaccagccggccatccgggaggccaacgggatcgtggagtgcgggccctgccagaaggtatttgtggtgcagcagattcccaacagtaacctcctcctcctggtgacagaccccacctgtgactgcagcatcttcccaccagtgctgcaggaggcgacagaagtcaaatataatgcctctgtcaaatgtgaccggatgcgctcccagaagctccgccggcgaccagactcctgccacgccttccatccagaggagaatgcccaggactgcggcggcgcctcggacacctcagcctcgccgcccctactcctgctgcctgtgtgtgcctgggggctactgccccaactcctgcggtgacaccacccagcctgacctgtgttttggcaaggtgatccttccagagccatcccaaaaagtcagcactgacatgggatgcagctaactgcagttgggtcgcccccaggccaacgctcctctcaatcctgggctggtggcccctggctccggagaatgctggatggaacaggaaaccaatcacctggcaccactttcaagatgcttcatggtgcccggtaccatctgccctaggtctcaacatgagcatacttctgacctaaccttcctgtctcctcttcgggaagccagcgtgagctcagcttggaccaagacaaaataatttagttcttcctgtactccagagtccagacccagccaagaaagggtcagttgtttctgaccctttctgtcggagtggtctctggtagaacccaaggacttctgggtactgagaagcagcagcagaatgaggccaaatgcagagatgaggctaaggcaagaatatgccccaactaaagcatagattccccaaagtgaggctcatggtgggaggccactcaccttcctagctgctgctcgaaaaggttttgactgtgttggggtgggggttgggtaagggaatggtcaagactgagaaaggaatgaaatccattcaggaaatatcgacagggctacacgtgatgtccccaaactgctgctattgaagaacttcccaaaacttctttacaaagccctaaaggaaagtttgcatctatgaaaagccaataggctgagacatccaattgctgcatggaaattgatgtacattcaggggacggcaaaaatagctgtaaaatagtgaaaaagagcagtggttgtgctcttttctggccaatgatttacaaaagaatctacttgactctgtccctggagtgaaatccttagggttggaacttgtgggaacattccaacttgctaagcagggtccactgggagggaagctctatctgggaactcacccccagcgcacacacatctcccccagggtcccaaggccccgcagcttcctcccccgaccaaaccccaagacctggatcccaggagacaacagtctccacagtgagagcaacattaagggcaaagccatggagaaatgtgggagaggccggcctcaaatctttccatttaacaaaccccagtgatgggtatggacagcatgcagggcttttggggcgcttccccccgctcctccatcaccctcagcctccacacttcaaagttcaagttcaaagctgttcaagtttcctaccagcaaatagccctaacttgcctctagagtaggccaaatgccaactctgtaaaacacacttacattatcggttacagaatgtcactcttaccgtcatgtcttgcaacaaccctgtgagggcagtattaatgcccccttacagcagaagacactgcagctcgaagacagcttaagtggcagaataatgctagaacagctaaggtttacatgtaccaaataacatgtttcagctcattccatcctcacaacagccccctgaaagtgggtactatcattagtcccatgttatagaaactgcagcagagttgaaaattgcctccaaattaccggaagagtgtatgaagattgaatgtgatgtattcacgtaacatgcttgaaactgcctggcatatactaaacgctaaataaatacatgctaactgcgatcatta

SEQ ID NO: 6566 - DNA, 1182 bp, Homo Sapiens
  NM_172369
gaccactcagacaccgtgtcctcttgcctgggagaggggaagcagatctgaggacatctctgtgccaggccagaaaccgcccacctgcagttccttctccgggatggacgtggggcccagctccctgccccaccttgggctgaagctgctgctgctcctgctgctgctgcccctcaggggccaagccaacacaggctgctacgggatcccagggatgcccggcctgcccggggcaccagggaaggatgggtacgacggactgccggggcccaagggggagccaggaatcccagccattcccgggatccgaggacccaaagggcagaagggagaacccggcttacccggccatcctgggaaaaatggccccatgggaccccctgggatgccaggggtgcccggccccatgggcatccctggagagccaggtgaggagggcagatacaagcagaaattccagtcagtgttcacggtcactcggcagacccaccagccccctgcacccaacagcctgatcagattcaacgcggtcctcaccaacccgcagggagattatgacacgagcactggcaagttcacctgcaaagtccccggcctctactactttgtctaccacgcgtcgcatacagccaacctgtgcgtgctgctgtaccgcagcggcgtcaaagtggtcaccttctgtggccacacgtccaaaaccaatcaggtcaactcgggcggtgtgctgctgaggttgcaggtgggcgaggaggtgtggctggctgtcaatgactactacgacatggtgggcatccagggctctgacagcgtcttctccggcttcctgctcttccccgactagggcgggcagatgcgctcgagccccacgggccttccacctccctcagcttcctgcatggacccaccttactggccagtctgcatccttgcctagaccattctccccaccagatggacttctcctccagggagcccaccctgacccacccccactgcaccccctccccatgggttctctccttcctctgaacttctttaggagtcactgcttgtgtggttcctgggacacttaaccaatgccttctggtactgccattcttttttttttttttttcaagtattggaaggggtggggagatatataaataaatcatgaaatcaatacataaaaaaaaaaaaaaa

SEQ ID NO: 6567 - DNA, 3140 bp, Homo Sapiens
  NM_172390
ggcgggcgctcggcgactcgtccccggggccccgcgcgggcccgggcagcaggggcgtgatgtcacggcagggagggggcgcgggagccgccgggccggcggggaggcgggggaggtgttttccagctttaaaaaggcaggaggcagagcgcggccctgcgtcagagcgagactcagaggctccgaactcgccggcggagtcgccgcgccagatcccagcagcagggcgcgggcaccggggcgcgggcagggctcggagccaccgcgcaggtcctagggccgcggccgggccccgccacgcgcgcacacgcccctcgatgactttcctccggggcgcgcggcgctgagcccggggcgagggctgtcttcccggagacccgaccccggcagcgcggggcggccgcttctcctgtgcctccgcccgccgctccactccccgccgccgccgcgcggatgccaagcaccagctttccagtcccttccaagtttccacttggccctgcggctgcggtcttcgggagaggagaaactttggggcccgcgccgcgcgccggcggcaccatgaagtcagcggaggaagaacactatggctatgcatcctccaacgtcagccccgccctgccgctccccacggcgcactccaccctgccggccccgtgccacaaccttcagacctccacaccgggcatcatcccgccggcggatcacccctcggggtacggagcagctttggacggtgggcccgcgggctacttcctctcctccggccacaccaggcctgatggggcccctgccctggagagtcctcgcatcgagataacctcgtgcttgggcctgtaccacaacaataaccagtttttccacgatgtggaggtggaagacgtcctccctagctccaaacggtccccctccacggccacgctgagtctgcccagcctggaggcctacagagacccctcgtgcctgagcccggccagcagcctgtcctcccggagctgcaactcagaggcctcctcctacgagtccaactactcgtacccgtacgcgtccccccagacgtcgccatggcagtctccctgcgtgtctcccaagaccacggaccccgaggagggctttccccgcgggctgggggcctgcacactgctgggttccccgcggcactccccctccacctcgccccgcgccagcgtcactgaggagagctggctgggtgcccgctcctccagacccgcgtccccttgcaacaagaggaagtacagcctcaacggccggcagccgccctactcaccccaccactcgcccacgccgtccccgcacggctccccgcgggtcagcgtgaccgacgactcgtggttgggcaacaccacccagtacaccagctcggccatcgtggccgccatcaacgcgctgaccaccgacagcagcctggacctgggagatggcgtccctgtcaagtcccgcaagaccaccctggagcagccgccctcagtggcgctcaaggtggagcccgtcggggaggacctgggcagccccccgcccccggccgacttcgcgcccgaagactactcctctttccagcacatcaggaagggcggcttctgcgaccagtacctggcggtgccgcagcacccctaccagtgggcgaagcccaagcccctgtcccctacgtcctacatgagcccgaccctgcccgccctggactggcagctgccgtcccactcaggcccgtatgagcttcggattgaggtgcagcccaagtcccaccaccgagcccactacgagacggagggcagccggggggccgtgaaggcgtcggccggaggacaccccatcgtgcagctgcatggctacttggagaatgagccgctgatgctgcagcttttcattgggacggcggacgaccgcctgctgcgcccgcacgccttctaccaggtgcaccgcatcacagggaagaccgtgtccaccaccagccacgaggccatcctctccaacaccaaagtcctggagatcccactcctgccggagaacagcatgcgagccgtcattgactgtgccggaatcctgaaactcagaaactccgacattgaacttcggaaaggagagacggacatcgggaggaagaacacacgggtacggctggtgttccgcgttcacgtcccgcaacccagcggccgcacgctgtccctgcaggtggcctccaaccccatcgaatgctcccagcgctcagctcaggagctgcctctggtggagaagcagagcacggacagctatccggtcgtgggcgggaagaagatggtcctgtctggccacaacttcctgcaggactccaaggtcattttcgtggagaaagccccagatggccaccatgtctgggagatggaagcgaaaactgaccgggacctgtgcaagccgaattctctggtggttgagatcccgccatttcggaatcagaggataaccagccccgttcacgtcagtttctacgtctgcaacgggaagagaaagcgaagccagtaccagcgtttcacctaccttcccgccaacggtaacgccatctttctaaccgtaagccgtgaacatgagcgcgtggggtgctttttctaaagacgcagaaacgacgtcgccgtaaagcagcgtggcgtgttgcacatttaactgtgtgatgtcccgttagtgagaccgagccatcgatgccctgaaaaggaaaggaaaagggaagcttcggatgcattttccttgatccctgttgggggtggggggcgggggttgcatactcagatagtcacggttattttgcttcttgcgaatgtataacagccaaggggaaaacatggctcttctgctccaaaaaactgagggggtcctggtgtgcatttgcaccctaaagctgcttacggtgaaaaggcaaataggtatagctattttgcaggcacctttaggaataaactttgcttttaagcctgtagtcctgatgtggtctttaaggatggtgaatgagctttgtgctgggcggacgtccccgagacacttctccaggggtaacttcatctcctgggaccacgggcatccaggctggggcaccttctcctcaacctgcctgcccctcacccgccgtgggaatggctccttttcactcatac

SEQ ID NO: 6568 - DNA, 2189 bp, Homo Sapiens
  NM_173042
gccagaggggctaggatgagagacagagggtgtgatggtgggtgctgggagatgtagccgaccttggggctggtggctgggggagtgggtagcctgggaaaggccaggatgtggacggactggtatggcattgagcctgaagtggtccaacttggggttccccagtgcctaggaaagttgtccccttgaatgtcagtgtgaaggtgaaggaggaagcagatgcctgttcatatggaaacaaagacctggctgtgaagaggggaggcggacaccaaagtcctgacacttgggcgggacagaattgatctgtgagagactcatctagttcataccctaggtgaccctgggggtggcatgggggtagattagagatcccagtctggtatcctctggagagtaggagtcccaggagctgaaggtttctggccactgaactttggctaaagcagaggtgtcacagctgctcaagattccctggttaaaaagtgaaagtgaaatagagggtcggggcagtgctttcccagaaggattgctcggcatcctgcccttcccagaagcagctctggtgctgaagagagcactgcctccctgtgtgactgggtgagtccatattctctctttgggtctcaattttgccttccctaatgaaggggtaagattggactaggtaagcatcttacaaccatttgtggtcatgagagctggggtggggaaggattgtcacttgacccccccagctctgtttctaagtgctgaaagagctccaggctatgctacgggaggagaagccagctactgaggaaaagccagctactgagaaaaagcgggagtggtttaccattctcctcccccacctttcaccagagaagaggacgttgtcacagataaagagccaggctcaccagctcctgacgcatgcatcatgaccatgagacacaactggacaccagacctcagccctttgtgggtcctgctcctgtgtgcccacgtcgtcactctcctggtcagagccacacctgtctcgcagaccaccacagctgccactgcctcagttagaagcacaaaggacccctgcccctcccagcccccagtgttcccagcagctaagcagtgtccagcattggaagtgacctggccagaggtggaagtgccactgaatggaacgctgagcttatcctgtgtggcctgcagccgcttccccaacttcagcatcctctactggctgggcaatggttccttcattgagcacctcccaggccgactgtgggaggggagcaccagccgggaacgtgggagcacaggtacgcagctgtgcaaggccttggtgctggagcagctgacccctgccctgcacagcaccaacttctcctgtgtgctcgtggaccctgaacaggttgtccagcgtcacgtcgtcctggcccagctctgggctgggctgagggcaaccttgccccccacccaagaagccctgccctccagccacagcagtccacagcagcagggttaagactcagcacagggccagcagcagcacaaccttgaccagagcttgggtcctacctgtctacctggagtgaacagtccctgactgcctgtaggctgcgtggatgcgcaacacaccccctccttctctgctttgggtcccttctctcaccaaattcaaactccattcccacctacctagaaaatcacagcctccttataatgcctcctcctcctgccattctctctccacctatccattagccttcctaacgtcctactcctcacactgctctactgctcagaaaccaccaagactgttgatgccttagccttgcactccagggccctacctgcatttcccacatgactttctggaagcctcccaactattcttgcttttcccagacagctcccactcccatgtctctgctcatttagtcccgtcttcctcaccgccccagcaggggaacgctcaagcctggttgaaatgctgcctcttcagtgaagtcatcctctttcagctctggccgcattctgcagacttcctatcttcgtgctgtatgttttttttttcccccttcactctaatggactgttccagggaagggatgggggcagcagctgcttcggatccacactgtatctgtgtcatccccacatgggtcctcataaaggattattcaatggagaaaaaaaaaaaaaaa

SEQ ID NO: 6569 - DNA, 4462 bp, Homo Sapiens
  NM_173064
cggcaggaaggccatggcggggcccgagcgctggggccccctgctcctgtgcctgctgcaggccgctccagggaggccccgtctggcccctccccagaatgtgacgctgctctcccagaacttcagcgtgtacctgacatggctcccagggcttggcaacccccaggatgtgacctattttgtggcctatcagagctctcccacccgtagacggtggcgcgaagtggaagagtgtgcgggaaccaaggagctgctatgttctatgatgtgcctgaagaaacaggacctgtacaacaagttcaagggacgcgtgcggacggtttctcccagctccaagtccccctgggtggagtccgaatacctggattacctttttgaagtggagccggccccacctgtcctggtgctcacccagacggaggagatcctgagtgccaatgccacgtaccagctgcccccctgcatgcccccactggatctgaagtatgaggtggcattctggaaggagggggccggaaacaagaccctatttccagtcactccccatggccagccagtccagatcactctccagccagctgccagcgaacaccactgcctcagtgccagaaccatctacacgttcagtgtcccgaaatacagcaagttctctaagcccacctgcttcttgctggaggtcccagaagccaactgggctttcctggtgctgccatcgcttctgatactgctgttagtaattgccgcagggggtgtgatctggaagaccctcatggggaacccctggtttcagcgggcaaagatgccacgggccctggaactgaccagaggggtcaggccgacgcctcgagtcagggccccagccacccaacagacaagatggaagaaggaccttgcagaggacgaagaggaggaggatgaggaggacacagaagatggcgtcagcttccagccctacattgaaccaccttctttcctggggcaagagcaccaggctccagggcactcggaggctggtggggtggactcagggaggcccagggctcctctggtcccaagcgaaggctcctctgcttgggattcttcagacagaagctgggccagcactgtggactcctcctgggacagggctgggtcctctggctatttggctgagaaggggccaggccaagggccgggtggggatgggcaccaagaatctctcccaccacctgaattctccaaggactcgggtttcctggaagagctcccagaagataacctctcctcctgggccacctggggcaccttaccaccggagccgaatctggtccctgggggacccccagtttctcttcagacactgaccttctgctgggaaagcagccctgaggaggaagaggaggcgagggaatcagaaattgaggacagcgatgcgggcagctggggggctgagagcacccagaggaccgaggacaggggccggacattggggcattacatggccaggtgagctgtcccccgacatcccaccgaatctgatgctgctgctgcctttgcaaggactactgggcttcccaagaaactcaagagcctccgtacctcccctgggcggcggaggggcattgcacttccgggaagtccacctagcggctgtttgcctgtcgggctgagcaacaagatgcccctccctcctgtgacccgccctctttaggctgagctataagaggggtggacacagggtgggctgaggtcagaggttggtggggtgtcatcacccccattgtccctagggtgacaggccagggggaaaaattatccccggacaacatgaaacaggtgaggtcaggtcactgcggacatcaagggcggacaccaccaaggggccctctggaacttgagaccactggaggcacacctgctatacctcatgcctttcccagcagccactgaactcccccatcccagggctcagcctcctgattcatgggtcccctagttaggcccagataaaaatccagttggctgagggttttggatgggaagggaagggtggctgtcctcaaatcctggtctttggagtcatggcactgtacggttttagtgtcagacagaccggggttcaaatcccagctctgctgttcactggttgtatgatcttggggaagacatcttccttctctgcctcggcttcctcatctgcagctacgcctgggtgtggtgagggttctaggggatctcagatgtgtgtagcacggagcctgctgtgtcctgggtgctctctacgtggtggccggtagaattctccatctatccaggctccaggagacccctgggcatctcccacctgtggcccctaaacccagagtgactgagagcacttaacattcagcttgtctcatccccagtctacctccttccttctaccctcactgcctcccagtcaggagagtgagctctcagaagccagagccccacccaaggggaccctggtctctccgccttcacctagcaatgggaaccctgcttcccaggggaggaaccaactgctccaccttctagggacccagtttgttggagtaggacagtaacatggcaggaatcggacttctgggcctgtaatcccagtttggatggcacgttagactcttggttgaccgttgtggtccttagaagtcccattctcccttccagttatgagaaaccaatgccttctagattcaggtgactatccttacctgggggtgctgatgcatcctcagttaacctacacccacctgaatatagatgagcgtagctgagttttcacccgtaggaccgaagtgttttgtggtggagtatctgaacaaccttggctctgtggccattcaacctgccaggactaacatttctggatttgtgaagaagggatcttcaaagccattgaacccacagagctgtgttgctttaaagccaccacaagggtacagcattaaatggcagaactggaaaagcttcttagggcatctcatccagggattctcaaaccatgtcccccagaggccttgggctgcagttgcagggggcgccatggggctataggagcctcccactttcaccagagcagcctcactgtgccctgattcacacactgtggctttccacgtgaggttttgtttagagggatccactactcaagaaaaagttagcaaaccactccttttgttgcaaaggagctgaggtcaagggtggcaaaggcacttgtccaaggtcgcccagcagtgctgctctgatgacttgtgcacatccccaagggtaagagcttcgatctctgcacagccgggccaacctctgaccccttgtccatgtcagtaaaatatgaaggtcacagccaggatttctaagggtcaggaggccttcaccgctgctggggcacacacacacacatgcatacacacatacgacacacacctgtgtctccccaggggttttccctgcagtgaggcttgtccagatgattgagcccaggagaggaagaacaaacaaactacggagctggggagggctgtggcttggggccagctcccagggaaattcccagacctgtaccgatgttctctctggcaccagccgagctgcttcgtggaggtaacttcaaaaaagtaaaagctatcatcagcatcatcttagacttgtatgaaataaccactccgtttctattcttaaaccttaccatttttgttttgttttgtttttttgagtcggagttttgttctttttgcctaggctggagtgcagtggtacaatctcggctcactgcaacctccacctcccgggttcaagtgattctcctgcctcagcctcccaagtagctgggattacaggcacccgccaccacacctggctaatttttttgtatttttagtagagacggggtttcaccatgttggccaggctggtctcgaactcctgacctcaggtgatccgcccgcctcggcctcccaaagtgctgggattacaggcgtgagccaccgcgcccagccaaaccttactatttttttaaagaattttttccagagtttaatttctgacatagcttaagttttccagtaactctaaactccatctcctttatcgtcattaagtcattcacaaaaagccaggagaagcatttggaaagggcatgataatcagtataataatttgccttgtgtggtcagcacttaactgtttacaaagccctttcacgtgcacagcaggtgggaactgcgcggtgtgggctgggcctgcgctggaagcatatcccgtgaaaagtgttagtgccttaggtgaaagcaacatgtatccctttagactactaacggtatatgttgttcttatgtatttgtatttatttctattttttctatgtttatgtcatatttaaacgatatcctactgcttgttggtattaccctaaactgtttaaataaagagctctatttttaaagaaaaaaggtacaattga

SEQ ID NO: 6570 - DNA, 3844 bp, Homo Sapiens
  NM_173079
gtttccgggaagatggcggctgtcgaagcggctgcagagccggtaacggtggtggcggctgttgggccaaaggcgaaagacgaagaggaggaggaagaggagccgctgccaccgtgcgaggcggtgcgctgggccccagtgggggcggtggcggaggcccggcctggggcaaccgcgtttttagaagaggcgacggccgaggagcctggcgcggccccgggctccccgccggattcgccgggccggacgctgcggcggctgcgggcagagcggcggcggctggactcggcgctgctggcgctgtcctcgcacttcgcgcaggtgcagttccgcctgcgccaggtggtgcgcggggcgccggcggagcagcagcgccttctgcgggagctcgaagacttcgccttccgcggctgccctcacgtcctaggttacgaagggcccggcgaccccgccagcgatgagggcgatgggctgccaggggaccggccacggttgcggggcgaggaccagagtgagcaggaaaagcaagagcgtctggaaacccaaagggagaagcagaaagaactgatactgcagctcaagacccagctagatgacctggaaacgtttgcctatcaagagggcagttatgactcgctgccacagtccgtggtgttggaaagacagcgggtgatcatagatgagttaataaagaaactggacatgaatctgaatgaggacatcagttccctgtccactgaagagcttcgtcagcgtgtagatgcagcagtggctcagatcgtcaacccagcccgagtcaaagaacagttggttgagcaactgaaaactcagatccgagaccttgagatgtttatcaacttcatccaagatgaagtgggaagccccttgcagacaggtggtggacactgtgagtgcaaggccggtgggaagacaggaaatggctgcagcagaacaggcagcagcagaacgcctccaggaaacagcaaaacaaaggcagaggatgtgaagaaagtccgggagacggggctgcacctgatgcggcgagcgctggccgtgctccagatctttgctgttagccagtttggttgtgccacaggccagatccctccaaccctgtggcagagggtccaggctgacagagactactctcccttgctgaagaggctggaggtgtcagtggacagagtgaagcagctagccttgaggcagcagccacatgaccatgtcatcacctctgccaacctccaggacctctctctgggaggcaaggatgagctgactatggctgtgcggaaggagctaacggtggctgtgagggacctgctggcccatggactgtatgcctcctccccagggatgagccttgttatggctcctattgcttgtttgctgccagccttctcctcggccccagaggccatgcacccgtgggagctctttgtaaagtactaccatgctaagaacggccgtgcttatgtggaatccccagcccggaagctctcccagtccttcgcccttcctgttacgggaggcactgttgtcacccccaaacagagcctactgacagccatccacatggtgctgacagagcatgacccttttaagcgcagtgcagactcagaattgaaggccttggtgtgcatggcactgaatgagcagcgtctggtgtcctgggtgaacctcatctgcaagtccgggtcactcatcgagcctcactaccagccctggagctacatggcacacacaggctttgagagtgccctcaacctgctcagtcgcctcagcagcctcaagtttagcctccctgtagatctggctgtgcgccagctcaaaaacatcaaagatgccttttgatgagagtgccctaaccccagacaagctccttgttcagtagggatagatgtgctagtcttctagcataggagcaaggaatcagaggtggggttaaaggcatttttcccagaccctgctcaggcagtcggccaaatgagtgcaaagtctgttttccccaccaacttagctctcggaaagatgtgctggagggaccctcttgttaagaaggttctgccaggccgggcgcggtggctcacacctgtaatcccagcactttgggaggccgaggcgggcggatcacaaggtcaggagttcgagaccatcctgtctaacacggtgaaaccccatctctactaaaaatacaaaaaaattagtcggacatggtggcaggcacctgtagtcccagctactcgggaggctgaggcaggagaatggcgtgaacccaggaggcggagcttgcagtgagccaagatcgcgccactgcactccagcctgggcgacagagtgagactccgtctcaaaaaaaaaaagaaggttgtacccacagtatacgtgtgggcacttgtgcttgagcctgtattaaaggaatcaggccaggcacagtggctcacgcctgtaatctcagcacattgggaggctgaggtgggcggatcacctgaggtcaggagttcaagaccagcctggccaacatggtgaaaccccatctctactaaaaatacaaaaattagctaggcggggtagtgcatgcctgtaatcccagctactcaggaggctgaggccggagaatcgcttgagcccgagaggtggagactgcagtaagccaagatcatgccactgcactccagcctgggcaacacagggagactccatctcaaaaaaaaaaaaaaaaaaaaaaagacattcaacttgaggctcctgttagttaagctatcttctttcacttgaagcaggtttgagaggcctaggccagaatttaaattccttttatgaatagatttccctttcttcctgaccccaaggtcagaggagactatatattccatggctgcctctaagactaggaataggaatatctgaaaacagcatttctaagggtggtaaccacaggtcgattttaatacgagtcctttttcttgtagaggtaagtaaaatcttcctgacaaggtagtcctcttttcacggcacagacaatgggctttctgtttatgaggggtgagaagtgatgtttgttactatgttctccagcaagtaaacattcctctgctcacctcccaacaagactaacagtctttttagaagtaaatatattcaagacaaacgagaaaatcctggctacccaagtcgagtatatacaggaatacaaatcggtaaccagcagctgttcctcaggttgtgactcactgagcaccacttgtcctggaggctggatgatggaggacatctggttataggtactgtagcagggataggtgccacaggaggataggaactacagcagatcgctgtttccagaacggggaggagtatctcattgtgaaacagactctagagtggttctatttggtcttcagtgttttagcctcattagttcatatttggcatgcagcttgtggtgagtactgttctaggactggccaaaaatgggcaaaatgtatcactccaaacactactgattcagcattgttttcatgtcttaaaattgccacctgcactttgtttctgcactattatgtagtgcattttaacttaaattttttccagcaacatgttacttatttaagatacattactgatatttcattataattagttcaccttccctgtgaaacaagagaattgtaaaatgttgtggaaaatgatacatatgtggatgctaatgaaatcatagtattttgtgtagcttctctgaagaccttagagacctgcagctttggtttataagtgtttgggccttatcagcccatctgatccagatcaatatttttttgaaaactgaaaaaaaaaaaaaaaa

SEQ ID NO: 6571 - DNA, 7010 bp, Homo Sapiens
  NM_173082
gtctttggcctccgggaccagggagggaggacgctggttgtcctggagcccgggaagctcaagggctgagagggagccgctgcgcgagtcttccccacctcttcccgatcccggactagcgaacttcggaccaccacgtccctccggggataaagtggggtcgtgggaaaggaggctgtgcttctcctcatgcactggggcctgcggtgtttgtctcgagcgtccaacacactaggatccgggagtccgtcgtcacgctccttggcctcgcggtcgcttgtttgctcggcctgctgggagcgatccggcgctgacagccccgctcagactccgggagccgcttgtgggtctttcggaagataactgaagttcacagttaccagccaagaaaacttgaaaatgagcagccgacggaaacgtgctcctccagtgagggtagatgaggaaaagaggcagcagcttcattggaatatgcatgaggacagaaggaatgaacctatcatcataagtgatgatgacgagcagccctgcccaggttcagatacctcttctgctcattatatcattctaagtgatagtctaaaggaagaagtggctcacagagataagaagaggtgttcaaaagtggtgagcttctcaaaaccaattgaaaaagaagagactgttggtattttttcccctttgtctgtaaagttaaatattgtgatttctccctatcattttgataattcctggaaagcatttctaggagaattaactcttcagcttcttcctgcacagagtttaattgaaaatttttccgaaaggagtattacattgatgagttcagagtcaagcaatcagttcctgatttatgttcattcaaaaggtgaagatgtagagaaacaaaaaaaagaaccgatgagtatttgtgacaagggtattctggtggagtcatccttcagtggtgaaatgttagaagatttggggtggctacaaaagaagagaagaataaaactctatcagaaaccagaaggaaatcacattatcaaggttggaatttatcttttggaagctggcctagcaaaactagacttcttgagtgatgcaaattcaagaatgaaaaagttcaatcagctcatgaagaaagtaatggaaaagttacacaattctattattccagatgtgttggaagaggatgaagatgatccggagagtgagccagagggacaagacattgacgagctgtatcactttgtgaaacaaacacatcagcaagaaacgcagtccatccaagtggatgtccagcatcctgcattgatccctgtgttgagaccctaccaaagagaggctgtcaattggatgctacaacaagagtgtttcagaagcagtcctgctactgaaagtgccctgcacttcttatggcgagagattgttacatctgagggtctgaaactctactataatccatatacaggctgcatcattcgtgagtacccaaattctgggccgcagttgcttggtggaattttagcagatgagatgggtcttggaaagacagtggaggttttggctctgattctgacacatactcgacaagatgtcaagcaagatgctctcactcttcccgagggaaaagtggtgaattattttattccgtcacattattttggaggaaaactgaaaaagacagaaatccagaatatcgaatttgaaccaaaagaaaaagttcaatgccctcctacacgtgtgatgatactgacagctgtgaaagaaatgaatggaaaaaaaggagtgtccatcctttccatctataagtatgtcagttctatatatagatacgatgttcaacggaacaggagtcttttgaaacggatgctgaaatgtttaatttttgaaggtctcgtgaaacagatcaaaggccatggtttttctgggacttttacattgggaaagaattacaaggaagaggatatatgtgataaaacaaaaaagcaggcagtagggagtccaaggaaaattcagaaagaaactagaaaatcagggaacaaggacacagattctgaatacttgccatcagacacctctgatgatgatgatgatccttactattattattataagtccaggagaaatcgcagtaaattgaggaaaaagcttgttccatccacaaaaaaaggaaaaagtcaaccatttatcaatcccgattcacaaggtcactgtccagctactagcgactctggaataactgatgttgctatgtctaaaagtacatgtatctctgaattcaaccaagaacatgaaacagaggactgtgctgaatctctaaatcatgctgatagtgatgtaccaccttctaataccatgagtccctttaacacctctgattaccgctttgagtgtatatgtggtgaacttgatcagatagatcgtaagcctcgtgttcaatgcctgaagtgtcacctgtggcaacatgcaaagtgtgtgaattatgatgagaaaaatctgaagatcaagcctttttactgcccccactgccttgttgcaatggaaccagtgtcaacaagagcaactctgatcatctctccaagttccatctgtcaccagtgggtggatgagatcaacaggcatgtgaggtcgtcatctcttcgagtcttggtatatcaaggagtgaagaaagatggctttttacaacctcattttttggcagaacaggatatagttatcattacctatgatgtactgcgttcagaattaaattatgtcgatatcccacatagcaatagtgaggatgggcgtcgcctacggaaccagaagcgctatatggctatcccgagccccctggtagctgtggagtggtggaggatctgccttgatgaagctcagatggttgagtgtcccacagtaaaagctgcagaaatggcccagcgtttgagtgggattaatcgatggtgtatcagtggcactccagtacagagaggattagaggatctttttgggttagtggtctttcttggtattgaaccttactgtgtcaaacactggtgggttcgacttctctatcggccttactgcaagaagaatcctcagcatctctacagctttattgccaagatactgtggaggtctgcaaagaaagatgtgattgaccaaatccaaataccaccacaaaccgaagaaatacactggctccacttttctccagtggaaaggcatttctatcaccgtcagcatgaggtgtgctgccaggatgtggtggtaaaactcaggaagatttctgactgggctctgaagctcagcagcctagacagaaggactgtcacctctatcctgtatccattgctgaggctcagacaggcctgctgtcacccacaggctgttcgtggagagttcttgccactccaaaaaagttttgaacagtctaccttttcttttagcaccatgacaatggaagagctgctgacatctttgcagaagaaatgtggaactgaatgtgaagaagcacatcgacagctagtttgtgctctcaatggcttagcaggcattcatattattaaaggtgagtatgccttggcagcagaattgtacagagaagtgttgcgctcctcggaggaacacaaaggaaaactcaaaactgattcacttcaaagacttcatgctacccataacttgatggaattgttgatagccaggcacccagggataccacctaccttgcgtgatggccgacttgaggaagaggccaaacagctgcgagagcactacatgagcaagtgtaatacagaagttgctgaagcccagcaagctttatatcctgtgcagcagaccatccatgagcttcaaagaaagattcattctaattctccttggtggctaaatgtgatccacagagcaatagaatttactattgatgaggagctagttcagcgagtgcgaaatgaaataaccagcaactacaagcaacaaactggcaagctttctatgtcagagaaaggtcttcagttcttacttacaacacaaatggaagagctaaataaatgccagaagctagtaagagaggctgtaaaaaacctggagggacctccatctcgtaatgttattgagtctgcaacagtctgtcacctccgaccagccagacttcctctcaactgctgtgtcttttgtaaagctgatgaattgttcacagagtatgaatcaaagctattttccaacacagtcaaaggccagactgcaatatttgaggagatgatagaagatgaagaaggactggtggatgatcgagcacctaccaccacccggggtctctgggcaataagtgagacagagcgatctatgaaagcaatactatcatttgcaaaatcacataggtttgatgttgaatttgttgatgaaggaagcacttcaatggatctctttgaagcatggaagaaggaatataagttgcttcatgaatattggatggctctgaggaatcgtgtgtctgctgttgatgaacttgcaatggctacagaacgactaagagtgcgtgatcctagggagccaaagcctaatccgcctgttcttcatatcattgaaccacatgaggtagaacaaaaccgaataaaactactaaatgataaagctgttgctacatcacagcttcagaaaaaacttgggcagcttctttacctaactaatttggagaagtctcaagataaaacatcgggaggtgttaatccagaaccttgcccaatctgtgctcgacagctaggaaaacagtgggcggtactgacctgtggtcactgtttctgtaatgaatgcatttctataattattgaacaatacagcgtgggatctcacagaagctccattaagtgtgcaatctgccgccagaccacatctcacaaagaaatctcgtatgtctttacctcagagaaagcaaaccaggaggaggacatccctgtgaagggcagccattctacaaaagtggaagctgtggtcagaactctgatgaaaatacagcttagagatccaggggccaaagcactcgttttctcaacgtggcaagatgtattagatattatttcaaaagctcttactgacaacaacatggaatttgcacaaatcagtcgtgttaagacatttcaggagaacctttcagcatttaaacgtgatccccaaatcaatattttgctgctgcccctgcacacaggttctaatggattaactatcattgaagcaactcatgttctcttggtggagcccatattgaaccctgcccatgagcttcaggccatagggagggtgcaccgaattggacagacaaaacctactattgtacacagattcttaattaaagcaacaatagaagaaagaatgcaggcaatgctgaaaactgctgagagaagtatctatatctgatgatgcaagggaattaagagaggtaatgtgtacttttcttatgataagatcactcataaaacagttggaataagaaagtaaactagtctagttttatatgacctggtatattgaacaaacatagatctcagttttggaagggccttcagtatctttagcacatgattcaccaatatcttgttagtaatattttaagtagatggtgaattatattaacccattttttgagtaggcttataccataactttacacctagtaattttgcagtaatacaactccttacaataagttaatgttagacagttatttgtttcttctgcatcttgctactgaaaacaaaaacaatgaaaatattcatatttctattatgtgtaaagtggtgttagtgtaaacagttaactccaaatagattttttaatgtattaatgattaccttaaaattatctgctttccctactcttaatttttcttattgttaaagtttttatatgttgtaagattgatgtatctgtaaatattgcagtttttatgattttgttttattataacatggaaatatggcagggttttttttttaatcattattatactgatgtcttggattctttttctttcccatgttcttgtgtaactagactttttagccagtgatatctgaattcatggtagagttgttatttcactccagttgttcctcccttaagcacgagtctttgaccttttgaacaagagaatgccatgttcacataagcaaatcgttgcaagtgataataacgaagtgtttcttcttctgtgaggaattaatggactttgaaattgctgaataaggagtagcttgttacatcctagccatttgatgtaatacaaatgttcttatttggcttccttttctttgagccttcagagttttaaaggaccctctttgaccctcaggacttattagctcccagttagctgcctggaaaactcatagaaccattccctagatcccatttgtccgagaggctttggtgcttagttaaggtgcattttcttactctaggtttatagagtgatgtaattcaactgaagaaaacacacacatgcttttggtgcttattcttcagttaaaaggaggtatccattgattcttttatatgaaattaaatcaaactgttatttttatagctcttcacatattaaaaagagctttcatgtacatttacgtgtttaatttacccaacaatcttgtgaagttgatataattaatatctttactgttttaaaggtagagaactgaagttcagatatattgaaactttcttaggacatgtagcaagtaaacagtggagcccaggtcccctgactccatatcttacattcttttactaataacatgtcatgctgagattcagaaggcccatgcttataatttaaaaatgagactatttcagtatttctttgtgtttgttttctactattcctttctgagctatgttttagagaaaacaatttgatatgcttcaattttgtaaaatcaaattacatatatataaaaaaacctatctgtattagacaaaaactgtttttatttatttctgtaagatatccattaaataaatattttagtggaaatgaaaaaaaaaaaaaa

SEQ ID NO: 6572 - DNA, 3040 bp, Homo Sapiens
  NM_173087
cactctctttctctctccctctggcatgcatgctgctggtaggagacccccaagtcaacattgcttcagaaatcctttagcactcatttctcaggagaacttatggcttcagaatcacagctcggtttttaagatggacataacctgtacgaccttctgatgggctttcaactttgaactggatgtggacacttttctctcagatgacagaattactccaacttcccctttgcagttgcttcctttccttgaaggtagctgtatcttattttctttaaaaagctttttcttccaaagccacttgccatgccgaccgtcattagcgcatctgtggctccaaggacagcggctgagccccggtccccagggccagttcctcacccggcccagagcaaggccactgaggctgggggtggaaacccaagtggcatctattcagccatcatcagccgcaattttcctattatcggagtgaaagagaagacattcgagcaacttcacaagaaatgtctagaaaagaaagttctttatgtggaccctgagttcccaccggatgagacctctctcttttatagccagaagttccccatccagttcgtctggaagagacctccggaaatttgcgagaatccccgatttatcattgatggagccaacagaactgacatctgtcaaggagagctaggggactgctggtttctcgcagccattgcctgcctgaccctgaaccagcaccttcttttccgagtcataccccatgatcaaagtttcatcgaaaactacgcagggatcttccacttccagttctggcgctatggagagtgggtggacgtggttatagatgactgcctgccaacgtacaacaatcaactggttttcaccaagtccaaccaccgcaatgagttctggagtgctctgctggagaaggcttatgctaagctccatggttcctacgaagctctgaaaggtgggaacaccacagaggccatggaggacttcacaggaggggtggcagagttttttgagatcagggatgctcctagtgacatgtacaagatcatgaagaaagccatcgagagaggctccctcatgggctgctccattgatacaatcattccggttcagtatgagacaagaatggcctgcgggctggtcagaggtcacgcctactctgtcacggggctggatgaggtcccgttcaaaggtgagaaagtgaagctggtgcggctgcggaatccgtggggccaggtggagtggaacggttcttggagtgatagatggaaggactggagctttgtggacaaagatgagaaggcccgtctgcagcaccaggtcactgaggatggagagttctggatgtcctatgaggatttcatctaccatttcacaaagttggagatctgcaacctcacggccgatgctctgcagtctgacaagcttcagacctggacagtgtctgtgaacgagggccgctgggtacggggttgctctgccggaggctgccgcaacttcccagatactttctggaccaaccctcagtaccgtctgaagctcctggaggaggacgatgaccctgatgactcggaggtgatttgcagcttcctggtggccctgatgcagaagaaccggcggaaggaccggaagctaggggccagtctcttcaccattggcttcgccatctacgaggttcccaaagagatgcacgggaacaagcagcacctgcagaaggacttcttcctgtacaacgcctccaaggccaggagcaaaacctacatcaacatgcgggaggtgtcccagcgcttccgcctgcctcccagcgagtacgtcatcgtgccctccacctacgagccccaccaggagggggaattcatcctccgggtcttctctgaaaagaggaacctctctgaggaagttgaaaataccatctccgtggatcggccagtgccacagcctggcagctctgatcaggaaagtgaggaacagcaacaattccggaacattttcaagcagatagcaggagatgacatggagatctgtgcagatgagctcaagaaggtccttaacacagtcgtgaacaaacacaaggacctgaagacacacgggttcacactggagtcctgccgtagcatgattgcgctcatggatacagatggctctggaaagctcaacctgcaggagttccaccacctctggaacaagattaaggcctggcagaaaattttcaaacactatgacacagaccagtccggcaccatcaacagctacgagatgcgaaatgcagtcaacgacgcaggattccacctcaacaaccagctctatgacatcattaccatgcggtacgcagacaaacacatgaacatcgactttgacagtttcatctgctgcttcgttaggctggagggcatgttcagagcttttcatgcatttgacaaggatggagatggtatcatcaagctcaacgttctggagtggctgcagctcaccatgtatgcctgaaccaggctggcctcatccaaagccatgcaggatcactcaggatttcagtttcaccctctatttccaaagccatttacctcaaaggacccagcagctacacccctacaggcttccaggcacctcatcagtcatgctcctcctccattttaccccctacccatccttgatcggtcatgcctagcctgaccctttagtaaagcaatgaggtaggaagaacaaacccttgtccctttgccatgtggaggaaagtgcctgcctctggtccgagccgcctcggttctgaagcgagtgctcctgcttaccttgctctaggctgtctgcagaagcacctgccggtggcactcagcacctccttgtgctagagccctccatcaccttcacgctgtcccaccatgggccaggaaccaaaccagcactgggttctactgctgtggggtaaactaactcagtggaatagggctggttactttgggctgtccaactcataagtttggctgcattttgaaaaaagctgatctaaataaaggcatgtgtatggctggtc

SEQ ID NO: 6573 - DNA, 6438 bp, Homo Sapiens
  NM_173163
cggcagggcgcgagagcgcacccgcggcggcggtggcggcgactgtgggggggcggcggggaacattggctaagccgacagtggaggcttaggcaccggtggcgggcggctgcggttcctggtgctgctcggcgcgcggccagctttcggaacggaacgctcggcgtcgcgggccccgcccggaaagtttgccgtggagtcgcgacctcttggcccgcgcggcccggcatgaagcggcgttgaggagctgctgccgccgcttgccgctgccgccgccgccgcctgaggaggagctgcagcaccctgggccacgccgatgactactgcaaactgtggcgcccacgacgagctcgacttcaaactcgtctttggcgaggacggggcgccggcgccgccgcccccgggctcgcggcctgcagatcttgagccagatgattgtgcatccatttacatctttaatgtagatccacctccatctactttaaccacaccactttgcttaccacatcatggattaccgtctcactcttctgttttgtcaccatcgtttcagctccaaagtcacaaaaactatgaaggaacttgtgagattcctgaatctaaatatagcccattaggtggtcccaaaccctttgagtgcccaagtattcaaattacatctatctctcctaactgtcatcaagaattagatgcacatgaagatgacctacagataaatgacccagaacgggaatttttggaaaggccttctagagatcatctctatcttcctcttgagccatcctaccgggagtcttctcttagtcctagtcctgccagcagcatctcttctaggagttggttctctgatgcatcttcttgtgaatcgctttcacatatttatgatgatgtggactcagagttgaatgaagctgcagcccgatttacccttggatcccctctgacttctcctggtggctctccagggggctgccctggagaagaaacttggcatcaacagtatggacttggacactcattatcacccaggcaatctccttgccactctcctagatccagtgtcactgatgagaattggctgagccccaggccagcctcaggaccctcatcaaggcccacatccccctgtgggaaacggaggcactccagtgctgaagtttgttatgctgggtccctttcaccccatcactcacctgttccttcacctggtcactcccccaggggaagtgtgacagaagatacgtggctcaatgcttctgtccatggtgggtcaggccttggccctgcagtttttccatttcagtactgtgtagagactgacatccctctcaaaacaaggaaaacttctgaagatcaagctgccatactaccaggaaaattagagctgtgttcagatgaccaagggagtttatcaccagcccgggagacttcaatagatgatggccttggatctcagtatcctttaaagaaagattcatgtggtgatcagtttctttcagttccttcaccctttacctggagcaaaccaaagcctggccacacccctatatttcgcacatcttcattacctccactagactggcctttaccagctcattttggacaatgtgaactgaaaatagaagtgcaacctaaaactcatcatcgagcccattatgaaactgaaggtagccgaggggcagtaaaagcatctactgggggacatcctgttgtgaagctcctgggctataacgaaaagccaataaatctacaaatgtttattgggacagcagatgatcgatatttacgacctcatgcattttaccaggtgcatcgaatcactgggaagacagtcgctactgcaagccaagagataataattgccagtacaaaagttctggaaattccacttcttcctgaaaataatatgtcagccagtattgattgtgcaggtattttgaaactccgcaattcagatatagaacttcgaaaaggagaaactgatattggcagaaagaatactagagtacgacttgtgtttcgtgtacacatcccacagcccagtggaaaagtcctttctctgcagatagcctctatacccgttgagtgctcccagcggtctgctcaagaacttcctcatattgagaagtacagtatcaacagttgttctgtaaatggaggtcatgaaatggttgtgactggatctaattttcttccagaatccaaaatcatttttcttgaaaaaggacaagatggacgacctcagtgggaggtagaagggaagataatcagggaaaaatgtcaaggggctcacattgtccttgaagttcctccatatcataacccagcagttacagctgcagtgcaggtgcacttttatctttgcaatggcaagaggaaaaaaagccagtctcaacgttttacttatacaccagttttgatgaagcaagaacacagagaagagattgatttgtcttcagttccatctttgcctgtgcctcatcctgctcagacccagaggccttcctctgattcagggtgttcacatgacagtgtactgtcaggacagagaagtttgatttgctccatcccacaaacatatgcatccatggtgacctcatcccatctgccacagttgcagtgtagagatgagagtgttagtaaagaacagcatatgattccttctccaattgtacaccagccttttcaagtcacaccaacacctcctgtggggtcttcctatcagcctatgcaaactaatgttgtgtacaatggaccaacttgtcttcctattaatgctgcctctagtcaagaatttgattcagttttgtttcagcaggatgcaactctttctggtttagtgaatcttggctgtcaaccactgtcatccataccatttcattcttcaaattcaggctcaacaggacatctcttagcccatacacctcattctgtgcataccctgcctcatctgcaatcaatgggatatcattgttcaaatacaggacaaagatctctttcttctccagtggctgaccagattacaggtcagccttcgtctcagttacaacctattacatatggtccttcacattcagggtctgctacaacagcttccccagcagcttctcatcccttggctagttcaccgctttctgggccaccatctcctcagcttcagcctatgccttaccaatctcctagctcaggaactgcctcatcaccgtctccagccaccagaatgcattctggacagcactcaactcaagcacaaagtacgggccaggggggtctttctgcaccttcatccttaatatgtcacagtttgtgtgatccagcgtcatttccacctgatggggcaactgtgagcattaaacctgaaccagaagatcgagagcctaactttgcaaccattggtctgcaggacatcactttagatgatgatttgtttaccagtaataattttgacttgcttcagttgagacctacgttttggccagtcccagcaggaagatatctgaggaatctagagtgaacgagataattgggagagacatgtcccagatttctgtttcccaaggagcaggggtgagcaggcaggctcccctcccgagtcctgagtccctggatttaggaagatctgatgggctctaacagtgcttactgcagccttgtgtccaccaccaacttctcagcatgtttctctccttggaccttgggtttccaactctgcagccttcaggtctggggccaggagtgggacccaccatttgtggggaaagtagcattcctccacctcaggccttgggtagatttggcaaaagaacaggagcagcataggctgtttgagctttggggaaatgaactttgctttttatatttaactaggatacttttatatgatgggtgctttgagtgtgaatgcagcaggctctcttgtttccgaggtgctgcttttgcaggtgacctggttacttagctaggattggtgatttgtactgctttatggtcatttgaagggccctttagtttttatgataatttttaaaataggaacttttgataagaccttctagaagcaaaaaaaaaaaaaaaaaaaaaaaaaagaaaaaaaaagaaaagaaaaaaagaaaaagaaaaaaatatcccaagcccacacctatgcctcagaaagtcagcatgtgtcctgaagacgttcatagatttataggaaataaagccaaatgtagctcatacctctttataaaactaaactgttgttagataaaatgagaagagaccattccatcattgaagtgttggaatataaaaagacattccagagcatagccttttggtaactttctaggtaatcttgcaatctctccatactggctccatgttgaaattgctttttccctcaggaccctgggtaagatggctacatttaaggtgactctgaatggtggggttctagcttggtcactttcatttcttgccatcataaaaactagtaggctgtggagtgcgcttcctgtttgtgtcatctggtcgtagaaccttttccaaacagaagcatctgcctttggctgttctgtgacctttgaagccagtctcagtggtttaggcagctttgcagttctaactctagctagaggccaggctgtgtgcagagctaaagcacaaatgagcagtacatcagcatgggcagagaaaatacaggactccagatgggaaggttttaagagtcacactggcatggaaggcttatctgccattctatttatagcctgaaatgattctggcctaccctgtcctgtctgtatgatctaaaaaccagccttttccccagaaggctctgagcacatccagaagtgataacctgaccctccacaccaaagacaccctggtgctgctgctggtgagactggtgtccaaggcagggcccagcagaaactgcagcctgctgtctaccaaaggaggtacccgagttgggtactttaaaaaaaaaaaaaacctgcccttacccctctccctaatgggattttttttacctgttcctgggcccattacagagcctctgaagtttgcagtatgctttcaaatgaaataatatacttccattgattcaggaagcagattttttgagtgcctatatgtgagacagtgtgctggttgaaggcctgatgctgttattccaggagactgcaggcccttgatgccaggactctctctactaaggccagttcaggtctgggaaagggagctggcctattgcccaccacctgttgtcagtaggttaggagctgttgactcaggatgaggaagtatggtctttaaaaaaaacaaaatatattttagatttctcccctaaagttagttagagaaaaaggtctattcttcagcagatcactgtggcccctcttggagctgggtgttttcaaattttcttgaaaagtgagttgtgtcacagaatgtggatagtgagatttgcttctgggcctgtggttggacgcccacagcttcctttggaggggcaagaagttggcctctcggttgacattccagagaaatggccagacttgcccctacccttttgcccctggtgtagctgcctcacatgaggttattgcaagagttccccttgcaataccctttgtgccctcaagaattaaaagcctctatgatccagagttgctatgcaccaaattttgatgccttctaaataccttgatgcctgtagcactagaaatgctttcctatttaaaataaacattaaattttaaaatagagctttgtatactatgtaagcagttttatatcagctttgtaaaagctttggtgttaagagtcaatattttttggctttgtagataaagacttaaatttttgtgcaacatagtggtgttaaagcacacatccattggactatgcaaatcaatttctactagcagcactgagcaactgggcacgtgctagtacgcaccccctcctactctaactgtgctagctcttgggttgaggaatggaatgggtagccttctgcttactggagatgcacagagaaacatggctgaaaacagctttaaaaagaacatgtctttgggttcatgtgtggtgctgctgcccgggtgtaaactatccccacccagggccagccattatcaccagacctcttctgggcctggctgtgaagccctgtttttggtattcagaatggatctttaaggctcagatgggctcaaattgaaaccttgtgttttataaaatggatgtttagtaaaggaactggttctcagttatgtttacagcacttggaattgtgtgttcttgtacattttgtattttaaaaccttttatgggagtgcagtgctccttacacaaatacaaagggaagaagagccagcagttgaggctcctcagttttagtgctgaaataataaacagtgacaggtcaacagtaaaaaaaaaaaaaaaaaa

SEQ ID NO: 6574 - DNA, 3769 bp, Homo Sapiens
  NM_173164
cggctgcggttcctggtgctgctcggcgcgcggccagctttcggaacggaacgctcggcgtcgcgggccccgcccggaaagtttgccgtggagtcgcgacctcttggcccgcgcggcccggcatgaagcggcgttgaggagctgctgccgccgcttgccgctgccgccgccgccgcctgaggaggagctgcagcaccctgggccacgccgatgactactgcaaactgtggcgcccacgacgagctcgacttcaaactcgtctttggcgaggacggggcgccggcgccgccgcccccgggctcgcggcctgcagatcttgagccagatgattgtgcatccatttacatctttaatgtagatccacctccatctactttaaccacaccactttgcttaccacatcatggattaccgtctcactcttctgttttgtcaccatcgtttcagctccaaagtcacaaaaactatgaaggaacttgtgagattcctgaatctaaatatagcccattaggtggtcccaaaccctttgagtgcccaagtattcaaattacatctatctctcctaactgtcatcaagaattagatgcacatgaagatgacctacagataaatgacccagaacgggaatttttggaaaggccttctagagatcatctctatcttcctcttgagccatcctaccgggagtcttctcttagtcctagtcctgccagcagcatctcttctaggagttggttctctgatgcatcttcttgtgaatcgctttcacatatttatgatgatgtggactcagagttgaatgaagctgcagcccgatttacccttggatcccctctgacttctcctggtggctctccagggggctgccctggagaagaaacttggcatcaacagtatggacttggacactcattatcacccaggcaatctccttgccactctcctagatccagtgtcactgatgagaattggctgagccccaggccagcctcaggaccctcatcaaggcccacatccccctgtgggaaacggaggcactccagtgctgaagtttgttatgctgggtccctttcaccccatcactcacctgttccttcacctggtcactcccccaggggaagtgtgacagaagatacgtggctcaatgcttctgtccatggtgggtcaggccttggccctgcagtttttccatttcagtactgtgtagagactgacatccctctcaaaacaaggaaaacttctgaagatcaagctgccatactaccaggaaaattagagctgtgttcagatgaccaagggagtttatcaccagcccgggagacttcaatagatgatggccttggatctcagtatcctttaaagaaagattcatgtggtgatcagtttctttcagttccttcaccctttacctggagcaaaccaaagcctggccacacccctatatttcgcacatcttcattacctccactagactggcctttaccagctcattttggacaatgtgaactgaaaatagaagtgcaacctaaaactcatcatcgagcccattatgaaactgaaggtagccgaggggcagtaaaagcatctactgggggacatcctgttgtgaagctcctgggctataacgaaaagccaataaatctacaaatgtttattgggacagcagatgatcgatatttacgacctcatgcattttaccaggtgcatcgaatcactgggaagacagtcgctactgcaagccaagagataataattgccagtacaaaagttctggaaattccacttcttcctgaaaataatatgtcagccagtattgattgtgcaggtattttgaaactccgcaattcagatatagaacttcgaaaaggagaaactgatattggcagaaagaatactagagtacgacttgtgtttcgtgtacacatcccacagcccagtggaaaagtcctttctctgcagatagcctctatacccgttgagtgctcccagcggtctgctcaagaacttcctcatattgagaagtacagtatcaacagttgttctgtaaatggaggtcatgaaatggttgtgactggatctaattttcttccagaatccaaaatcatttttcttgaaaaaggacaagatggacgacctcagtgggaggtagaagggaagataatcagggaaaaatgtcaaggggctcacattgtccttgaagttcctccatatcataacccagcagttacagctgcagtgcaggtgcacttttatctttgcaatggcaagaggaaaaaaagccagtctcaacgttttacttatacaccagttttgatgaagcaagaacacagagaagagattgatttgtcttcagttccatctttgcctgtgcctcatcctgctcagacccagaggccttcctctgattcagggtgttcacatgacagtgtactgtcaggacagagaagtttgatttgctccatcccacaaacatatgcatccatggtgacctcatcccatctgccacagttgcagtgtagagatgagagtgttagtaaagaacagcatatgattccttctccaattgtacaccagccttttcaagtcacaccaacacctcctgtggggtcttcctatcagcctatgcaaactaatgttgtgtacaatggaccaacttgtcttcctattaatgctgcctctagtcaagaatttgattcagttttgtttcagcaggatgcaactctttctggtttagtgaatcttggctgtcaaccactgtcatccataccatttcattcttcaaattcaggctcaacaggacatctcttagcccatacacctcattctgtgcataccctgcctcatctgcaatcaatgggatatcattgttcaaatacaggacaaagatctctttcttctccagtggctgaccagattacaggtcagccttcgtctcagttacaacctattacatatggtccttcacattcagggtctgctacaacagcttccccagcagcttctcatcccttggctagttcaccgctttctgggccaccatctcctcagcttcagcctatgccttaccaatctcctagctcaggaactgcctcatcaccgtctccagccaccagaatgcattctggacagcactcaactcaagcacaaagtacgggccaggggggtctttctgcaccttcatccttaatatgtcacagtttgtgtgatccagcgtcatttccacctgatggggcaactgtgagcattaaacctgaaccagaagatcgagagcctaactttgcaaccattggtctgcaggacatcactttagatgatggtaagttcatctctgatatgttcttgaagtagtgaagattcagggactttattctcccaagtgtcatgaaaaagtttctatggattgcttattggcatatggttgggcttttaaataagttgttattagaaatatatgttaatatataactttgccaggtaccacggctcacgcctgtatcccagcactttggaaggctgaggcgggtggatcacaaggtcaggagttcaagaccagcctggccaacatggtgtaacgctgtctctactaaaaatacaaaaaattagccaggcatggtggtgtgtgactataatcccagctactcgggaggctgagacaggagaatcacttgaacccgggaggtggcagttgcagggagctaagatcgcgccattgcactccagcctgggcggcagagcaagactccgtctcgggaaaaaaaaaaaaaaaaaa

SEQ ID NO: 6575 - DNA, 6349 bp, Homo Sapiens
  NM_173165
cggcagggcgcgagagcgcacccgcggcggcggtggcggcgactgtgggggggcggcggggaacattggctaagccgacagtggaggcttaggcaccggtggcgggcggctgcggttcctggtgctgctcggcgcgcggccagctttcggaacggaacgctcggcgtcgcgggccccgcccggaaagtttgccgtggagtcgcgacctcttggcccgcgcggcccggcatgaagcggcgttgaggagctgctgccgccgcttgccgctgccgccgccgccgcctgaggaggagctgcagcaccctgggccacgccgatgactactgcaaactgtggcgcccacgacgagctcgacttcaaactcgtctttggcgaggacggggcgccggcgccgccgcccccgggctcgcggcctgcagatcttgagccagatgattgtgcatccatttacatctttaatgtagatccacctccatctactttaaccacaccactttgcttaccacatcatggattaccgtctcactcttctgttttgtcaccatcgtttcagctccaaagtcacaaaaactatgaaggaacttgtgagattcctgaatctaaatatagcccattaggtggtcccaaaccctttgagtgcccaagtattcaaattacatctatctctcctaactgtcatcaagaattagatgcacatgaagatgacctacagataaatgacccagaacgggaatttttggaaaggccttctagagatcatctctatcttcctcttgagccatcctaccgggagtcttctcttagtcctagtcctgccagcagcatctcttctaggagttggttctctgatgcatcttcttgtgaatcgctttcacatatttatgatgatgtggactcagagttgaatgaagctgcagcccgatttacccttggatcccctctgacttctcctggtggctctccagggggctgccctggagaagaaacttggcatcaacagtatggacttggacactcattatcacccaggcaatctccttgccactctcctagatccagtgtcactgatgagaattggctgagccccaggccagcctcaggaccctcatcaaggcccacatccccctgtgggaaacggaggcactccagtgctgaagtttgttatgctgggtccctttcaccccatcactcacctgttccttcacctggtcactcccccaggggaagtgtgacagaagatacgtggctcaatgcttctgtccatggtgggtcaggccttggccctgcagtttttccatttcagtactgtgtagagactgacatccctctcaaaacaaggaaaacttctgaagatcaagctgccatactaccaggaaaattagagctgtgttcagatgaccaagggagtttatcaccagcccgggagacttcaatagatgatggccttggatctcagtatcctttaaagaaagattcatgtggtgatcagtttctttcagttccttcaccctttacctggagcaaaccaaagcctggccacacccctatatttcgcacatcttcattacctccactagactggcctttaccagctcattttggacaatgtgaactgaaaatagaagtgcaacctaaaactcatcatcgagcccattatgaaactgaaggtagccgaggggcagtaaaagcatctactgggggacatcctgttgtgaagctcctgggctataacgaaaagccaataaatctacaaatgtttattgggacagcagatgatcgatatttacgacctcatgcattttaccaggtgcatcgaatcactgggaagacagtcgctactgcaagccaagagataataattgccagtacaaaagttctggaaattccacttcttcctgaaaataatatgtcagccagtattgattgtgcaggtattttgaaactccgcaattcagatatagaacttcgaaaaggagaaactgatattggcagaaagaatactagagtacgacttgtgtttcgtgtacacatcccacagcccagtggaaaagtcctttctctgcagatagcctctatacccgttgagtgctcccagcggtctgctcaagaacttcctcatattgagaagtacagtatcaacagttgttctgtaaatggaggtcatgaaatggttgtgactggatctaattttcttccagaatccaaaatcatttttcttgaaaaaggacaagatggacgacctcagtgggaggtagaagggaagataatcagggaaaaatgtcaaggggctcacattgtccttgaagttcctccatatcataacccagcagttacagctgcagtgcaggtgcacttttatctttgcaatggcaagaggaaaaaaagccagtctcaacgttttacttatacaccagttttgatgaagcaagaacacagagaagagattgatttgtcttcagttccatctttgcctgtgcctcatcctgctcagacccagaggccttcctctgattcagggtgttcacatgacagtgtactgtcaggacagagaagtttgatttgctccatcccacaaacatatgcatccatggtgacctcatcccatctgccacagttgcagtgtagagatgagagtgttagtaaagaacagcatatgattccttctccaattgtacaccagccttttcaagtcacaccaacacctcctgtggggtcttcctatcagcctatgcaaactaatgttgtgtacaatggaccaacttgtcttcctattaatgctgcctctagtcaagaatttgattcagttttgtttcagcaggatgcaactctttctggtttagtgaatcttggctgtcaaccactgtcatccataccatttcattcttcaaattcaggctcaacaggacatctcttagcccatacacctcattctgtgcataccctgcctcatctgcaatcaatgggatatcattgttcaaatacaggacaaagatctctttcttctccagtggctgaccagattacaggtcagccttcgtctcagttacaacctattacatatggtccttcacattcagggtctgctacaacagcttccccagcagcttctcatcccttggctagttcaccgctttctgggccaccatctcctcagcttcagcctatgccttaccaatctcctagctcaggaactgcctcatcaccgtctccagccaccagaatgcattctggacagcactcaactcaagcacaaagtacgggccaggggggtctttctgcaccttcatccttaatatgtcacagtttgtgtgatccagcgtcatttccacctgatggggcaactgtgagcattaaacctgaaccagaagatcgagagcctaactttgcaaccattggtctgcaggacatcactttagatgatgtgaacgagataattgggagagacatgtcccagatttctgtttcccaaggagcaggggtgagcaggcaggctcccctcccgagtcctgagtccctggatttaggaagatctgatgggctctaacagtgcttactgcagccttgtgtccaccaccaacttctcagcatgtttctctccttggaccttgggtttccaactctgcagccttcaggtctggggccaggagtgggacccaccatttgtggggaaagtagcattcctccacctcaggccttgggtagatttggcaaaagaacaggagcagcataggctgtttgagctttggggaaatgaactttgctttttatatttaactaggatacttttatatgatgggtgctttgagtgtgaatgcagcaggctctcttgtttccgaggtgctgcttttgcaggtgacctggttacttagctaggattggtgatttgtactgctttatggtcatttgaagggccctttagtttttatgataatttttaaaataggaacttttgataagaccttctagaagcaaaaaaaaaaaaaaaaaaaaaaaaaagaaaaaaaaagaaaagaaaaaaagaaaaagaaaaaaatatcccaagcccacacctatgcctcagaaagtcagcatgtgtcctgaagacgttcatagatttataggaaataaagccaaatgtagctcatacctctttataaaactaaactgttgttagataaaatgagaagagaccattccatcattgaagtgttggaatataaaaagacattccagagcatagccttttggtaactttctaggtaatcttgcaatctctccatactggctccatgttgaaattgctttttccctcaggaccctgggtaagatggctacatttaaggtgactctgaatggtggggttctagcttggtcactttcatttcttgccatcataaaaactagtaggctgtggagtgcgcttcctgtttgtgtcatctggtcgtagaaccttttccaaacagaagcatctgcctttggctgttctgtgacctttgaagccagtctcagtggtttaggcagctttgcagttctaactctagctagaggccaggctgtgtgcagagctaaagcacaaatgagcagtacatcagcatgggcagagaaaatacaggactccagatgggaaggttttaagagtcacactggcatggaaggcttatctgccattctatttatagcctgaaatgattctggcctaccctgtcctgtctgtatgatctaaaaaccagccttttccccagaaggctctgagcacatccagaagtgataacctgaccctccacaccaaagacaccctggtgctgctgctggtgagactggtgtccaaggcagggcccagcagaaactgcagcctgctgtctaccaaaggaggtacccgagttgggtactttaaaaaaaaaaaaaacctgcccttacccctctccctaatgggattttttttacctgttcctgggcccattacagagcctctgaagtttgcagtatgctttcaaatgaaataatatacttccattgattcaggaagcagattttttgagtgcctatatgtgagacagtgtgctggttgaaggcctgatgctgttattccaggagactgcaggcccttgatgccaggactctctctactaaggccagttcaggtctgggaaagggagctggcctattgcccaccacctgttgtcagtaggttaggagctgttgactcaggatgaggaagtatggtctttaaaaaaaacaaaatatattttagatttctcccctaaagttagttagagaaaaaggtctattcttcagcagatcactgtggcccctcttggagctgggtgttttcaaattttcttgaaaagtgagttgtgtcacagaatgtggatagtgagatttgcttctgggcctgtggttggacgcccacagcttcctttggaggggcaagaagttggcctctcggttgacattccagagaaatggccagacttgcccctacccttttgcccctggtgtagctgcctcacatgaggttattgcaagagttccccttgcaataccctttgtgccctcaagaattaaaagcctctatgatccagagttgctatgcaccaaattttgatgccttctaaataccttgatgcctgtagcactagaaatgctttcctatttaaaataaacattaaattttaaaatagagctttgtatactatgtaagcagttttatatcagctttgtaaaagctttggtgttaagagtcaatattttttggctttgtagataaagacttaaatttttgtgcaacatagtggtgttaaagcacacatccattggactatgcaaatcaatttctactagcagcactgagcaactgggcacgtgctagtacgcaccccctcctactctaactgtgctagctcttgggttgaggaatggaatgggtagccttctgcttactggagatgcacagagaaacatggctgaaaacagctttaaaaagaacatgtctttgggttcatgtgtggtgctgctgcccgggtgtaaactatccccacccagggccagccattatcaccagacctcttctgggcctggctgtgaagccctgtttttggtattcagaatggatctttaaggctcagatgggctcaaattgaaaccttgtgttttataaaatggatgtttagtaaaggaactggttctcagttatgtttacagcacttggaattgtgtgttcttgtacattttgtattttaaaaccttttatgggagtgcagtgctccttacacaaatacaaagggaagaagagccagcagttgaggctcctcagttttagtgctgaaataataaacagtgacaggtcaacagtaaaaaaaaaaaaaaaaaa

SEQ ID NO: 6576 - DNA, 4089 bp, Homo Sapiens
  NM_173176
atctaacctgtcagcccttttactcagccacagcctccggagccgttgcacacctacctgcccggccgacttacctgtacttgccgccgtcccggctcacctggcggtgcccgaggagtagtcgctggagtccgcgcctccctgggactgcaatgtgccgatcttagctgctgcctgagaggatgtctggggtgtccgagcccctgagtcgagtaaagttgggcacgttacgccggcctgaaggccctgcagagcccatggtggtggtaccagtagatgtggaaaaggaggacgtgcgtatcctcaaggtctgcttctatagcaacagcttcaatcctgggaaaaacttcaaactggtcaaatgcactgtccagacggagatccgggagatcatcacctccatcctgctgagcgggcggatcgggcccaacatccggttggctgagtgctatgggctgaggctgaagcacatgaagtccgatgagatccactggctgcacccacagatgacggtgggtgaggtgcaggacaagtatgagtgtctgcacgtggaagccgagtggaggtatgaccttcaaatccgctacttgccagaagacttcatggagagcctgaaggaggacaggaccacgctgctctatttttaccaacagctccggaacgactacatgcagcgctacgccagcaaggtcagcgagggcatggccctgcagctgggctgcctggagctcaggcggttcttcaaggatatgccccacaatgcacttgacaagaagtccaacttcgagctcctagaaaaggaagtggggctggacttgtttttcccaaagcagatgcaggagaacttaaagcccaaacagttccggaagatgatccagcagaccttccagcagtacgcctcgctcagggaggaggagtgcgtcatgaagttcttcaacactctcgccggcttcgccaacatcgaccaggagacctaccgctgtgaactcattcaaggatggaacattactgtggacctggtcattggccctaaagggatccgccagctgactagtcaggacgcaaagcccacctgcctggccgagttcaagcagatcaggtccatcaggtgcctcccgctggaggagggccaggcagtacttcagctgggcattgaaggtgccccccaggccttgtccatcaaaacctcatccctagcagaggctgagaacatggctgacctcatagacggctactgccggctgcagggtgagcaccaaggctctctcatcatccatcctaggaaagatggtgagaagcggaacagcctgccccagatccccatgctaaacctggaggcccggcggtcccacctctcagagagctgcagcatagagtcagacatctacgcagagattcccgacgaaaccctgcgaaggcccggaggtccacagtatggcattgcccgtgaagatgtggtcctgaatcgtattcttggggaaggcttttttggggaggtctatgaaggtgtctacacaaatcacaaaggggagaaaatcaatgtagctgtcaagacctgcaagaaagactgcactctggacaacaaggagaagttcatgagcgaggcagtgatcatgaagaacctcgaccacccgcacatcgtgaagctgatcggcatcattgaagaggagcccacctggatcatcatggaattgtatccctatggggagctgggccactacctggagcggaacaagaactccctgaaggtgctcaccctcgtgctgtactcactgcagatatgcaaagccatggcctacctggagagcatcaactgcgtgcacagggacattgctgtccggaacatcctggtggcctcccctgagtgtgtgaagctgggggactttggtctttcccggtacattgaggacgaggactattacaaagcctctgtgactcgtctccccatcaaatggatgtccccagagtccattaacttccgacgcttcacgacagccagtgacgtctggatgttcgccgtgtgcatgtgggagatcctgagctttgggaagcagcccttcttctggctggagaacaaggatgtcatcggggtgctggagaaaggagaccggctgcccaagcctgatctctgtccaccggtcctttataccctcatgacccgctgctgggactacgaccccagtgaccggccccgcttcaccgagctggtgtgcagcctcagtgacgtttatcagatggagaaggacattgccatggagcaagagaggaatgctcgctaccgaacccccaaaatcttggagcccacagccttccaggaacccccacccaagcccagccgacctaagtacagaccccctccgcaaaccaacctcctggctccaaagctgcagttccaggttcctgagggtctgtgtgccagctctcctacgctcaccagccctatggagtatccatctcccgttaactcactgcacaccccacctctccaccggcacaatgtcttcaaacgccacagcatgcgggaggaggacttcatccaacccagcagccgagaagaggcccagcagctgtgggaggctgaaaaggtcaaaatgcggcaaatcctggacaaacagcagaagcagatggtggaggactaccagtggctcaggcaggaggagaagtccctggaccccatggtttatatgaatgataagtccccattgacgccagagaaggaggtcggctacctggagttcacagggcccccacagaagcccccgaggctgggcgcacagtccatccagcccacagctaacctggaccggactgatgacctggtgtacctcaatgtcatggagctggtgcgggccgtgctggagctcaagaatgagctctgtcagctgccccccgagggctacgtggtggtggtgaagaatgtggggctgaccctgcggaagctcatcgggagcgtggatgatctcctgccttccttgccgtcatcttcacggacagagatcgagggcacccagaaactgctcaacaaagacctggcagagctcatcaacaagatgcggctggcacagcagaacgccgtgacctccctaagtgaggagtgcaagaggcagatgctgacggcttcacacaccctggctgtggacgccaagaacctgctcgacgctgtggaccaggccaaggttctggccaatctggcccacccacctgcagagtgacggagggtgggggccacctgcctgcgtcttccgcccctgcctgccatgtacctcccctgccttgctgttggtcatgtgggtcttccagggggaaggccaaggggagtcaccttcccttgccactttgcacgacgccctctccccacccctacccctggctgtactgctcaggctgcagctggacagaggggactctgggctatggacacagggtgacggtgacaaagatggctcagagggggactgctgctgcctggccactgctccctaagccagcctggtccatgcagggggctcctgggggtggggaggtgtcacatggtgcccctagctttatatatggacatggcaggccgatttgggaaccaagctattcctttcccttcctcttcggccctcagatgtcccttgatgcacagagaagctggggaggagctttgttttgggggtcaggcagccagtgagatgagggatgggcctggcattcttgtacagtgtatattgaaatttatttaatgtgagtttggtctggactgacagcatgtgccctcctgagggaggacctggggcacagtccaggaacaagctaattgggagtccaggcacaggatgctgtgttgtcaacaaaccaagcatcagggggaagaagcagagagatgcggccaagataggaccttgggccaaatccgctctcttcctgcccctctttctctttcttcctttactttcccttgcttttccctcttttcttactcctcctctttctctccccaacccccattctcatctgcacccttcttttctcatgtgtttgcataaacattcttttaacttctttctatttgacttgtggttgaattaaaattgtcccatttgc

SEQ ID NO: 6577 - DNA, 4604 bp, Homo Sapiens
  NM_173216
gctcttcttccttccttctccagtcccttccactgtgcgtcttctgtcccccgttcttccccagcggacccctctttcgagactccctagtggggtccccagctcccgggcgatcctgcccttgccgagcgcgttttctggagtcacctgggggaggggagtcctgggcagggccgggctggggaagacgcctggggcactgcccggcgttaacaaagggagccgataccgaccggcgtgggcgcggagcgggcggccgccaccgagcgtgctgagcaaccgcagcctccgcggccgagagtgcagcgagcaaggggagagccagttgcgcagagccctgcaaccagcagtccagggagaagtggtgaatgtcatggagcccagctgaaatggactggcccccttgagcctgtcccaagccctggtgccaggtgtccatccccgtgctgagatgagttttgatcatcctgagaaaaatgggccttggcctgcagacccaataaaccttccctcccatggataatagtgctaattcctgaggacctgaagggcctgccgcccctgggggattagccagaagcaggcttgttttcctgctcagaacaaagtgacttccctgaacacatcttcattatgattcacaccaacctgaagaaaaagttcagctgctgcgtcctggtctttcttctgtttgcagtcatctgtgtgtggaaggaaaagaagaaagggagttactatgattcctttaaattgcaaaccaaggaattccaggtgttaaagagtctggggaaattggccatggggtctgattcccagtctgtatcctcaagcagcacccaggacccccacaggggccgccagaccctcggcagtctcagaggcctagccaaggccaaaccagaggcctccttccaggtgtggaacaaggacagctcttccaaaaaccttatccctaggctgcaaaagatctggaagaattacctaagcatgaacaagtacaaagtgtcctacaaggggccaggaccaggcatcaagttcagtgcagaggccctgcgctgccacctccgggaccatgtgaatgtatccatggtagaggtcacagattttcccttcaatacctctgaatgggagggttatctgcccaaggagagcattaggaccaaggctgggccttggggcaggtgtgctgttgtgtcgtcagcgggatctctgaagtcctcccaactaggcagagaaatcgatgatcatgacgcagtcctgaggtttaatggggcacccacagccaacttccaacaagatgtgggcacaaaaactaccattcgcctgatgaactctcagttggttaccacagagaagcgcttcctcaaagacagtttgtacaatgaaggaatcctaattgtatgggacccatctgtataccactcagatatcccaaagtggtaccagaatccggattataatttctttaacaactacaagacttatcgtaagctgcaccccaatcagcccttttacatcctcaagccccagatgccttgggagctatgggacattcttcaagaaatctccccagaagagattcagccaaaccccccatcctctgggatgcttggtatcatcatcatgatgacgctgtgtgaccaggtggatatttatgagttcctcccatccaagcgcaagactgacgtgtgctactactaccagaagttcttcgatagtgcctgcacgatgggtgcctaccacccgctgctctatgagaagaatttggtgaagcatctcaaccagggcacagatgaggacatctacctgcttggaaaagccacactgcctggcttccggaccattcactgctaagcacaggctcctcactcttctccatcaggcattaaatgaatggtctcttggccaccccagcctgggaagaacattttcctgaacaattccagcctgctccttttactctaggggcctctgtcagcaagaccatggggacttcaagagcctgtggtcaggaaatcaggtccagccttccctgtagccagacagtttatgagcccagagcctcctgccacacacatgcacacatatctagcattctttccagacagcatcctccccgccttccaccttggtagatgcaaggtctatctctcccatcagggctgccaaagctgggctttgtttttcccagcagaatgatgccattctcacaaaccaatgctctatattgcttgaagtctgcatctaaatattgatttcacgttttaaagaaattctcttaaattacaattgtgcccaatgcagggtggctctggggggcaagtaggtggtacaggggattggaaacatgctccgcgcctccagagaaaagttgctcccgaggtccatgcccctggaacgtgttcctatcactctggctggttgggctggtccttagactgggtgcttatgattaaagggtcttggttagcccactttccctctccatgtggagatggaaggtagagaaggatacagtgtctatcctcaagttgctacggttcagtgagagaggcagacatctgaacaggcaggtaggattcagtgtgctcagtgcactggggatttggagagagatgggcttgctctctctgtgcacccaggagggccacgcacttaaaactgtgtttgtggatcagagaaggctttatagcacagggggcattcagatgagtcttagaggaagagaagaaacatggcaagcagattacatctgagccgtttgaattgtgtttttctttcttcccatgtttattttctaagatctacctgaacttagagactcaagatatttttttaggaaacctcctacccatgtctgaggtagcaagtgcagcctcacgacagataccaggcaatccagagccacaaaacgtgattcctccaggctctgcctggcctgaccctgtcctgtcagctgggtttacataccagtcccattcttccttttcaatacctacccccaaatcttctcctaaccaccatctgttttttttttttaaagcattttttgctttaaaagcatcctgaccccaatttctttgagctcacgggccttttgctgaaggtctctcagggtgtagtggtgtggctctctggacttaacgtcactctcagaggtcagaaccttggagatcagaactgattctcaccaggtgtgagaggtgtggtagcagattgcaatgctctgcacctcttccttgcaagtgagcaacttcaggctctctgggcagaggctggcccactgtagtttgcagacatgctctccagatggttttactaagtcccctctccctgatagggaatcctgctggaccagcgcagccctggtgtggagaggttaaaagacttgcacaggatcaccaagtcatgctgtagagccaggattcctagacccagggctctgcactctcaaggctggccccatgtgctcaaggggatctaatgtttgggctccaaactaaccatctcggagctgggctcctcatttactgccaaaccctcagcttatgtagctagaaagggccctggagtgagaaagcctggattttcaaattgatgctcccctactgactagctgtgccactctgggcaaatgctcttccttgagcctgtttccacacctgtaaagtggggatgatgatcctatctcactgcttttgtgaggattacaggaaagcacctgtcctggctctgtacctggcacgtagtaggtgctcagttcatgctggtttccttcctgcctttagtagggacctgctctgtgctcacacctcggctgcatgcaccctgctgtgacggaggctagtgtggaagaggtcctgtcctcagggaattaactgtcttattgggagacaacaactgtcctccttggaacacccaagaaaccatgcaaagcagtggacaacacagaacacgccctcctcctcgctgcctgcagctccaatctgattctgcttgggaatgggcggagcacgtgggctgcttaactgctgtataggacaagccccttacccctctctgggcccatgaattcctggcttggtttatgttctgatttgacacactgattttaatcttcgaatcatgacactgagtgcagaggaggtggcattccgacagcaggacatacatgttggtgtgaagactgggacgacactgggtagaatctagtttttaattattattaatataaaggatcaaattaatttaaatatgattctgaagtctacagaacttttagttctgtgctgtctatgtggacactttggtaaaatgcaaattatgatatggacgttatcattggtctggtgagatgtttcatatttgtgacagttaatttaaaaattatgagttaatgctgcctgtgtctatggggttctgtcttctttgatagccatctattcatctggatcatgggaccctctctaatccttccaccaatcaaataagctattgctattggtttggagttgagatatcagtctcggaaacttctgaaaaatgctaataattacccaaggattatgtcaaattttaaaataaatgtgtgtgtgtttctttaa

SEQ ID NO: 6578 - DNA, 1436 bp, Homo Sapiens
  NM_173343
gggatgggagatactgttgtggtcacctctggaaaatacattctgctactcttaaaaactagtgacgctcatacaaatcaacagaaagagcttctgaaggaagactttaaagctgcttctgccacgtgctgctgggtctcagtcctccacttcccgtgtcctctggaagttgtcaggagcaatgttgcgcttgtacgtgttggtaatgggagtttctgccttcacccttcagcctgcggcacacacaggggctgccagaagctgccggtttcgtgggaggcattacaagcgggagttcaggctggaaggggagcctgtagccctgaggtgcccccaggtgccctactggttgtgggcctctgtcagcccccgcatcaacctgacatggcataaaaatgactctgctaggacggtcccaggagaagaagagacacggatgtgggcccaggacggtgctctgtggcttctgccagccttgcaggaggactctggcacctacgtctgcactactagaaatgcttcttactgtgacaaaatgtccattgagctcagagtttttgagaatacagatgctttcctgccgttcatctcatacccgcaaattttaaccttgtcaacctctggggtattagtatgccctgacctgagtgaattcacccgtgacaaaactgacgtgaagattcaatggtacaaggattctcttcttttggataaagacaatgagaaatttctaagtgtgagggggaccactcacttactcgtacacgatgtggccctggaagatgctggctattaccgctgtgtcctgacatttgcccatgaaggccagcaatacaacatcactaggagtattgagctacgcatcaagaaaaaaaaagaagagaccattcctgtgatcatttcccccctcaagaccatatcagcttctctggggtcaagactgacaatcccgtgtaaggtgtttctgggaaccggcacacccttaaccaccatgctgtggtggacggccaatgacacccacatagagagcgcctacccgggaggccgcgtgaccgaggggccacgccaggaatattcagaaaataatgagaactacattgaagtgccattgatttttgatcctgtcacaagagaggatttgcacatggattttaaatgtgttgtccataataccctgagttttcagacactacgcaccacagtcaaggaagcctcctccacgttctcctggggcattgtgctggccccactttcactggccttcttggttttggggggaatatggatgcacagacggtgcaaacacagaactggaaaagcagatggtctgactgtgctatggcctcatcatcaagactttcaatcctatcccaagtgaaataaatggaatgaaataattcaaacacaaaaaaaaaaaaaaaaaaaaaaaaaaaaaa

SEQ ID NO: 6579 - DNA, 6185 bp, Homo Sapiens
  NM_173359
agttggcggccgcctggccggtggcgcccgggccgtggaaggtccagtcgtggctgacggcgggcaccaggcgcgcgggccgcatcttgcggcggtcgtggatgaagaagagcaggcggaggtagacgaggggctgtggggtcaccttctcttcctctcttctgccaccccaagtcgtctgtgttgcgtgtcatgcagtgggacagcacgttggtccggacctcaagctacccacgttctagtcccgcctctgtcatttcctagagctgtggcctcggatccctccctggtgccacagcagctgagtgcgcatcaaatctgaagaaaatctacacagtacagacagtacagatattttggagtgtatacaataatatccctcctgtgactagcctgcctttgagatgtagttatcatttaatgagaggagagaggcgaccactttgggaagaggagagtaatgcaaagggtggcgtatggaagatgaaagtccccaaggacagcacgtccacagtttggaaagagttgctgttagcaaccatcggggaacagttcacagactgtgccgcagcagatgatgaagtaataggagttagtgtcagtgttcgggaccgagaagacgtcgtccaagtctggaatgtaaatgcctctttagtgggtgaagcgactgttttagaaaagatctatgaacttctgccccacataacttttaaagcagtattttataaaccccatgaagagcatcatgcttttgaaggtggacgtggaaaacactaattgcactctgtaaagaattctttgtcctttgctgattggttttggaaacggtcttaacaggagggagagtgaagagaagacttgccgaagccgatgctggtcaatttagagtgggtttctgtccttgcagatgggcaattaggactcaaagtggcaggtggggtggggggagattgtgtgggtttctaccgtcacattacttgctttttaaaaaaaacacacacaaaaaactttttttttggctttctaaattctctgttcttttcactctgatttttttttttttttgccgtttaaaattccttattcagcctaattattgttttctacactcccctttcattgaggcacaagaaatgggtttccctttaagtagctctgctgtacctagttaatgagaatatgcataatcgtgacaatactgcttttgaataccacactgtacaaggaggaacactagcttggagaaatctgtcttctgattatttgttgtgacacattcctatgtactgtgagctgggcattgtttttttctgtcccagggaaaagaaaaaccatacttaatgtgattttgcactgacagcacacaaatctttaattttcctttttaaaacatttttttttagtgataaaaggaaaataatagttggattgcataacatgaaaactataatcacaattcagtatcaggatataaatcaagctctaagtctttggaccctctgtggaaacatttctaacccgaattttaatttggccttttcaaccaaaggcttagagtggtagcaagggatttcttccaataggaaacctgatgtttctgatttaaagagaaggtgatattttaattgtttgaattaagctccttgcaaagttcgggtgtgtttacccacttagggctttctttcccagtcaacgctaacacattttgttaaatgatccctttccctgctcacattgtgtgtcatttctcatcatcagtagtcctccagcctgggcagctgtccccaccctttttcatgtaggtgcaggaagttaaatctcatttccaggatgcatgtgaacatttacaaagttgaactttgagtgcattctgctcatatgaattattgggattgttgatatatattgtattatgctaccaaagaaatattggttttattagaaggaaatggtcatcctctggaccatggagactagctcagaatacgctgatttccctctcctgactttgccaagcctttggctgcttttgcctgataaagggcagggccatctgaagacacttcccccagtcggctttggagtcacgggagctagtgcctgctcacacatttttcaaaagggcagtgcactcagaacttcactgtacctgggatttttaattcctcttgcagtgttgaccagcagagagacttgaggctactttaagcctccactatgtgtttgtagataaaattctccattcaaacattttaaaggactttgaacattatctgcttatggaagttgtgcccttcacttggttagtaaccacctcagccataatacttaccatcataggtttcttaaaatgctttttttttttccctaaacttgagtttccttagtgatttcaaaatgaagtataagaatatcagatccagttagcaaaagcctaggacttgtttctccaaacattgtactaacattcaacttgttttaaaattatgactcaagaattttaaaaaattattctggacatgaattaaaacttttttataatataagtatttttctgattgaaaaaaggatataattgacttcactctaattgtcatgtatatttccataagtaaatggattttgaagtatttttattttttgaactttatttaaagcatttgtgatgacatgttcaacttttgcatgtatgtagcctttgaagtaaaaataaataggaatgttaggctcacgttaatatttctagtttctgtttatgatcatggaacatgactagcacacaaagtagatttttgccccagtgaacttctgcaactgtttctgaccctttagaaaataccaactgtgagaaggatttaatttgcctaatgttaaaaacctatcatctaaattactttcagagaggattttgtcagattttggtttggaaattgttttaattgaatatttaatcataatagactttgtatgaactaagctgatttaatcagtttaaaaacctctcattaccttcttagattaaagaagctaatactgttttgagatagaaggaaatattttgtggggcatgtgacttttgtgttaaggcagtttacccatcttggctgatgtggggaaagtgcaaacttccagtagaatcccggtcttttcatccaagtgcttgcaggggcagccttgtagtctgcaaagaaccatgcagaaaccaaagagcttgcttttttgtctttgtaattccttagggtctgtgatatatgccaggaaatctgattgaaactaatatgctttttattctcccattattccctaaattgttatatcacaggcacttgcctacattgggaaagtaaggacaaataatacccatttaaagtaacttgcctatattttgactgtctttcgtaagcacttgctgaactgctgacttaactcagttttaagatttcctctttccccccaacttttccacatttcttaaatgagggtgtaatttactgcaaacatgtacatttaatataatattgctgttagattcgtggtacactttatgaagcaaaaacatgaaaaggaaaccacaactctaataaactttaaattaaagattaagatgactctttctcacccctcttcttgagtttagcccatgtctacaccatgcacacagtcacaagactttatagcttagaaactttaggtataattgggtcctatagacataatatacaatccaccaactgagccttggccgaacttgtcccttgttaaagacgtagggctagccagccacagagctgggtattgaagtcggcaagttgtatcccggtgcaggcgtccttaaatggagagtactcagaatctgccagccttaacctgcccactagccaccctaatcaagcattaaatatctgatccaatctggccactggtgtaactccgtaatcagacatcctgtttgtaaacagctcctccttctctccctctccctctcagagacagaagtggtgctggggtttggagtttgaaaataaccttcctatgacaggaagtgggcttttgctattagttgcccaactcttagaggatcccagcttgtgtctttagacaaaactgacagcctttggaacgatcgcatggtggcgctgccttccagccaacagttctggctcagcagcagaatttatccagctatgtttgtagaatttttttaagatcctactgcattttgctcttaagcttttataaaaatttgacgagaaaatgtaaaaatgatacttggcaataagacatttagttttcatgcacctaataaaaatgtgtcaaagctagatcgctccagatgtgcttaaaatatctcaaatcctaggctctcattggccttataagtgattgggaagaaaaagaataaaataaactcacatataggagatatggaaaatatttcatcaaatattatgcccaaagagagaaaattaggagttgattttttttagcactctgaatatggaacttccttttaaaaatgtaattctacccttcacctttcctacattgtatgtttctgtgagattttactcattacaagtgaaagtagaggactgcctgtgaattgttcacttctgaaaagaatatattgagatcagttaaaattactcaagagtttggtgactcaggattgtaaaaagcctggatctcaacagctgggaggagtcagagggtgaagtgggaaaaaatagggactgagaggcaacgaaaagtccctttgaacctgtggtcatttatagcaattagagtgggttgcccctctacttctcccaagaagaaatcccaaatagattcctttcatgtcagattatactgttctgattttattttctattatttttacatatacatccaaatctaagaatacttattcagattggcccactcaggccaaaagtcactgtcttgtgttctagaaattctttcatgttgctgacataaatccatttttaaaagaacattcagggactcttagaattttagagtggaagggacctttgagatcatctaccagtgcttctcaccccttagcatgcagcaaaatcactcagatacttacttattattcacatttcttgaccccagcactagaaatctgggaggatatctgcatttttaacaagtgccctagtgattctaatgctgatggtgctcagatcgctcttggagaacccctgattttatccaactcccacatatgacaaatgaggaaagcctcccaaccctaagctctgtcaggtgacctgattccaatgtatgataccaacaatcttatgaaggctggagaaaaccattaatactgagacttgagtagatgatgctcgtgaataagaactttatggctgggaccacagcagtcatgggagcccatccctggaagtccataatataaagcctttaatacagagtggtggtttttctcttttctaaataccatttcagtctgttaagagaaaagaaattagtgttcagaaaagtagttactccatatgtgcagtaactacttttctataatgtcttatggcatctggggttcagcatcattgaacaagattaaatgaacgttatagagctataaaattgcatgtaaaataacacaaaactgttcaaatgactatcaaagtagcctgggaatgaatttccactaaaattaattgtcactttcaaaacgtagcttagcaaagctgttactaaactggagagatcctttaatacatagaaatgtcaaaaaaatcaaataagtattccctaaacgatgtgagtgataagcaaaagtcattgcaaagtcagtatttttttgttcatcattgctactgaaattcagagttccattgtatatgtgtgtcttgagtgtaccttattagaatatccaatacaatagcttttggatattctatgcttttgtgtccttcagaaatcatgagattgaaggaatctgtgttaaatgtttttgttttggttgctgcctgaaaaaagttaccaactcatttagtgaaatgcaagatttctttatgaaaatttcaatttctaatatcgaagtcagataatttttcttgaacttttattttggaacagatgtttatttcggatctattaaagtgtcaactttgcattatagaactgaacatgaaaaaaaaaaaaaaaaa

SEQ ID NO: 6580 - DNA, 3793 bp, Homo Sapiens
  NM_173454
ccgccgccgccgcagcgcccgcaccgcgataaaaggggcggccgcgtttcctgacgcgagatccgcgctcgccgccgcccgcccaggcggcgatgacacggcgcccgcggcggcccggaggcgccgggtgggccgtttgctgaccggatcgcggctacccgccagcgtgtccgcggcgccgccgccagcatgggctgtgccccgagcatccacatttccgagcgcctggtggccgaggacgcgcctagccccgcggcaccgccgctgtcgtccggcgggccgcgcctcccgcagggccagaagacggccgccttgccccggacccgcggcgccggcctcttggagtcggagcttcgcgacggcagcggcaagaaggtagcagtagctgatgtgcagtttggccccatgagatttcatcaagatcaacttcaggtacttttagtgtttaccaaagaagataaccaatgtaatggattctgcagggcatgtgaaaaagcagggtttaagtgtacagttaccaaggaggctcaggctgtccttgcctgtttcctggacaaacatcatgacattatcatcatagaccacagaaatcctcgacagctggatgcagaggcactgtgcaggtctatcagatcatcaaaactctcagaaaacacagttattgttggtgtagtacgcagggtggatagagaagagttgtccgtaatgcctttcatttctgctggatttacaaggaggtatgtagaaaaccccaacatcatggcctgctacaatgaactgctccagctggagtttggagaggtgcgatcacaactgaaactcagggcttgtaactcagtattcactgcattagaaaacagtgaagatgcaattgaaattacaagcgaagaccgttttatacaggagtggcaaggaatttactatgccaaaaagaaaaacggagataatatacaacaaaatgtgaagataatacctgtcattggacagggaggaaaaattagacactatgtgtccattatcagagtgtgcaatggcaacaataaggctgagaaaatatccgaatgtgttcagtctgacactcatacagataatcagacaggcaaacataaagacaggagaaaaggctcactagacgtcaaagctgttgcctcccgtgcaactgaagtttccagccagagacgacactcttccatggcccggatacattccatgacaattgaggcgcccatcaccaaggtaatcaatattatcaatgctgcccaggaaagtagtcccatgcctgtgacagaagccctagaccgtgtgctggaaattctaagaaccactgagttatattcaccacagtttggtgctaaagatgatgatccccatgccaatgaccttgttgggggcttaatgtctgatggtttgcgaagactatcagggaatgaatatgttctttcaacaaaaaacactcaaatggtttcaagcaatataatcactcccatctcccttgatgatgtcccaccacggatagctcgggccatggaaaatgaggaatactgggactttgatatttttgaactggaggctgccacccacaataggcctttgatttatcttggtctcaaaatgtttgctcgctttggaatctgtgaattcttacactgctccgagtcaacgctaagatcatggttacaaattatcgaagccaattatcattcctccaatccctaccacaattctacacattctgctgatgtgcttcatgccactgcctattttctctccaaggagaggataaaggaaactttagatccaattgatgaggtcgctgcactcatcgcagccaccattcatgatgtggatcaccctgggagaaccaactccttcctgtgtaatgctggaagtgagctggccattttgtacaatgacactgctgtgctggagagccaccatgcggccttggccttccagctgaccactggagatgataaatgcaatatatttaaaaacatggagaggaatgattatcggacactgcgccaggggattatcgacatggtcttagccacagaaatgacaaagcactttgagcatgtcaacaaatttgtcaacagcatcaacaaacccttggcaacactagaagaaaatggggaaactgataaaaaccaggaagtgataaacactatgcttaggactccagagaaccggaccctaatcaaacgaatgctgattaaatgtgctgatgtgtccaatccctgccgacccctgcagtactgcatcgagtgggctgcacgcatttcggaagaatatttttctcagactgatgaagagaagcagcagggcttacctgtggtgatgccagtgtttgacagaaatacctgcagcatccccaaatcccaaatctctttcattgattacttcatcacagacatgtttgatgcttgggatgcctttgtagacctgcctgatttaatgcagcatcttgacaacaactttaaatactggaaaggactggacgaaatgaagctgcggaacctccgaccacctcctgaatagtgggagacaccacccagagccctgaagctttgttccttcggtcatttggaattcctgagggcagccagagctccttggtcctttcagtactaggcagaacagcccccgatctgcatagcctgtgaaagcccacggggacatcagtaaccttctgcagccaccatccaatgccattactgtcaagtgagacttggccactgtagcctgggcctgctgcaggagctcttcagaaaggcacatgaggaccacggtttgcctcagtttctggtaaaacacaaggtctggagtgcccctgcaaagggtattgatggacttcctgccagtgacagagcatgtctattgcaaacaattctctcagttacgttcagcacttaagaacggctaatggcaataggatctttagcaactttttcacatcatagaaggtgcaatcgctcacttgggaacactactgagagtgacttctcttttaaaattgagtagcagatgaaaaattaaaatttgaacttgattattaatatcaattaaaatgttttatttattttattaaaagctcaatattttctatgaattcaaaaatacttcagagccaaagccaacttcaaataccgtgaccaaatttacatgattcatattcattatgcattacttggtatacagacttattttcataatgcaaattaataaaatgacacttttactgcactatagaaatattcatgtatgttaaacttttctgattgaggctaactggaaaaagctggggtcgtattctaagtgctaaagaaggctgcttctactgtatagaacccagggctctgaaacagctctagccgcctaatgcacttcacaggtaactccccaaggtaaaactagactctcttgttggttcgcaaagaaaagttaggacttaacacttttttctaaaattttataattcaatttccaaaagtctactctattttatactgtttctacaaaatattccttataaaaacaaagaacaaaaattgaatatttaatgaattgacattttataaccaacctgtttttatctacggtgggaatctttgatgccagaaatttataaagaggttctgtatcttcacaccttgaataagcataataccataaaaaatgacacttgacatgtcaatgtatttgtcatttcattttaaactcgtatttgtggtttttttcccagataaaaatgaaattaaaccatttctttttaagaaaaaaaaaaaaaaaa

SEQ ID NO: 6581 - DNA, 3109 bp, Homo Sapiens
  NM_173469
cggccgggcgcgcgcgctctggcctcgtgcacgcgctgaaaccggagcgcgcagggcgcgccagggtgagggggacgggggcggggtgggggcagccctttcccaggcggtagcgggggcggcgtcgctgttgcccttttaagccgcggggccgccgcctcctgccgctggagtcggttacaaaggaagcgccacccaggccgccacacgccgaggcttccgcgcccctcgccattttccagcagcgctcgacgaggcggagccgcgagagcgcggcccaggccggccccgcggggcggtcgcggccgtgacggcggctccgggcccggctccccttccgcgcccggctccccttccgcgcccctcccgccggagatgaggggaagatgtccgtgtcagggctcaaggccgagctgaagttcctggcgtccatcttcgacaagaaccacgagcgattccgcatcgtcagttggaagctggacgagctgcactgccagttcctggtgccgcagcagggcagcccgcactcgctgccgccgccactcacgctccactgcaacatcacggaatcctatccatcttcttcaccgatatggtttgtggattctgaagacccaaatctgacatcagttctggaacgtctagaagatactaagaacaacaatttgcttcgtcagcaattgaagtggttgatatgtgaactctgcagtttatataaccttcctaagcacctggatgttgagatgctagatcaaccactacccacgggtcagaatgggacaacagaagaagtgacttcagaagaagaggaagaagaagaagagatggctgaagatatagaagacttagatcactatgagatgaaggaagaagagcctattagtgggaaaaagtcagaggatgaaggaattgaaaaagaaaatttggcaatattagagaaaattaggaagactcaaaggcaagaccatttaaatggtgcagtgtctgggtcagtgcaagcttcagatagacttatgaaagagctcagggacatatacagatcacagagttataaaacagggatttattcagtggaactcataaatgacagtttatatgactggcatgttaaactgcagaaggttgaccctgatagtcctttgcacagtgatcttcagatcttaaaagaaaaagaaggcatagaatatattttgcttaacttctcttttaaggataactttccatttgatcctccatttgttcgagtggtgttacctgttctctcaggagggtatgtattgggtggaggagcattatgtatggaacttctcacaaaacagggctggagcagtgcctactcaatagaatcggtcatcatgcaaataaatgccaccttagtcaaaggcaaagccagagtgcagtttggagcaaataagaatcaatataatctagcaagagcccaacaatcctataattccattgtacagatacatgagaaaaatggctggtacacccctccaaaggaagatggctaaatatgttgactgttgtatgtttggactaatgttgctttaaagaaaatctttccaacatgcagacaaaagctttgagtgcccctattacagcagtaccgaagatgttagttaatagatattttagtggataatctgtcatctgacatccagtataagttacagcctttgcattttgctcattttagatatcttggactgagcagtggggcctttactgtatttttcctgataaatacacatactggccactccttatctctttttcttgaaaagtgaactttttaaagcagccaagtcaacatcaggctactgaagttgaggctttagggtaactttcctatattgagcccatgggttacaaggatttgcaatatattgttccatttacagccaatacaggtttaatcgatgttcaatattggtttaggaaatttaaggccttctaaatcataatagctctttcatgtctaaaaccattttatgatattgccaaaatgtgataggaaacctactcattaaattgttaaactttttaatgactatgtgaagatatgaattgtttcctgaagataatactcttaattgagttgtattgtacttcttaggcaaagcagtgtaaaactgtatcaattaaggcttgtgagtagtgatttccactggggcatcagagtcttggctgggctgaatctgctgcttgttggttcagtgtttcttatgaacaagagccacagtacagagcttcaagttatttaaaatactaagtcatcttacgtttccattttattaacgggatgttgcaatcgtttgtaaactaataaacttataaagtgattggcacaaagactccttgagcaaaagctgtgcagttaagtacaaaaagatacttaatttggagactcttacagtaatttttgccatgtcaaaacaatggcttttacattgaaagattaatagaaactctacatatgttaatttttttatagaacctgactcaaatcaaggtactctccattttattgccttacctgaatcagtcctttttggttggtaatagatttttttatacacccacgtttgatttaaaagtaaattctagttcttaagcacttttaacaaatccagaagcacatttttctgcacaaacaagttacaaagttcaaaagtgtttcttgtgcattagctttgagattcagtttttaactttgtaaaccacatctgagagacttgtcatttctacattgtgtgtgtttaatttcttttgattccattttggttaagagagcagtaaatagattttctggtattcttgttcacttgattacatttgtataaagttctgattgccagttgctcagataacaagtgacaaggcagaattctttaaatcagtaaagttccttaagcctaaggctaaatcttgaatacattgttgaattctttaatatcctgatggcaagcagactgatagctgcacatttggcatgctttgtttaatggattttatttttaattgcagatttatttggcaatgtacagtaaattttgtaaacttgcatcaagtttatgaataaagaaccatttaaaaatttaaaaaa

SEQ ID NO: 6582 - DNA, 2686 bp, Homo Sapiens
  NM_173471
aacctgaagctctcagagcttccctgtcttcatctatcagcccagggagaggaatcagtggttttccaaaagctgtacctctttccataaatacaaggatgaagggctgagatgatggcagttagaattatattgagaaatggtagcgggatctgagaaagcaaggccatgagttgaaagcagagagaaggcggttcgagtggagccctgatgaagttcatgctcatggttgcccagccattaacacgggctcatcacatctgtttccagattgcttctagaacttagctaccctcgttctataagatggaatgaaaatgcgtactacatacagatcatgaaaagacgcaaagaaaatgcatcttcacattgcagttcagaatcacgccggcctcattctaccgctgctctctcctggatctcggccacggatcttttgctcgcgaaagttcctccgtctagctgcacacaacgctgctgcaggaaaccgaggtaagggatttgccgagacttagctccaccacactccccgaggccccgcccctcctctctggccctcccctaggcccaggtgtctcgcgttgcacgtgcagttgttgtggttctacgtcacgtggtcccggaagttcaagacagacccgcctcaaacatggcggcgcccagcgcgcgaggacgtgatccgcttctgctccggcttggattgtagccttgacgaggtctgagcgaccatggaccggccggggttcgtggcagcgctggtggctggtggggtagcaggtgtttctgttgacttgatattatttcctctggataccattaaaaccaggctgcagagtccccaaggatttagtaaggctggtggttttcatggaatatatgctggcgttccttctgctgctattggatcctttcctaatgctgctgcattttttatcacctatgaatatgtgaagtggtttttgcatgctgattcatcttcatatttgacacctatgaaacatatgttggctgcctctgctggagaagtggttgcctgcctgattcgagttccatctgaagtggttaagcagagggcacaggtatctgcttctacaagaacatttcagattttctctaacatcttatatgaagagggtatccaagggttgtatcgaggctataaaagcacagttttaagagagattcctttttctttggtccagtttcccttatgggagtccttaaaagccctctggtcctggaggcaggatcatgtggtggattcttggcagtcagcagtctgtggagcttttgcaggtggatttgccgctgcagtcaccacccctctagacgtggcaaagacaagaattacgctggcaaaggctggctccagcactgctgatgggaatgtgctctctgtcctgcatggggtctggcggtcacaggggctggcaggattatttgcaggtgtcttccctcgaatggcagccatcagtctgggaggtttcatctttctgggggcttatgaccgaacgcacagcttgctgttggaagttggcagaaagagtccttgaagcagagacaagcctcacctccacttctgtcaagagaggggcctgcagtgcaaaccctcttccgctgagcagctgtctgaactataggccccagtgctgaagaccagttgtgctaagataccggcatggagattgtgccatccgtggtataggctggctggtatgaagtcattggcctgtatgccagagagctaagagaagaaaacggggtctgtggcggtactctgaacaatttcctcagaacctcttaataaataagtttggtaatgctgaggccaggccttttagagctttcatttgatctgtatctgatctttcatttcctgccacctgatggtggattcagcagaaggcaagatggttataattctaaaagaatagcttgtttgtttgtttgggaaaaggagacttggggaagagttgtgtatgtgggtgtttctccccctagttaattcctgttgtgtaagggtaggctttgttgaaaaagaaagaaagattgaactacaggtgcatagcaagcactctttctgggtaactaggctgctggttttaattaccctcagatttcacccataaaaacgcacaattgtattattttacagagatgtgtccagcgccccctgtggtgtgtgagagaaagcagctgcaactcaagtgactaggtgggcccagctggcttcgtgcaggagggcacggtgggtgagccattctcgccattctcatgtcagactgaaaggagggcctgggccagctttgaaaaggcaggatgaaatggaaaggtcaccacacttagggattttagaccttgactaacaagctccaggtgtagaaaaattcaaaacaaaatgtcaggaatctagcagtgttgtctgccctggagcaaacaaacagtatgtgattttgcttcgcctattttttttttcttttttgggggaagataattaaaggcagaatgactgcgtttgtaaaagaaggaccaccaactatactgacatttataaatgaacctttattaaagacacttcaatgccatttgttagacacttcaatattttacatggttttcaatgtacactgtaccaaaatttctataaataaataactttgtacataaaagtaaaaaaaaaaaaaaa

SEQ ID NO: 6583 - DNA, 3277 bp, Homo Sapiens
  NM_173473
cgaacacgccgcggtcctcgtcgtggtgagcgcagccactcaggctggtcctgggggtggggctgtaggggaaagtgctaaagccgctgagtgaagtaagaactctgctagagaggaaatggctgcttcatcatcatcctcctcagctggtggggtcagtggaagttctgtcactggatctggtttcagtgtctcagaccttgccccaccacggaaagcccttttcacctaccccaaaggagctggagagatgttagaagatggctctgagagattcctctgcgaatctgtttttagctatcaagtggcatccacgcttaaacaggtgaaacatgatcagcaagttgctcggatggaaaaactagctggtttggtagaagagctggaggctgacgagtggcggtttaagcccatcgagcagctgctgggattcaccccctcttcaggttgatactgcctggatggtcacctctggtgcgcagcaagtgcaaagccagtgggggactttctcacagcttacatagccatccagagatccacagctacgtcactgaattgttaatgcacatttgtacttggtttctctgtatctattcacaggcaacaaatacttatatgtgtgatctttcagggaatgttttgtttatttgtttttaaaagtattgggaatcagattaagacaatcagtttcagagaaccaggaggtttggggttaagagatactcaaaaattttcacaagccaagtagggcatatatcagatttggccaactgaatggcgtctgtcctgtcatccatatggtgcctggaaatatttaccagtcaaggtcaaggtcagcatctgtggttaaaaatatagcattctgacctaaaaaagttattttgcagatgaatgtgttttcaactcaggacctatccaaatgaggaatttttaaatattcttttttttttcctatttttagacatcaattctatagattctgactttttctaacctcttatagacatgccaaatgctggcaaaaagaagtgctttttggatatggcagcacttgtaaaaataaagcagtaagcaaaatccttttaaacacagaaatcctgagttcttctcattggtggactcaagcaattctgtagcaaataaatcctttgaaagagctccaaattggtggcattatcctttcaaaatctcagggatttgggatgaagtgaagaggtcaaattactttttagaagaagggaatctaaaaaccatctctcctaaacaaatggtagactggctttacttaagggatatttgtctttataggagtacataaatttatcttaatgatatttaagtagtttttttttttttttgggacgaagttttgctcttgttgcccaggctgtatcgcaatggcgcggtctctgctcactgcagcatccgcctcccgggttcgggcggttctcctgcctcagcctcccgagtagctgggattacaggcgcccgccaccacacccagctaattttttgtatatttggtagagacggggtttcaccgtgttgaccaggctggtctcgagcttctggcctcaggtgatccacctgcctcagcctcccaaattgctgggattgcaggcgtgagccaccttgcccagccaatttttttttaaagagacatggtcttgctatgttgcccaggttggtcttgaactcctggcctcaagagatccccccaaccttggcctccaaagtgctgggattacaggcatgagccaccgcgcctggcctcaagtaagtttttataccatgataggggaaaacctggaaggctaagagatgtgctgttttccttcatgggaccccactttccacagtaaacaactggtataatcatttattacgttgtatgcaaattttgccttagacaacatttgtctggttccttattaataacttgcatctgatctgcttagagttgcttaattataagtaaatataatcccagtagcatttagccttaatctcaagagttcaaaatgtttaacacattctacctgacgggaggtggtgacctcattcagtcggttaagagcctgagccctgtgaagttaaacacctgctcatggtcacatagcccaggcagaagaaaatctcggacttggaatagatcccagttgcctgataattcatctcattattgcctctaaagcaaattggagactgggcacagtggctcccacctttaatcccagcacctggggaggctgaggtgagtggatcactagaggtcaggagttcaagaccagtctggccgacatggtgaaactcagtctctattgaaaatacaaaaattagctcagtgtggtggcacacacttgtaatcccagctactcaggaggctgaggcatgagaatcgcttaaacccaggaggcggaggttgcagtgagctgagatcacaccattgcactctagtctgggtgacagagcgagactctgtctcaaaaaaaaaaaaataaagccgggcgtggtggctcacgcctgtaatcccggcactttgggaggctgaggcaggcggattgcctgagatcgggagttcgagaccagcctggccaacatggtgaaaccttgtctctactaaaactacaaaaaaaattggccaggcgtggtggcgggcgcctgtaatcccagctactcgggaggctgaggcagcagaatcgtttgaacccgggaggcggaggttgcagtgagtggagatcgtgcctgtgtgctccagcctgagcaacaagagcgaaactgtctcaaaaaaaagaagaaaataaataaataaaaatcagagcacaagaagtaccagtccaccaactcacattttctatattaataattcttaactaaaagaagttccatattcgacagcattttagttttttaatagtacttattagcatcaaccatcttgataatcaccaagggaaaaattaaaaatacctagactgcaataaacctttaaattggattttcagtgagaatttagaagcaatcactacctttctcgtttcatttgtgtaaccatgcagcataggcactgtgttacatcatctttacgctttggtatttgaacttattacagaattttttctctaaattggatgtttctttatatgaccttggaaactgaagtgatcttagcattaaacaaaaatgctttttgaaaaaaaaaaaaaaaaaaaaaaaaaaaaaaaaaaaaaaaaaaaaaaaaaaaaaaaaaaaaaaaaaaaaaaaaaaaaaaaaaaaa

SEQ ID NO: 6584 - DNA, 2886 bp, Homo Sapiens
  NM_173475
agaaagggtttgactggaggaacctctggagcagctgttggctggctcctctggctgatggcatgttgaggtacatgggccagcggcagcgagggcatccaatccagaggggtccactctagaggccaggccaccagcaccatgggccagtgtgtcaccaagtgtaagaatccctcatcgaccctgggcagcaaaaatggagaccgtgagcccagcaacaagtcacatagcaggaggggtgcaggccaccgtgaggagcaggtaccaccctgtggcaagccaggtggagatatcctcgtcaacgggaccaagaaggccgaggctgccactgaggcctgccagctgccaacgtcctcgggagatgctgggagggagtccaagtccaatgccgaggagtcttccttgcaaagattggaagaactgttcaggcgctacaaggatgagcgggaagatgcaattttggaggaaggcatggagcgcttttgcaatgacctgtgtgttgaccccacagaatttcgagtgctgctcttggcttggaagttccaggctgcaaccatgtgcaaattcaccaggaaggagttttttgatggctgcaaagcaataagtgcagacagcattgacggaatctgtgcacggttccctagcctcttaacagaagccaaacaagaggataaattcaaggatctctaccggtttacatttcagtttggcctggactctgaagaagggcagcggtcactgcatcgggaaatagccattgccctgtggaaactagtctttacccagaacaatcctccggtattggaccaatggctaaacttcctaacagagaacccctcggggatcaagggcatctcccgggacacttggaacatgttccttaacttcactcaggtgattggccctgacctcagcaactacagtgaagatgaggcctggccaagtctctttgacacctttgtggagtgggaaatggagcgaaggaaaagagaaggggaagggagaggtgcactcagctcagggcctgagggcttgtgtcccgaggagcagacttagtggctctgtcccaggagcagcagcaaggatctgccagctgccctgcagccaactgaggaattggaccattttggaaattactgaagatccggatattttctactttacacctttctctgccttgtatctgaaagggctctaaaatgctgtatcatgttttaggcactttcttcatttttttggttattttggttatttcctttttggggggatctcccagaatatttgaacctggttacatgttgtgtatctttttttgaagccttcagatagaataagcctgccatttcttgcacaaatttaggttttttttttgtttttttttgtttttttttttttttttttggtaggggagggcatagagcagggcggggggatgggactgttaggttgaattaacattacaaaatgatacagtgccagatctcagtttcgcatattgtttttcagggcaggtctgtactgtgtgtagtgctgtttacatagatgaatttaggttgtaataattatttttaaagatttacacagatttgaatagcagtgttaactgttaaccacattgcattaattcccaggcgatttagagctcttggagagccaaggccagccaagagcatttgtagtctggtgacaacccccttttaagctaatttatccagaaccctgatttccctcacttcttgctcattccttctttgacctattgcatttcatgttgagtttttccatcaacatgctgcacctgtcagtcaagtgagcattttttaagaacacattgtactgagaaccacttaagcattgaatgcggagaaagcagtgctacctcagttttgctggaagtagacttctttgatagttttctttctttgatgaagtttctgtattttcatgttgtaagtggaaatacttttttttgtttgtttgtttcatttgccttggagccaaagtttctgttcctggtggtcgggaaactgcctgccggccaactgacttgaaggaaaactgtggtatggagctctgcttgaatttttttttttttaatatttttatttttttctttgaatatcatcagcttacttgtctggcaagggcagaagcctggggttggcctgaactctgccaaacaaatatcaaagtgtatttaatagttaaatttgtgccctttcccttcttgctgcacccatgttgtcacttaacccccaggagttatttattatctttttgttaaagtcaggctcatttggggtaatgtgatgactgtttaggtttacatgaccctcctctcctttccctacccccaaatatgtatatatacatatataaaatatgtatatattttacctatataaaatatatatatatacacatatatgtatctatattcctttgtttctttgcctgcttatactggccataaaagagggagctgccttcaatgtataaagtataagaagagtgccagggaatgccataatggaggcttttggatctgaatttggaccatttcactaaagagaacatgagtttgctcagccctttcctcacaagagggagggccccggttccccagacttctccacgcgctggctccataaaggccagctttggccaggctgccacaggggcctgaggagctcactctgggcctacctggtttcagttagagggtcctcctgttatttttccatttaaaaagtatgtcctcagaaaactgtactggaaggatgggtggcaggaacttgtatagttcagcttccaacactttggaacagattaaaaagggaatcttttaaataaaaacgtataaaaataaaaaaaaaaaaaaaaaaa

SEQ ID NO: 6585 - DNA, 2620 bp, Homo Sapiens
  NM_173483
agatcccaggtagtggcgccggtggatccggatcgagggcaggaggctgagacccgcgggagctggccctaaagcaaggacctgagtgcaagtaatttttttgggaagtaataacagaaaataccagcaaggaagaagacagtgaacccaaaagaattgaaaacaggatgctgcccatcacagaccgcctgctgcacctcctggggctggagaagacggcgttccgcatatacgcggtgtccacccttctcctcttcctgctcttcttcctgttccgcctgctgctgcggttcctgaggctctgcaggagcttctacatcacctgccgccggctgcgctgcttcccccagcctccccggcgcaactggctgctgggccacctgggcatgtaccttccaaatgaggcgggccttcaagatgagaagaaggtactggacaacatgcaccatgtactcttggtatggatgggacctgtcctgccgctgttggttctggtgcaccctgattacatcaaaccccttttgggagcctcagctgccatcgcccccaaggatgacctcttctatggcttcctaaaaccttggctaggggatgggctgctgctcagcaaaggtgacaagtggagccggcaccgtcgcctgctgacacccgccttccactttgacatcctgaagccttacatgaagatcttcaaccagagcgctgacattatgcatgctaaatggcggcatctggcagagggctcagcggtctcccttgatatgtttgagcatatcagcctcatgaccctggacagtcttcagaaatgtgtcttcagctacaacagcaactgccaagagaagatgagtgattatatctccgctatcattgaactgagcgctctgtctgtccggcgccagtatcgcttgcaccactacctcgacttcatttactaccgctcggcggatgggcggaggttccggcaggcctgtgacatggtgcaccacttcaccactgaagtcatccaggaacggcggcgggcactgcgtcagcagggggccgaggcctggcttaaggccaagcaggggaagaccttggactttattgatgtgctgctcctggccagggatgaagatggaaaggaactgtcagacgaggatatccgagccgaagcagacaccttcatgtttgagggtcacgacacaacatccagtgggatctcttggatgctgttcaatttggcaaagtatccggaataccaggagaaatgccgagaagagattcaggaagtcatgaaaggccgggagctggaggagctggagtgggacgatctgactcagctgccctttacaactatgtgcattaaggagagcctgcgccagtacccacctgtcactcttgtctctcgccaatgcacggaggacatcaagctcccagatgggcgcatcatccccaaaggaatcatctgcttggtcagcatctatggaacccaccacaaccccacagtgtggcctgactccaaggtgtacaacccctaccgctttgacccggacaacccacagcagcgctctccactggcctatgtgcccttctctgcaggacccaggaattgcatcggacagagcttcgccatggccgagttgcgcgtggttgtggcactaacactgctacgtttccgcctgagcgtggaccgaacgcgcaaggtgcggcggaagccggagctcatactgcgcacggagaacgggctctggctcaaggtggagccgctgcctccgcgggcctgagcgtgggcgcgcccctgcggctcccgagggtccaggccccgcccccaaaggaccaggactcgccccaaagatcccgagggcataggccacccccctcgaagttcaggttcagctcctggatgaccaggcaccgctgttgagcagcctggtggtactggccacgcccctcaaggcaaggctcctccccttagggggcctgatcccgccccttgaggcttaggtcccgccccctgacttctcgcacctgtcctgtttgagggaccagggtcgaccctgcccccttgggctcaggccccgcccccaggatcctacggattgaggtcctcaggccacgcccctgcagatccaggtctccaggccttgcccactgagccttcagaggacctaagacccacctatgactcagggcccaccacaccccacccccccccaactggctgaacccctggcaggcttccaaactgaggaaagctggagcctgacgtcagagcttttaactcggacatcaccctcctgaggccctcagctcatacgggcagactgctcaggcgtgaggctggatcgtagggttcgaggctgcttgcttttgttgttgttttgtaaactcagacccttgtaagccccttccttcctcccttgcccaaagatcctttgctgagtgttctgtttttgcagaataaaagcaaaggatgcagacttaccccaccctccacccctagctcagccagatccttacacgtggagcccccagcatgggaatgaggggctctgcaactgagcgaagctgcgggctaggaggctggaaagccatttatcctaggacataaactcagattttgggggtcaaaaaaaaaaaa

SEQ ID NO: 6586 - DNA, 12204 bp, Homo Sapiens
  NM_173485
gtgtgtgtgtgcgagggtgtgtgtgtgtgtttgtgtgtgtgtgcatatgtggggggtgtgagtgtgtgtgtgcgaggaagcgggggtgcgtgcgcgtgtgagtgcgtgtgtgagtgtctgtgtgtgtgtctgtgtgtgtgtgtgagtgagtgaattccagattttctgtctttccaaaacccgctcctgtcctctcgcatatcactcacagacggggatctgacagcagccacaaacctacagtgagtgatcgctctccccccggcacgaatccgccatagagatcggcgaggaggaggaggaggaggaggaagaaaagaaggaggaggtggaggaggaggtggaggaggaggaggaggagggaaagaggagaaggaagaagaagaaaaagaagaaacccactaccttcccaggattgccttttttttttccttatctttacgcgcgagtgtgcctgtggcgcgtgtgcgcccctcgtcccttccatccgaacccgggcttggatgtttaataaagaaatcaagtgtctcaacagtcaccaaaaaaaaaaaaaaccgcaaaaacaaaaccaaaaaaattccaaaagcaaaaacaaaaaagagagaggaaaaaaaattcaaaataaacaaacaaacaaacaaggcagaaccaacctctacttcaaagcagccggcacaagccacccgtgtctgccacccagagaggggggtctctggcccgtggtggaggagttgcaggggggatcgtcagggggacagaggccgagtgacgtcctaggagccaccgggcaagaggcggaggagacccagagaggccagagagacagcgggccccagcgcgcggctcggggctggggcgccagaagtgggactggagcgaagtagaggatgccgaggagaaaacagcaggcacccaagcgggcggcaggctacgcccaggaggaacagctgaaagaagaggaggaaataaaagaagaggaggaggaggaggacagcggttcagtagctcaactgcagggtggcaatgacacagggacggacgaggagctagaaacgggcccagagcaaaaaggctgcttcagctaccagaactctccaggaagtcatttgtccaatcaggatgccgagaacgagtctctgctgagtgacgccagtgatcaggtgtcggacatcaagagtgtctgcggcagagatgcctcagacaagaaagcacacactcacgtcaggcttccaaacgaagcacacaattgcatggataaaatgaccgctgtctacgccaacatcctgtcggattcctactggtcaggcctgggccttggcttcaagctgtccaatagtgagaggaggaactgtgacacccgaaacggcagcaacaagagtgattttgattggcaccaagacgctctgtccaaaagcctgcagcagaacttgccttctcggtccgtctcgaaacccagcctgttcagctcggtgcagttgtaccgacagagcagcaagatgtgcgggactgtgttcacaggggccagcagattccgatgccgacagtgcagcgcggcctatgacaccctagtcgagctgactgtgcacatgaatgaaacgggccactatcaagatgacaaccgcaaaaaggacaagctcagacccacgagctattcaaagcccaggaaaagggctttccaggatatggacaaagaggatgctcaaaaggttctgaaatgtatgttttgtggcgactcctttgattccctccaagatttgagcgtccacatgattaaaacaaaacattaccaaaaagtgcctttgaaggagccagtcccaaccatttcctcgaaaatggtcaccccggctaagaaacgcgtttttgatgtcaatcggccgtgttcccccgattcaaccacaggatcttttgcagattctttttcttctcagaagaacgccaacttgcagttgtcctccaacaaccgctatggctaccaaaatggagccagctacacctggcagtttgaggcctgcaagtcccagatcttaaagtgcatggagtgtgggagctcccatgacaccttgcagcagctcaccacccacatgatggtcacaggtcactttctcaaggtcaccagctctgcctccaagaaagggaagcagctggtattagacccgttagcagtggagaaaatgcagtcgttgtctgaggccccaaacagtgattctctggctcccaagccatccagtaactcagcatcagattgtacagcctctacaactgagttaaagaaagagagtaaaaaagaaaggccagaggaaaccagcaaggatgagaaagtcgtgaaaagcgaggactatgaagatcctctacaaaaacctttagaccctacaatcaaatatcaatacctaagggaggaagacttggaagatggctcaaagggtggaggggacattttgaaatctttggaaaatactgtcaccacagccatcaacaaagcccaaaacggggcccccagctggagtgcctaccccagcatccacgcagcctaccagctgtctgagggcaccaagccgcctttgcctatgggatcccaggtactgcagatccggcctaatctcaccaacaagctgaggcccattgcaccaaagtggaaagtgatgccactggtttctatgcccacacacctggccccttacactcaagtcaagaaagagtcagaagacaaagatgaagcggtgaaggagtgtgggaaagaaagtccccacgaagaggcctcatctttcagccacagtgagggcgattctttccgcaaaagtgaaacacctccagaagccaaaaagaccgagctgggtcccctgaaggaggaggagaagctgatgaaagagggcagcgagaaggagaaaccccagcccctggagcccacatctgctctgagcaatgggtgcgccctcgccaaccacgccccggccctgccatgcatcaacccactcagcgccctgcagtccgtcctgaacaatcacttgggcaaagccacggagcccttgcgctcaccttcctgctccagcccaagttcaagcacaatttccatgttccacaagtcgaatctcaatgtcatggacaagccggtcttgagtcctgcctccacaaggtcagccagcgtgtccaggcgctacctgtttgagaacagcgatcagcccattgacctgaccaagtccaaaagcaagaaagccgagtcctcgcaagcacaatcttgtatgtccccacctcagaagcacgctctgtctgacatcgccgacatggtcaaagtcctccccaaagccaccaccccaaagccagcctcctcctccagggtcccccccatgaagctggaaatggatgtcaggcgctttgaggatgtctccagtgaagtctcaactttgcataaaagaaaaggccggcagtccaactggaatcctcagcatcttctgattctacaagcccagtttgcctcgagcctcttccagacatcagagggcaaatacctgctgtctgatctgggcccacaagagcgtatgcaaatctctaagtttacgggactctcaatgaccactatcagtcactggctggccaacgtcaagtaccagcttaggaaaacgggcgggacaaaatttctgaaaaacatggacaaaggccaccccatcttttattgcagtgactgtgcctcccagttcagaaccccttctacctacatcagtcacttagaatctcacctgggtttccaaatgaaggacatgacccgcttgtcagtggaccagcaaagcaaggtggagcaagagatctcccgggtatcgtcggctcagaggtctccagaaacaatagctgccgaagaggacacagactctaaattcaagtgtaagttgtgctgtcggacatttgtgagcaaacatgcggtaaaactccacctaagcaaaacgcacagcaagtcacccgaacaccattcacagtttgtaacagacgtggatgaagaatagctctgcaggacgaatgccttagtttccactttccagcctggatcccctcacactgaacccttcttcgttgcaccatcctgcttctgacattgaactcattgaactcctcctgacaccctggctctgagaagactgccaaaaaaaaaaaaaaaaaaaaatcaccccagccatttctcttcatcctcactaacaatttggtaatgaagtattgatttccacttctctgcttatgggcggtattagattttcattgataaattgcaatggggctgtctcgtctccacagtacccttttcactgtcacaagaaaacaaagtgccaccgaagaaaagtaatgactgagagcattgatgtacttattttgtcagtttgtaacaggaaagtgggggggagtctaagtcttcatagtctaatgtccaagtgggttgcactagatgtagacacttggaggcttacttttcatggtaatgtccatttcctatttataacccctctgggaacgtttgtctaaaggaaatgtttctgttcagtgtaacaattacagttgcacctggattgcccagtcctgcccctgcactaggggaccattaatcactgcaaagtagaagaattattaagttaaaccagagtttgagccaagaaaacccctgaacaatgttcatcttctgtgaaacttgctcaaatagttaagcttaaccatgttgctgccaaagacttttcctatgcagtggtggggcaccttgatcatcatcattatcttgattggctgaaaaaaaaatagttttaagcacacaccactgtctatgagaactgcaaattgggagaataggtgaaatgcagaatctgagagaacgcgagaagatgagatcattacagggtggaaagttctgcagcagccttttctggtaatccctttctgcagaacctgatgtttatgggctctaaaacgcagcttagctttagaagcaacagaaagcatgaaatagggtgtccattttaaatgtgttcctgcaacttttttcattaaaactttgagggcccaattttaatttgtggaatattcccgttaataatgagatctaattaagacatccattaaaagcccgttaaagttaatttaacgtaaaaattccaatagaactgtattagattttctccattaaattaacgttatggatttttaacggatgtcttaattatacgttattattaacgggaatactgtattacacagattaaaatcaggtcctaagtcaacttggaagagctaagagcatgttttaatattaaaagtcttgcatacctagtgcacagtttggagacgcaaggatagatctgtttactctagttgaacattttctatacaattgaaagcaacctataatagataaatccatcattgcatttaaacaatgaatttccttattctcaaaggacaaatacgtctggattatgtggtaaattgctactcagctatggtgaaatatttatactattctaggcacaacactaggaactaggtgattctgaaacaaaaggaatattttctgttgttgctttaattaccaaggttatttttttttaatctcaacactgacaaaatgaaaccaaatatctcttcctcaccatttctcaaggaggctgcctgttggaattgttttggaaattttgacatgatccctaaattcaacattgggattaaaaaaaaaaaaaaacttcttatttacctcctagggaaagtgttgcccttatgccacatataatagcaaattgctttttttatggcatgcataacctagatgggaaaaaatatggcgcttcggggaaggagggaaaaagtaaatgaagttccaggaatgtcattctgaagtaatgaggcatggacagaaaatatacccctcacatcatcggattgagatggcagtcgaaatagcttcattgaagtgtcagcactcatccatcaatcaatcacccacaaggaaaaatagcaacagtacaacggggtggcttttatgggatttactcatgggcatagggaatagcggctcaaatgtagttctgacatgaaaagcaaggtgctgatattattttttatgatgggaggatcataaagtgaattgagaacagtgaggtctgtctttgcttaacctattcaaccagaaatgaatggagctcgactggaaaggaacagtcttcagatgggttaagattgaagggtggactggactctactgagcaccgtccttcaacaaggaaattctattaaaggaaaatcaatgcattagtattggggttctcgtagctgttaaaaattgtctgctccaatccagggttattaggccaaagttacataattcagatctcactgcaaccatccaaaagtggattctcgagcccttgctccaatggggggaggagatcaatacaattcccaattccatggaaattgtttcccttctaaggaagaaaaaataaatcatctgcttcaacatataatcgatatggttttgttagcgtaatttctatggtgggtggggtgggaggtgagagaaaaaaatattgataaatttggtaagacaggtgaattgccgcctggcaaccgtgcatgtcactgccgagggatggctgctaaggttcaccttagaaaacaagatctgggctggcactggggcatacatcaccactcagcatattcctagaggccaggcctgtcttcactcagccagccctctgaggcttctagaaacttctttctggaggaaaaaaactaaataacataaactcaggagaatgtctttacccaccttcataccactgctttctttttgctgaataaaacacagttctgataagtaagaactttagaattggaaaggaggctgacatgcaaatataatgcaaattaccctcaagtatcgccattcttccaccacctcttggtaccagtgagagcgagagattgccttttcttccccatccctccttccagctaagaccaccaaccagctgcaaattgagatgtccatttaaaaatttatatgtcaatatttaaatgttacatatttggccctattttgtagttcagcaaatcctccaaatacacagcatgttacaaggcactggtggcacagggcacaacaggaaatgatatttatttagcaaattcatttaacaaatattattgggcacctgttatgtgagacactgtcctaggcactgtgggataacaacagcaaacacttcacacaacagcctggccttcctgtgttttacaacagctcctaaagatagctgatatcaagacatttgagggacacagttcatgtagaatcaaaatattagtatttcagaataaggattttttttctgaaaagcatacagagaggaaacagcttaaaaataggtcaagacctaaaaacagaatataatcacggaataaactggataacccagacagtccccacagaatttctttcaggtcacagatttcttaaaactcacccccaaaatgtgcctgcttggttgtttgaatcttgcataattaatgtcacaggcgcaagccgctgaacttagttgagatgcagaaaacaaacaaatgcaatgacatatctgagaagcatttatgtaactccggttaagtggtgaggaggggtgtgtgaagacagtgtgcatgcatgagtgtgtattcatatatatgtgtatacatatgaatttcactgttattttccagggtctatggacaatgtggcagtaagagtctatgatgttctgaaacttttcacagtaaatccaaagattacagaccttacaaggtgcttgcattctgttgcttttccatctgtcacttctcaggttatttgactgtgttcaaaccttcttttctttttcattgagtttcattttttaagcttgttaaatgcttttgtttaaaaaaaaaaaaaaaaccccaaatgtcatttttcacattatcctctcttctctgcaacaaggatagtaagatgtagatgaatgcaaaaataataacaacaataaggaaatatattaaagctttaaaatatgcacatatgtagttctaaagagcaataacggtagtatctatttcgaacatgcattaggcaaaaaagaaatcaaaactgaaattttcgtgtatttttccccttgtaagatgttcaaatgctaacttcattttctcctttcctctatgtggcactttctcaaaatatctatgaaatacttttagacaaagattgagctggagaaagagatacaaatttccatccccccagacagagagacatatttccattgtaggaaggcattaaacattttgaaacttgtgaatcatctttagaatttctactggggaattttacttcttcatccaaagtaaaagccacttatctcctttggttcccagtgacagattcagaggcatacgcagatatacaattttcaggctctagttaatcttcttccaatagttacgaacaatgggctaacaggcgtgggtgtttctccaaaaattattcatgcacaaggcagcccaaagcttcagggaaaactagaaatgtgttatggattagaataggactgttttaaaatgctagtaccaggtggaacgctatttctgcaacaggactctgtccatttcctttggaacaatatattccaagtaaaatggctcttccaaggaatgacacctttacttgacacccttcggcatacaaatgattttaccaatagccatgattattattaaggccttttaaaatacaggctgtttgaaaaaagacagattaaatattcacagcctttgtatcatggttatttgcttaaaacagcttttagaagtacaagtaataactttttgataagaaaccccaggagaaactttttggtaagaaacctcaaaaaatttgaacaaaggcattacaaaaaaaaaaaaaaaactaaccactccattcaactctctcagaaaataaatttcaatgtgttcaatgaattgtcttgaacctgaaacctgcatttagatatcagtcccctgccaatagctaatattaacagaatttgaacaatcatacaattatgtctcaaatgtgaagactttgtacagtaatattttcactttctaaatgacccatataacattcaggaattatagatgtgtatgtatattttttaagtacagaaagttcagccagtcttcagagaagtaaaagtgatgtctattgtgcattgaagtaaatattacaaacattccagtttcgcaatacaatacttgagctttcgaacacctcagacactagaatgtgtaatgcgagtcaaaaaagctgacatacaaaacaattcccatttggctcagggttcctaaatgtcacaatatcttgggtaaaatatactttttgatttcctgatgatgtccttctaatcccttctgactttgattcctaacagccaggcactgttgacatgaatcattaacttccaaacccctttaaaatcaagaagctaggtgatcatacagtcatttcaatggccaaccagttcttgctctacagagcttttacacctttttgggaaacctgatatcaaacacatttatgttatatatttgctcccttgcattaattctagatttttttttaatttcttttagaaagggcaggggggaagtgggtcagagcaaggttcaagaatcacattcatccttgctctaaagtgtttacttgccagcaaagaaaggcaaacacatttttatattcagaaagcagaccggtcattttcaaagaaaaatgactgcaaccatgcctgtagaatgtttctgtgcaagcgcactaattttctatcacctgcatgctgtatataatacatttgcctgtatactaggaagaaaaaccaggctgttttccctgagtacaatgcagcttggatggctgggagcgtaagccttccgtgcatttttatagtgtacatatttgtatatactaactatatcgccatgtatgaacacagattttgttatatttgcttgtttctgtttcctaccaaactggcccacaatggggattcttttgtatagaaaaaatatgcttgtaattttttcctggtcattctctttcaatagcttatgaaagaattagatctgagtttacaaagaaactataagaaccaagtttgtctgtctgcatgagtcccgtccaattgctggatctagggaggaaccaacttcctaattcagagttttccttttaaaggcatgctttacccccatgggaaaactgcacactcatccatgtagaattattctctttgtattttatctaatagtgcctgaaaatttttttaatgtcttcttagaagaagaattcataattgtcaaaatttgaaacattagcttaattttgtttttatgacctcaagattcttctccttatttattcggttgctgttgtaatggggccccaggccattcctgacatcggcgtgttcttcttctgcattaaggatgtttttgaaattacagagattattgagccaacaggctgttttaatcaaaaccatgtttcacttctttttgatgattataaattgtccttgcaatgaaaaaaaaaaaagaacttttctgctaggaagattataccaccctgtggccaaacagattcatcacagataggcatctatgcccatttctctgggatctggaaaattcttcccttggctgaccccaatttcttttactccccattatcctgaatattagctttcaatgcagtcactatttgacatttccaaaggctttgccgcattgtcactgcccaaagacaaacaaccactggaaatgatggctttcctgcttgaaacgaagggggccaggtgcagtggctcaagcctgtaacccctgcactttggaaggctgaggcaggcggatcacttgaggtcaggagtttcagaccaacctggccaacatggcaaaacctcgtctctactaaaaatacaaaaaacattagcagggcatggtggtgcgtgcctgtagtcccagctacttgggaggctgaggcaagagaattgcttgagcccgggaggcgaaggttgcagtgagctgagatggtgccactgcactccagcctgggcaacagagcaagactgtgtctcaaaaaaaaaaaaaagaatggattttcagaaaaagtgctccctttcctgtcctgtggtgccaccatcctgtcctccttcgtaatcatgaacaatctgatcttgaactcccacataacttaaatcaggcaaaaagaaacattcacagcgtccccttgctgaataaaaatgactttgtttggaggcacttaagatgtatgcctgtgtgtggtgccgcagcattgaaattatctgtagaaggggaattttttttaaaaatacaattttatcactagaaataaattccgatggtggaaacgaagaaaacccttaaattatatcacaaaagccattattttttgcatccaaagagtttttttttttaaggaaaatcattctactttgagaactgtaattaaagccctaaataacagacactactttgttgagctattgtgaaaaaaaaacaacacattcgccaaggttatatggagcccctgatttccatcaaaaaggtttctataagtatattatttacatttttatacatgataactcttgcctttgtgttgaaaaaaaaaaagtctcttttttttcccccactcagcagttattggaaatagactgttcccatctgaaaccgtatcgtaatttgcatcaggaaacccaactgctgacattgaggacctgggtgtgttcaattatgattttgctggaggctgtccctcattttaatgctgcagctattgaaccaccttcctgaaacctagctgatacggaatagcagagacatgcctctcaacaccattagctttgcaaatggcttcatttcagtcaacgtcgacttctgctttggccaattgaaaaatgaaaattaaaggagagaagaaaaaaaacacagatgcacttaaaacatgaaaagaattatttatatgataaaaatatatttagcttttcaaagcacaagactgaatagaagtgctctttttatgctttctggagatgttactgttaaatgtctttctacatcaggcttaataaatctgtaatgacatttgatggattgaaaaaaaaaaaaaaaaaa

SEQ ID NO: 6587 - DNA, 5207 bp, Homo Sapiens
  NM_173496
aatggaactaacaggaaccacctgtgcacttccttttacaggaatgttcataaacagcaggttctcctaggctttgaacaaaatttagcttctccaaggccaaaagcctcattgtgaagagaaagaaaggtatagcagtcttggcagttgctgaactgaattcctggctgatttccttactgcataaactcaactgctctcactgaggtcgtcattaagtcctgtgtgtgtttgggcaggccgacttgatttacagccagcactccactgcggaaacggcttacaaaatatacagatcttggtagacaacgtggctgcaggctgttgaattggaattccctgtggctgtccgaaggcagggtgtccggagagcggtgggctgacctgttcctacaccttgcatcatgccagctttgtcaacgggatctgggagtgacactggtctgtatgagctgttggctgctctgccagcccagctgcagccacatgtggatagccaggaagacctgaccttcctctgggatatgtttggtgaaaaaagcctgcattcattggtaaagattcatgaaaaactacactactatgagaagcagagtccggtgcccattctccatggtgcggcggccttggccgatgatctggccgaagagcttcagaacaagccattaaacagtgagatcagagagctgttgaaactactgtcaaaacccaatgtgaaggctttgctctctgtacatgatactgtggctcagaagaattacgacccagtgttgcctcctatgcctgaagatattgacgatgaggaagactcagtaaaaataatccgtctggtcaaaaatagagaaccactgggagctaccattaagaaggatgaacagaccggggcgatcattgtggccagaatcatgagaggaggagctgcagatagaagtggtcttattcatgttggtgatgaacttagggaagtcaacgggataccagtggaggataaaaggcctgaggaaataatacagattttggctcagtctcagggagcaattacatttaagattatacccggcagcaaagaggagacaccatcaaaagaaggcaagatgtttatcaaagccctctttgactataatcctaatgaggataaggcaattccatgtaaggaagctgggctttctttcaaaaagggagatattcttcagattatgagccaagatgatgcaacttggtggcaagcgaaacacgaagctgatgccaaccccagggcaggcttgatcccctcaaagcatttccaggaaaggagattggctttgagacgaccagaaatattggttcagcccctgaaagtttccaacaggaaatcatctggttttagaaaaagttttcgtcttagtagaaaagataagaaaacaaataaatccatgtatgaatgcaagaagagtgatcagtacgacacagctgacgtacccacatacgaagaagtgacaccgtatcggcgacaaactaatgaaaaatacagactcgttgtcttggttggtcccgtgggagtagggctgaatgaactgaaacgaaagctgctgatcagtgacacccagcactatggcgtgacagtgccccataccaccagagcaagaagaagccaggagagtgatggtgttgaatacattttcatttccaagcatttgtttgagacagatgtacaaaataacaagtttattgaatatggagaatataaaaacaactactacggcacaagtatagactcagttcggtctgtccttgctaaaaacaaagtttgtttgttggatgttcagcctcatacagtgaagcatttaaggacactagaatttaagccctatgtgatatttataaagcctccatcaatagagcgtttgagagaaacaagaaaaaatgcaaagattatttcaagcagagatgaccaaggtgctgcaaaacccttcacagaagaagattttcaagaaatgattaaatctgcacagataatggaaagtcaatatggtcatctttttgacaaaattataataaatgatgacctcactgtggcattcaatgagctcaaaacaacttttgacaaattagagacagagacccattgggtgccagtgagctggttacattcataactaagagaaatttccataattgtctttttctatagagtgcatgatgaaatcaattacagttttggtagtagggtttttaaatctatatcactgtcatagatgtacaatcttggttcaagttgaatgctggttttgtttgtatctttttacagccttatttcaaacgccatgtgttagtataagatccgaaatcaaaatatgcacagtactgtattctaagcaaaacctcaaaccttctcgttgtcttcaataccgctctatctccaagatgaggctgaaattttcagagagacttagctagaggcttagtatgtatgggagttcagcgcttctgctggtctcaggtgtggctgctgctgtcgagtttgaatgttagctgttgaaggtatcaattcagcagccatgagcagctccagacagacaggtgagctctgctgtttctgggtggatcatcacagatttagccgggcaggcagtaaggtgtcctcttactattcaaaaagtgtagactttcttacatattcgcaatacgttcacagtgtgtgcattttaaaataattcttaaaggagtaactgaaattttaccttgagtgaatggccttcataatatagcttgagaagtccttttgagtacctgtcagtgactcaacaacatttaataagggaaagtagacttttaacagttattatatatgtaacgaaaagcctttcctttgggattaatataagtaagaatggtagccttgtggcaagaaatgattacaaaggatatttttatttgtaattcctcagaagacaatttatgaagtcacccaaaatgttattttagctggttttggatttttccaataaattagaagaaggatttctattctaaaacatgtaaaacctgttttacatattactgatacaattaaagattatttttcatctatgtgcaatagatcacccctctttaaattgctctaagatttattttagaaaacttttcatgtgatgttatttctttgtcatcaaaatgcttgttaacactgtccagacaccatcctaaccttgccattgttaaagaagtttaggaaagactcttatattgtaaatatttagatgggttctctcacttttctttgatactactgattttcagcaagtgaattatataattcaaaatgctagaaatgtctatccgttctataagagagcatatcctgccgttcttgcatgcagtgaagccctgcccgtcgaaaatcattgcatctgtgactttcaaagtggaaaaaaaaatgttatttttttgttgatttgtaaagagagtttaaatgtcatgtgaaaaaaaatagaatgtagtaaaattctatatatttatgaaatattttaaaggcatatttttttaaatatcaaacggggctattcataaaataaactgattgtatgtcaagatgtcctaatttaaaagagtagttttataaatcatggtcaacattccatgtaaatatttgagctttacaaagatagatccaagtgtgcgatctgtgcactgcacatttgatagcattattcactggttttccttcatacttgtcaagttcatattagaagcagagacaaaaaccactccaatggccttgacacatagtcacaccaaaatagataatcagactaagtattatataacaacgtgatccagacagtgagttctaagtgtattaattaaatagcaaaaaattttgtttttaaaaaatgaaagagggagggttgccaacctgaagtcttaagtagattgtttgggtagcatatttccttctttgaacattgtctgaaattttctataaatcaagacttcttgtacaaagaatgatgggacatatgtaataattcaggcaatcacctgagtaatttaggcagtccaaattctttaccctgaaatacccacattttaaaaaaattgcagataattgcttcagttatttactttggggacagagatatagtgtaaagtgggagaaactgagtccttttttggtggtggtaataataagatgttataaaaatataacattttaaaaaagaaaggtccagaccttaagcgcagagctagaacaatattttttaaataatggggggaaaagggggcactttggtaattttagaaatcaggtagtatacttttttttttttttttgagacagggtcttgccatgttgctcaggctggtcttgaactcctgggctcaagcaatcctcctgccttggcctcccaaagtgctgggattacaggcatgatccaccgtgcccagccggtagacgtggtcttaaaaacagtgtttacatggccatcttgatgcttagaaagataattgattaaaatttaataaggcagggccaactccgagagttcattgacaacggcagcaaaaaggccctgaattctgtactttcttcccccagcctccttctccagcaaggagaatagcactcctccctccagaagccagctccctaagttggagccactatgtaagagaagaggaacgttcactttttaaaattcatatatttaaaaatcaagaccaaaaagtaaattctgtactcctattattgactgtagtcaatcaaacataaaaaggtgaaagtaaaatttaattttttacccttattttactgaccaatatggaagttcttggtatctttaaggctgaccttcctggtattgtgtaatgattgaatgtatctaaactgtaataatttgaaactgacaaacataaccttctcagacttacaaaactatgttctttctaaagatacagatttttattattttattttgactaggaaggatttataaataaatgtaatgaaaaatctttgatcttaataaagtaccttcaaacagtgtgtgtacttacttgaaaattgtttttgcacttggatattctattttattatactactattgtgatctattccattatactatttcccatggtagaacaaattatattttctactgtgatatgaagtgatgtaattgaacttgccatgtctaaaattaaatttcatatttttttcaatcaaa

SEQ ID NO: 6588 - DNA, 1377 bp, Homo Sapiens
  NM_173501
agcgggactccgggccccggcggcggcccatggggcgggaggcgtgaggccgctgcctgtccggggctcggggggtggggggagcggggcggggagatggataaactgaccatcatctcaggatgtctctttctggccgccgatatcttcgccatcgccagcatcgccaacccggactggatcaacaccggggagtctgcggtctcaccttaatccagctcagttctgtgtacaaaccatggaggttattcattcaggtgaaataaatgggttacttctgccagattaatctgggaagaaacagagcactcactgtgggcctcgtgcgacagtgtcaaacaatccatggacgagaccggacgtgcatccctccccggcttcccccggagtgggtcaccacactgttttttatcatcatgggaatcatttcattgactgtcacatgtggtttgctggtggcttcccactggcgaagagaagctacaaaatatgctcgatggatagcattcactggaaagtgtgtgcattcttctcatacctaagaaaatcactgtaaaatctgctgaaaactatttttaggttttatttgcacaagactgaattagtttgacatttttggaagctcctattgaacatacccaaacatctgtaaacatgaaaaatcttcaatttattaaaagcaaacatttcagtatgattctttccaaagtttgctgctgattcttccttgtgtggccttttgaggagcctcctggggaattggaggattaagacatgccactatgagaagattataggaaaaacaccaagactagaggactctgggttctttttatgcaaagtcaactcttctgggtcacagttacccagcaacaaaaataaagaatttccccatggactccagatcctttactactgaactcacagggctgtaacactgttactgtacagagaggaccaggacgatgccagcaccccgtttatcctgagtgaactctccggaggcctcttcaagcttgtgggttctctgctgtcttgaagccatccatccatttgataggttttgcaaagacttggtcctgccaagatggttttaatcatttctgctaaaaggaatggactcgaggatttgatctcattttagatgcagttgtcctcacttggccattttacagcactttagtaaatatggccagtgtatttggtcactattaaatcaatccccattcattatctgtcagggcaactcagtgaactaaatactatgttctgacctctggcactctttctcatgttgtttaaatatttaatattgtctaaggcaattcaagtattttcttaaataaaaaatatgaaaacccaaaaaaaaaaaaaaaa

SEQ ID NO: 6589 - DNA, 5795 bp, Homo Sapiens
  NM_173511
gggggggaccatgtcccagcgggtgaggcgcaatgggtcccccacgccggccggctcccttgggggtggtgcggtggccacggccgggggacccgggagccgcttgcagcccatgagggcgacggttccgttccagctgaagcagcagcagcagcagcaacatggcagccccacgcggagcggcggcggcggcggcggcaacaacaacggtggctgctgtggtggcgcctcaggccccgcaggcggcggcggcggcggtggcccgcgcaccgcctcgcgcagcaccagccccacgcgcggcggcgggaacgcggccgcgcgcaccagccccacggtggccacgcagacgggcgcgtccgcgacgtccacgcgaggcaccagccccacgcgcagcgccgcgcctggagctcgcgggagccccccacggccgccgccgccgccgccgctgctgggcaccgtgtcgtcgcccagctcgtcgcccacccacctgtggaccggcgaggtgagcgcggccccacccccagcccgcgtccggcatcggaggaggtctccggagcagagccgaagctcgccggagaagaggagccccagcgccccggtttgcaaagcaggtgacaaaacacgacagccttcttcaagcccctccagtattatccgacgcacttcctccctggatactcttgctgcaccgtatcttgctggacactggcctcgggatagccatgggcaagctgcaccttgcatgagggacaaagctacacagacagagagtgcatgggctgaagaatactctgaaaagaagaaagggtctcacaagcgctcagcatcttggggcagtacagatcaacttaaggagattgcaaaattacgccagcagttgcagagaagtaaacacagcagtcggcatcatcgagataaagaaagacagtctccatttcatggcaaccatgcagctattaaccagtgtcaggctcctgttccaaagagtgcacttattcctgtaattcccatcaccaaatcaacaggctcccggttccggaatagcgtggaaggattgaatcaggagattgaaataataattaaagagactggggaaaaggaagagcaacttataccgcaagatattccagatggccatcgtgctccacccccccttgtacagagaagtagcagcacgcgcagcattgacacacagacgcctggtggggcagacaggggaagcaacaacagcagccgttcccagtccgtgtccccaacatcgttcctcaccatttccaatgaaggtagcgaggagagtccttgctcagcggatgacctgcttgttgatcccagagataaagagaatgggaacaattctcctttgcccaaatatgcaacctcaccaaaacctaacaacagttatatgttcaaaagggaacctcctgagggctgtgaaagggtcaaagtctttgaggaatgctcgccaaaacagcttcatgaaatcccagccttttattgtcctgacaaaaacaaggtgaatttcattcctaaaagtggatctgctttctgcctcgtcagcatcctcaagccactccttcctaccccggatcttacactcaagggctctggccacagcctgacagtcaccactggcatgacaaccactctgctgcagcctattgctgtggcctccctgtctacaaacacagagcaagaccgagtctctcgaggaacaagtacagtcatgccatcagcttctctactcccaccaccagaaccaattgaggaagctgaaggataggtcacagtgcaacgtggctgttgttctgggaaattgggaacctcctcagatcactggattctgatggcatcgtgcgcttctggtcggctgtgatgtgctccagctttccagtgacatgtgacggcgaggcttctggaagaaaggatcccccgtgacggctctgccccacttgtgaacgccaaccctcagtgcttagcctgctttttatcaaagcactgattgaaacaagaaaggtctcattctttacctttggagagacaatatcacgtttttgttttcgaattagacttctttaaaacacacacacacacacacacacacacacacacacacacacacacacccctgatccttgccaacatgattcctaaagggagatgtgactgatgctgcaagaaccatcttttctatgaaaatgactattttataatataccaatgttacattttctgaaacgtagcaaacaggatattcaaaagattctttggtggcctctgtttcttgttccctttctagatgtgtgcttttctcagctgttttcagctttgggaccaaagggattgttgacgttttcccagcaatcttaatctcatgactatgttcttctcccaaacaaggattgataggtaaatgcattgaacaagtatatataaaaagagattaaaaagcaatattcgtacattatgtgatttatgtttttgatgtcaaaagtttgtgctttgggtgaaatatttgtataactgctgttttcttcactactcctgtacacatttcaccatgtggtcagaaaagttgtagtctgaagacaagtgctttaatatgttctcacccatattggaacttgatttaaaagtcagtgagccaaaaggaagctatccagcgttgattgctagctaagagtaaggagcccctttggttttctgtgatatatatatatatcacacgctctccctcctttaccacaggtgtcattctacctttaatcatcactgtatcatagccccaaagagatcctgaaatggctgtgcatggatttcctcctttgcccttgtgatgttgttgtcttgtggatttggttgggctagtagtttgccaggagtgtaatccagtggatagtgatccaaactgtagccgcagaatcctgtgactgacatttttctttgtggtggtggttggccctgagatttgttgcctacagattttgctaatttacccccctaacgcttcacatagtggggaaaatacacaagaagaacttgagtatgaacgataagcacctttgaaaactccatacagttttggattagggctcatcctaatataaatcactgccagtatcacatgacatcagtatgtgatttctgggtatgtggtagtgagattaaggagcagcttttttttttttttttttttgagacggagtttcactcttgttgcccaggctggagtgcaatggcgcaatctcggctcactgcgacctctgtctcccaggttcaagcagttctcctgcctcagcctcccaagtagctgggattacaggcatgcaccaccacacccagctaattttgtatttttagtatatatggggtttcaccatgttggtcaggctgttcttgaactcctggcctcaggtgatctgctcgtcttggcctcccaaagtgctgggattacaggtgtgagccaccacgcccatccaggagcagctctttttttaaaagtgagtttcagcaaacagtattgaataaaagcatccttttcatatcttcatatactactttatgatgcaataatttactgttcctatacatattataaggtagaaaaaagtttttaaatccttataaagaggatgcagtttagaaggttaatatgtcagcttacccagacatattctatcaaggaaaacctagtggtagcaataaatctttggaaaggacttcttatactcatgtacctttaaaacatctaagcaatttaaaataatccctgttgagtttaaattcgagatgcatttaggtaaattggataaattcaacatttgaataaatccgtcaggttttagatggtgggattgatgaactttggtactttctcaatccaaaactaatttatttggaactagtacgttatggcttctcagtcatgaaaagctcagttatttggggtctacattttctcactgagagccttgatattttgccttctttgttatgcattataacttgactgtatcaccactgagtatctgctgtatcagaagttcagaagaaaaggtaaaactgaaatcagaatgggggtagaggaagttaaaaacaagttatttaaaaagaactcttggtttttggatgacttgaattctgttaaatctgtgttcttggccttgcacttccgttcctcttccatctctatccctgctagtcacaatggcattttagaactagaatgccactctgtagaggttttcccttttgctctgttgtgcctatttgtctaattcatatctttctgtggagtttcatatgtccttaatctaaagtaacttaaaattggaatggaagaacaagtttcagaattatttacagtcttatacatagaacttctagtgtaatgtttggttgtaaggagaatgtgaatttgcaggtaaatgaattgtatggcaaccagacagatccctggggtttgggagaaatagagcttgagatttgaaaaaaaggtacaaggtacaaaacaactctaactgccagtgccaaagggctaatttttaagcatgtaagctttaccacagtcttgaaaaaaatattaaccataggttcattcagctgttttatttaacccttagttccctggtggttgattttttttttaaatgggtctccagctttccagtgaaatgtgacactctcaatagaatgcataatgttggtttctaaagttacactccataattattgttattctgtagaaaactgtacagaaggtaaatagaatagcttcaatgggaatataatttaaatttttttaattttataaaaatttatttccattgcattaaaagaaatgggtagcatgtgtctttcagagaaaggagctatttggttattcactttgtcaatcttaggtttttttaaatctttaaacaatttcttctttgtgatgataaaaataatataaatttactgtttctgatcatgactgagtctattacttgtcatggcttttgtacgcaactgtgttttaaaaataccggttttgcctctttggttacatgtggtgagcatggatgtcaagattatttttcaactagattattcaatttgttttatatttcttatacttaatacttatgactacagtccaaatcagtcttttagaaggtgctcttgctaactgtggaatatttgacgacatgaaagtcctttttctttgctttcagtggttggctttcactgaaagaaagtgtaaaaaaagtcagaatttatagctttcactatgtccaagactaggactgggttataaagattttcttttgtgaaggaaaataaaagaaaatttgccactactgcatttactttactattgtaaacttaagattcattccttagtctttggaattttgatgtctcaaaaccagatgagtggaagtgctgaatttgcaaaataaagctaagaatgcttaactctgcactttaagttctactctgaccaaattgaagatgagcagagcagccctgaacagcattttgtttatacagtcttgtttaagaatagaatttttttaactcttcattttttgtctctgtggaagctgtgtaactctttttaaaatgcaatttaaaacattttgttattctaacaattctctcaaaaaacagcatttccaatggtaatcggtattgttacgctgtacttatgtattccctgtacctgaacacttgttgctgcctcacaagaaaatagaacttttatgttaaaaataaagtctgttcttcttgaaaaaaaaaaaaaaaaaaaaaaa

SEQ ID NO: 6590 - DNA, 1885 bp, Homo Sapiens
  NM_173527
agtgagggagagggtgctgcgagctgctgggctgcacacgcacacgcacacgcacacgcacactgatgcacacggacctggacacagacatggacatggacacagaaaccacagcactctgcccctctggcagccgccgggcctcccctccagggacgcccacaccagaagcagatgccacgctactaaagaagtcagagaaactgttggcagagttggaccggagcgggttaccctctgcccctggggcccccagacgaagaggcagtatgcctgtcccctacaagcaccagctccggcgggcccaggctgtagatgaacttgactggccacctcaggcctcatcctctggctcgtctgactccttgggctcaggggaggcagcccctgctcaaaaggatggcatcttcaaggtcatgctagtgggggagagcggcgtgggcaagagcaccctagcaggcacttttggtggtctccagggagacagtgctcacgaaccggagaacccagaggatacctatgagagacgcatcatggtggataaggaggaagtgactctagtcgtttatgacatctgggaacagggggatgcaggagggtggctgcgggaccactgccttcagaccggggacgcctttctcatcgtcttctcagtcaccgaccgacggagtttctccaaagttccagagaccctacttcggctccgggctgggaggccgcaccacgacctacccgttatcctcgttggaaacaagagcgacttggcccgctcccgggaggtatcactggaggagggccgccacctggccgggacgctgagctgcaagcacatcgagacgtcggccgcactgcaccacaacacgagggagctcttcgagggcgcggtgcgccagatccggctgcggcggggccgaaaccacgccggaggccagaggcccgatccgggcagccccgagggccctgcgccacctgcacgccgcgagagcctcaccaagaaagccaagaggttcctcgccaacctggtgccgcgcaacgccaagttcttcaagcagcgctccaggtcgtgtcacgacctctcggtgctctgagccgcggtcgccatggccactgcggtcgccatggtcaccgcgccctccgctcgccccccctcgccccgccccgcccccgtccggcttccttggtggaggccgtctaggaaaccaaaaactcccaggatgccccggtgtgaccgccgggggcggcccggggccgctcggcggcacctccacacccgccccaacgcgttctctggagctttgggcctcagggcgcctagaaggcgaggacgcagacctgaaggcggccggtgagcggggcgggttctgctgggtcgggaagaaaaataattctgcaaggtattttgttttttattaattcgcgcttggccacctcatctgtaaagagattctaaaagcaagatctggaaaagtgcttcgtagactccttgacggagtttgcctcctttgtacgctgcgtgaacatgcctcacctttaagagagtcttaaaggtaaagacacgaaaacacttcctccagggaccttcccgaaaacgttctggctctcatctggtgcggcatgtgtccactttgcctttaaggagttcttaaaggcaagggcctggaagtgctgttcctgagatggattctcttgacttaccagtccaccacggcacttcccctttaaggttattaaaggtaaggggtggacagactttctgcattcagataatgagcagtggcaaccccttttggccagggccaggggggcaccagcaaggggccaccctttcccttttcaataaataatttttgtactgcctcaaaaaaaaaaaaaaaaaaaaaaaaaa

SEQ ID NO: 6591 - DNA, 2832 bp, Homo Sapiens
  NM_173542
gtgacccgggctgcggggcgcagcattgtgcggtcatggtgggccagatgtactgctaccccggcagccacctggcccgggcgctgacgcgggcgctggcgctggccctggtgctggccctgctggtcgggccgttcctgagcggcctggcgggggcgatcccagcgccggggggccgctgggcgcgcgatgggcaggtccctccagcctcccgcagccgctcggtgctcctggacgtctcggcgggccagctgcttatggtggacggacgccaccctgacgccgtggcctgggccaacctcaccaacgccatccgcgagactgggtgggccttcctggagctgggcacaagtggccaatacaatgacagcttgcaggcctatgcagccggtgtggtggaggctgctgtgtcggaggagctcatctacatgcactggatgaacacggtggtgaattactgcggccccttcgagtatgaagtcggctactgcgagaggctgaagagcttcctggaggccaacctagagtggatgcaggaagagatggagtcaaacccagactcaccttactggcaccaggtgcggctgaccctcctgcagctgaaaggcctggaggacagctacgaaggccgtgtgagcttcccagctgggaagttcaccatcaaacccttggggttcctcctgctgcagctctctggggacctggaagacctggagctggccctgaacaagaccaagatcaaaccttctctgggctctggctcctgttctgccctcatcaagctgctccctggccagagtgacctcctggttgcccacaacacctggaacaactaccagcacatgctgcgtgtcatcaagaagtactggctccagttccgggaaggcccctggggggactacccgctggttcccggcaacaagctggtcttctcctcctaccccggcaccatcttctcctgcgacgacttctacatcctgggcagtgggctggtgacactggagaccaccattggcaacaagaacccagccctgtggaagtatgtgcggcccaggggctgtgtgctggagtgggtacgcaacatcgtggccaaccgcctggcctcggatggggccacctgggcagacatcttcaagaggttcaacagcggcacgtataacaaccagtggatgatcgtggactacaaggcgttcatcccgggtgggcccagccccgggagccgggtgcttaccatcctggagcagatccccggcatggtggtggtggctgacaagacctcggagctctaccagaagacctactgggccagctacaacataccgtccttcgagactgtgttcaatgccagtgggctgcaggccctagtggcccagtatggggactggttttcttatgacgggagcccccgggcccagatcttccggcggaaccagtcactggtacaagacatggactccatggtcaggctgatgaggtacaatgacttcctccatgaccctctgtcactgtgcaaagcctgcaacccccagcccaatggggagaatgctatctccgcccgctccgacctcaacccggccaatggctcctaccccttccaggccctgcgtcagcgctcccatgggggtatcgatgtgaaggtgaccagcatgtcactggccaggatcctgagcctgctggcggccagcggtcccacgtgggaccaggtgcccccgttccagtggagcacctcgcccttcagcggcctgctgcacatgggccagccagacctctggaagttcgcgcctgtcaaggtttcatgggactgaagttctgtccctgctctgctgctttcgcccctgctgaccctcgtcagggtcacccccgtcccaaggccaccggacttctaactccagcccctcctgggggcttcgttctctgatctggggtctgagtcatctcctcctagagtgggtcacgaacctgatggggctcagaactgaccccctctctcccccgaggtgggtgggcaccgtggcgtctcttctgccctgccctaaatctcccactctctgtttctgtctgtttcctactgctgctctctcaacctcattcccacctctggggccccttcctcgtgcttctccttcctgagggtttgggaaggtcctggggcagactctggggctcccatggggtggaaggagcctgttccagcacccttctcccagctgcattcccacgggtggccctggagctggtgagctttgtctgggcgttgtcttcggctggcattgctcctcccagctctggcccctctgctccctcaggaagcagtcccctcgtctccctttctgggcagcttccttgaggacagaaacttgaaaacaaacacaaaccaaagtttctggccatctgtggctggagggttctgaatgtcctctctccatgtcaggcagagggtcagcccccatgcttctgcctcaggccccaccccaccccaccccaggcctgcccctcacctcagggccatacccacagcgccctgatggaggaaccagaccgcaggctgtgccaccattaaacaagagcggctgtggccccatgctgtgcttcttggggtggcagggaaggtggggtcagcgctttttctcctctcaggtttgggttctgcgccatcccccatgcagcctcctgtgcagccctctgtctgtccttctgtccattcattcatctgccaacatactcacccatcatccatctgcacagccttccacccacccatccgtcttccatcatccatccatccatctacctatccatttatcatccatccactcacccatccaaccaccc

SEQ ID NO: 6592 - DNA, 2523 bp, Homo Sapiens
  NM_173544
gctgagcaggagatgggaattgaaacctgcgcagaggcggctgtgcagggtgagagtggagccgaaaccacagaaagtgaagtttgcttcaacgtcttgtcccggcaggccactcagatgtgagagtgaggaagtgggatggggcctgaccggaaggaggtgcccctgagccgaggaacgcaggcggtggtcgtggggaagggaagaggagccccgggagacgacagcagcatgggtgggcggccttcgagccctctggacaagcagcagcggcagcacctaaggggtcaggtggacaccctgctgaggaacttcctgccttgctaccgtgggcagctggcagcgtctgtcctgcggcagatctctcgagagctgggccctcaggagccgaccggaagccagttgctacgcagcaaaaagctgccccgagtccgtgagcaccgaggacccctgacccagcttcggggccacccaccccggtggcagccgatcttctgtgttctgcgtggggacggccgcctagagtggttcagccacaaggaggaatatgaaaacgggggccactgccttggctcaacagccctgacaggatacacgctcctgacttcccagcgagaatatctccgccttttggatgctctctgccctgaatccttgggagaccatactcaggaagagcctgactccctcttggaagtgcctgtgagcttcccgctgttcctgcagcaccccttccgccggcacctctgcttctctgcagccaccagggaggcacagcatgcctggaggctggccctgcagggtggcatccggcttcagggcacagtcctgcagcgaagccaggcccctgctgcccgggccttcctggacgccgtccgactctaccggcagcaccaaggccactttggcgacgacgacgtgaccctaggctcagacgccgaggtgctgaccgcggtgctgatgcgggagcaacttcccgcgctgcgagcccagacccttcctggcctgcggggggcaggccgcgcccgcgcctgggcctggaccgagcttctagacgccgttcacgcagctgtcctggccggggcctccgccgggctctgcgccttccagcccgaaaaggacgagctgcttgcgtcgctggagaagacgatccgcccggacgtggaccagctgctgcggcagcgggcgcgtgtggcggggcggctgaggacggatatcaggggaccgctcgagtcgtgcctgcgccgggaggtggacccgcagctgccccgggtcgtgcagaccctgctgcgcaccgtggaagcctcgctcgaggcggtgcggaccctcctggctcaaggcatggaccgactgtcccaccgcctgcgccagagcccctcaggcacgcggctgcgcagggaggtttactcatttggggagatgccgtgggacttggcgctgatgcagacatgctaccgtgaggccgagcggagccgggggcgcttggggcagctggcagcaccgtttggctttctggggatgcagagcctcgtgtttggggcccaagatcttgcacagcagctcatggctgacgccgtggccaccttcctgcagctggctgaccagtgtctgacgacggccctcaactgtgaccaggctgcccagaggctggagagagtcagggggcgcgtgctgaagaaattcaaatcggacagcgggttggcgcagaggaggttcatccgaggctggggtctctgcatctttttaccttttgtgctgagccaactcgagccaggctgcaaaaaggagctgcctgagttcgagggggatgtccttgccgtgggcagccaggctctgaccactgagggcatctatgaggacgtcatccgggggtgcttgctgcagaggattgaccaagaattgaaaaagacccttggtgccaatgatgtatcctgcactctggacggctgcttggaggtcccatgggaacaggagggagcagctccaaatcttaacttggtgtcaagtttcctggctgggagacaagcttttaccgacttcctctgcttgccagcaaagtcatctgctaactggatattggcagcttctctgctgtcttgcagctgcttccggagtgggttccacagggattcccgtgtgttcttggttcagcttgcagagggactttcacactccctggagaccgtttcctcccattctgtctggagttttcggcctaccccaagacaatgagatattcctgacctttccacctatttccctccaaccccaccttccgaaatacatttgctcaatacatttgcacttcataggcttctttagctgtcttccttttaccccggacgggatgtagatgttaattctggaacaattgcagctacaagaatttgtcatcctgccccttttgagaaaaacattgtttgcccttgggtctaaatccttccagatgggatgggatgtatcttgtcacctcctttttcttacttaatatgaaaagacctttcctcaaaaaaaaaaaaaaaa

SEQ ID NO: 6593 - DNA, 3429 bp, Homo Sapiens
  NM_173547
gcccggggcccgcctggctctcgccgccgccgggccatggccgcgcagctgctggaggagaagctgacctgcgccatctgcctggggctctaccaggacccagtgacgctgccctgcggccacaacttctgcggggcctgcatccgggactggtgggaccgctgcggaaaggcgtgccccgagtgccgggagccctttcccgacggcgccgagctgcgccgcaacgtggccctcagcggcgtgctggaggtggtgcgcgccgggcccgcccgggatcccggccccgatcccggccccggccccgaccctgccgcgcgctgcccccgccacgggcggccgctggagctcttctgccggaccgagggccgctgtgtgtgcagcgtgtgcaccgtgcgcgagtgtcgcctccacgagcgggcgctgctggatgccgagcgcctcaagcgcgaggcccagctgagagccagcctggaggttacccagcagcaggccacccaggccgaaggccagctactagagctgcgcaagcaaagcagccagatccagaactcggcctgcatcttggcctcctgggtctccggcaagttcagcagcctgctacaggccctggaaatacagcacacgacagcactgaggagcatcgaggtggccaagacgcaggcgctggcacaggctcgagacgaggagcagcggctgcgggtccatttggaggctgtggctcgccatggctgcaggatccgggagctcctggagcaggtggatgagcagaccttcctgcaggaatcgcagctcctccagcccccagggcctcttgggccactgacccctctgcagtgggatgaagaccaacagctgggtgacctgaagcagttgctaagccggctgtgtggcctcctcttggaagaggggagccaccctggggcaccagccaagcctgtggacttagcccccgtggaggccccaggtcccctggcaccggtcccaagcacagtttgtccactgaggaggaaactctggcagaattatcgcaatctgacctttgatccagtcagcgccaaccgtcacttctatctgtcgcgccaggaccagcaggtgaagcactgtcgtcagtcccggggcccaggcgggcccggcagctttgagctctggcaggtgcaatgtgcccagagcttccaggccgggcaccactactgggaggtgcgcgcgtcagaccactcggtgacactgggcgtctcctacccgcaactgccacggtgcaggctggggccccacacagacaacattggccggggaccctgctcctgggggctctgcgtccaggaggacagcctccaggcctggcacaacggggaagcccagcgcctcccaggggtgtcagggcggctcctgggcatggatttggacctggcctcaggctgcctcaccttctacagcctggagccccagacccagcccctgtacaccttccatgccctcttcaaccagcccctcacccccgtcttctggctcctcgagggtaggaccctgaccctgtgccatcagccaggggctgtgttccctctggggccccaggaagaggtgctcagctgaagaaggcatgggatggagccctggcatagctgccaccatgcctatgtgcccaagagctgcccagcttcagcttggggactggaggaccagctgttggcctctctgttaactcagaaagagatgggaggttgggggaggtgagcataaacgcagagttcactgttgcagcctttttgaaggggacacagtctaggagggggataaatgggatgcccttgccccagagagaacccagttctaggtactgtctgggcctgggaggcgagagcagtgcccaggggacttctgggcttacaggacagcgtgtgtgacaaaattcagatctacctgaacttgcctctggagatgataagggccaaaggagcagtcagggaggggcggtgagccagagtagtcccagggggagacagattcctccctcctccccgcctgcagctctctttaattttttgtaacatttggagagacgtccgtcctgtcttgtagtctttttattttgtgcatccttataattgtattctacaaacaattttgttttctgcatttaaacatttttgtgtttttaggagatggtcttgctctgtcactcaggctggagtacagtggcacaatcatggctcactgcagcctcgagctcctgagctcaaaggatcctcccacctcagcctccagagtagctcagattacagtgttttctgaagtttcctgacttaacataagcatttttcacatgattgaaaattttcactgattgctgtagtcattctaatgactatcaagtttatttatccattattggacatttaaatttctttctttttagctatacaaacattgatgtgttttttttgagacaggatctccatctgtcacccaggctggtgtgcaggggtgcggtcatgggctcatgggattctcctacctcagcctcctgagtagctgggattacaggtgtatgccaccacgcctggcttatgatgaatatttctgagtgggatgtttggccacatttatggtcatgtatgtaggctgttacctcaagtgagtcactcagggaacaatgagcacttgaagatttttttatacaaaaggccacagtgaggccaccttgagtcaagccgactaaggcccctcaaccctgtcactaagcagcacgtgacactggcaggaccttcatctccagcatcccacccctgggtgtgggactttggggcagccgtgtgtgcaggtgtcggcacaggctagctcctcctggtttggtgtggtgtttgccattgcagagcaagctgccacgaagacccctgggcatgattttgcttgtatttccggaagtggggttgctgggtcatagggcaggtgtaattttttttacttgaaatgttccacttcttgttctgggaggtggttccaagggtgtctgcttttggccaggcgcagtggctcacgcttgtaatcccagcactttgggaggccgaggcaggcggatcacaaggtcaggagttcgagaccagcctggccaacaaggcaaaaccccgtctctactaaaaatacaaaaattagccgggcatggtggtgtgcgcctgtaatcccagctactggggaggctgaggcagaagaatcgcttgaacccaggaggtgaggttgcagtgagctgagattgcaccactggactacagcctgggtgacagagcgagactctgtctcaaaaaaaaaaaaaaaaagggagggctgtctgctttttgtaacttgaaaaactggacatctatgttatatgtactcatggataaatatttcacaataaaactttttaaaaggataaaaaaaaaaaaaaaaaaaaaa

SEQ ID NO: 6594 - DNA, 3802 bp, Homo Sapiens
  NM_173555
aatcgggctcgatgaggaagacgtgagtcagagcttgcgcctctcgcttccagctgtgggtggcgctaggcagcttcagccggaccgggtaggggtcctcgctcgctagcttgctgtttctcggagaagctcccgagtgtccggcctagaggccatgagaaggcagtgggggtctgccatgagggcggccgagcaggcgggctgcatggtgagcgcctcccgggccggacagcccgaggcgggcccgtggagctgcagcggggtaatcctgagccgtagcccgggcctggtgctttgccacgggggcatcttcgtccccttcctgcgagctggcagcgaagtcctgaccgcggccggcgccgtcttcctgcctggcgacagttgcagggacgacctgcgcctgcacgtgcagtgggccccaacggccgcgggtcccgggggcggcgcggagcggggccgcccagggctgtgcacgccccagtgcgcgagcctcgagcccggcccacctgccccgtcccgcgggcgtcccctgcagccccggcttcctgctgagctgctgctgctgctgagctgcccggccttctgggcccacttcgcgcgcctcttcggggacgaggcagcggaacagtggcgcttctcgagcgcggcgcgggatgacgaagtgtcggaggacgaggaggcggatcaactgagagcgctgggctggtttgcgctgctgggcgtgcggctaggccaggaggaggtggaggaggagcgcgggccagccatggcggtgtcgcctctcggggccgtgcccaagggtgcgccattgctggtctgcggctcccctttcggcgccttctgccccgacatctttctcaacacgctgagctgcggggtgctcagcaacgtggccggcccactgctgcttaccgacgcacgctgcctgcccggcaccgagggcggcggcgtgttcaccgcgcggcccgcgggggcgctggtggcgctggtggtggcgccgctctgttggaaggccggcgaatgggtgggcttcacgctgctctgcgccgccgccccccttttccgcgccgcccgcgacgcgcttcaccgcctgccgcacagcaccgctgccctggccgcccttctgccgccagaggtgggcgtcccgtggggtctgcccctccgagactccgggcccctgtgggcagccgcggcagtgttggtggagtgcggcaccgtatggggctccggagtggctgtggcaccccgccttgtagtgacctgtcggcacgtgtcccctcgggaagcagccagggtcctggtgcgctccaccacccccaagagtgtggccatctggggccgtgtggtatttgccactcaggagacatgtccctatgacatagcagtggtgagcctggaggaggacctggatgatgtccccatccctgtgcccgctgagcacttccatgaaggcgaggctgtgagtgtggtgggctttggcgtctttggccagtcttgcgggccctcggtgacctcaggcatcctttcggctgtggtgcaggtgaatggcacgcccgtaatgctgcagaccacgtgtgctgtgcacagcggctccagtgggggacccctcttctccaaccactcaggaaacctccttggcataatcaccagcaacacccgggacaataatacgggggccacctacccccacctgaacttcagcattcccatcacggtgctccagccggccctgcagcagtacagccagacccaagacctaggtggcctccgtgagctggaccgcgctgctgagccagtcagggtggtgtggcggttgcagcggcccctggcagaggccccgcggagcaagctctgaggctgtgttaccacctttggaaagaagagtgacctttttctgctgtaggaagtgatgttgaggtgacggtggcctcaggattcagggcccagcccctgcaggggcccaggctgcctctcatctccacccactgactgcagactgggctttgggctctggggcaaacttctcttcagccccatggatccttaacctggcagcccgttttggggtgctttcttgagcccccagttctctgtcccctagcactagactcagctgtattgtttttccttctggggagcccactccaactgcacagaagttctgggcctgacaggtagattccagctggaaggcaggcccgtgcctggttttgcgtctgttcccctgagggccatcgtcatcctggagcttcaatggggccttggctcctgtctgcctctcagtcagagtcagggctgacaaaggactcagcttccttagcatctcagcagaaaccttgctctgaagaccagagacagaagggacagaaacaggagtgcctcctgctgtgccaggcccatgggcagtgcaggcagatccctgaaggtcagcactcctgggtcttcatatgccaacaggggcgctcttgacactgtgccttcattttccagcccacagcctgggtctcagggatcttgaggggtagaacatgtctggttggggcttgggaataaacatgatctattgaaaaacctctgtatttatatatcaaattgtttctttttttcaggagttgaactgggaataggcaagtaccaggcaaagaaacacaccctttccttttttttttttttttttctttagagctgtggtcttgctctctcacccaggctggagtgcagtgttgcgatcacagctcactgcagcctcaaactcctgggctccaggagacctcctgcctcagcctcctgaatagctgggactacagtcgcgcaccaccacgcctggctaattttttatttttgtagaaatggggtattgctttgttgcccgtgctggcttcagccttctggtttcaagcagtcctcctgcctcagcttcccaaagtgctgggattacaggtgtgagccactgtgcccaacccagaaatacaccctttctgtgctgttttctcagcagggtgtgagctcacgggatacggtcctgccagactggccctcatagctggtcatgtgccagtcagagctgggtggggcttgcaggtcccggaaggtggtggtcttgacctggcagcagatgcttaaagaatgcctaaggtgggtggcagttggggagttcaagggtgaatgaggccagggcagcccccaggagctgaggccaactctttgagtcaggactgtgccgtgtgcccagggccttgcatgtgtgggccctcgagtgatttctactggcaggctgaaagccctgtgaggggcggctgtgggcggaggccacgcaggaagagtgcttaggagtaacttgtttctaacacctgtgtgctgagtgccaatgctgggtgtggtgttatgatatatattggttttcatccagcattcctgactcgtaactctcatagtccttgttccagtctttgttagaatactgggtatgttagggcttgggacaggcctctgacctctgggtatcctttcactaatgttcgcccacctttttcacagtgggtcctaaagaccttcccatgagagggtctcaatcctaggggaaggaatgttgatgtcatgaaccttccataaaaacccaagaggacagggttcagagagcttctggatagctgaacacctggcacttcctggagtgtggcgtgcccagggagggcacggaagctctgcactccttccccttccctcattccttgctctatgtgcatctcttcatctgtatcctttgcgatatcctttataataaaccggtaaacataagtaa

SEQ ID NO: 6595 - DNA, 3045 bp, Homo Sapiens
  NM_173558
ctttcttcactctgaagccaagagccgaccttctgagccctcaagaaagatcagaacagattcatgggtgatttagcctatctgtcccaggccagcgtggctgagtgtgctggctggaggcctctctctctgcttcgagggtagctgagatccaccccggaaaccggcaggatgaagggggcaagtgaggagaagctggcatctgtgtccaacctggtcactgtgtttgagaatagcaggaccccagaagcagcacccagaggccagaggctagaggacgtgcatcaccgccctgagtgcaggcctcccgagtccccaggaccacgggagaagacgaatgtcggggaggccgtggggtctgagcccaggacagtcagcaggaggtacctgaactccctgaagaacaagctgtccagcgaagcctggaggaaatcttgccagcctgtgaccctctcaggatcggggacgcaggagccagagaagaagatcgtccaggagctgctggagacagagcaggcctatgtggcgcgcctccacctgctagaccaggtgtttttccaggagctgctgaagacagcccgcagcagcaaggccttcccagaggatgtggtcagggtcatcttctccaacatctcctccatctatcagttccattctcagttcttcctcccagagctgcagcggcgcctggacgactggacagctaacccccgcatcggtgacgtgatccagaagctggcccccttcctgaagatgtacagtgagtatgtcaagaactttgagcgagcggctgagctgctggccacctggaccgacaagtctccactcttccaggaggttctcactcgcatccagagcagcgaggcttcgggcagcctgaccctgcagcaccacatgctggaaccagtgcagagaattccacgttacgagctgctgctcaaggagtacatccagaagctgccagcccaggccccagaccaggccgatgcccagaaagccctggacatgatcttctcagctgcccagcactccaatgcagccatcactgagatggagcggctgcaggacctgtgggaggtgtaccagcgcctgggcctcgaggacgacatagtagacccctctaacaccctgctccgtgagggcccggtcctcaagatctccttccgccgcaacgaccccatggagcgctaccttttcttgttcaacaacatgctgctctactgtgtgcccagggtgatccaggtgggcgcccagttccaggtgaggacccgcatcgatgtggccgggatgaaggtgcgggagctgatggatgctgagtttccccactccttcctggtgtccgggaagcagcgcaccctggagctgcaagcccggtcccaggaggaaatgatttcctggatgcaggccttccaagcagccattgaccaaatcgagaagcggaatgaaaccttcaaggctgcggcccaggggcctgagggagacatccaggagcaggagctgcagtctgaggagctgggcctccgggcaccgcagtgggtccgggacaagatggtgaccatgtgcatgcgctgccaggagcccttcaacgctctgacgcgccgtcgccaccactgccgggcctgcggctatgtggtgtgtgccaggtgctccgactaccgggccgaactgaaatacgacgacaacaggcccaaccgagtctgcctccactgctacgcattcctcactggaaatgtgctgcctgaggccaaggaggacaagaggcggggcatcctggagaaagggtcctcagccacgcctgaccagagcctgatgtgcagcttcctgcagctcatcggggacaagtggggcaagagcggcccccggggctggtgtgtgatccctcgggatgaccccctcgtgctctatgtctatgctgcccctcaggacatgagggctcacacctccatccccctgctgggctaccaggtgactgttgggccccagggggaccctcgggtcttccagctacagcagtcaggccagctctacaccttcaaggccgagacggaggagctgaagggccgctgggtgaaggccatggagcgggcggccagtggctggagccccagctggcccaacgatggggacctgtccgactgagccactgccagccgctctcctgcccacctctccccaccctgaacccagctcctgccacagactgaccctgtggcctcagtgacccactgccccaagtggtgctttcagagaattgattcagccatctgcgcccaggccacgtgtcccgatctgggattagaaaatatgggtccattcctttctagaaaggggacaaccaagtgtctcagtttgccttgcggggagggggctcctgggccatgggacttccagtgctaaaactgggaaagccccaggtaaccccggactggtggtcaccatagtatggtttttcatttgtatctcctggggagcttttaaagagtactggtgaaaaacacatagtaaattaattttaaaaatgtaaaaaacaatgcctgtactgaagtaccaccaccgatttaaatgggctgagttgggggaggcatggggtctttttttttttttttttgagacagagtcttactctgtttcccaggctggagtgcacaaacatggctcactacagcctcgctctcccgggctccagtgatcctcccgcctcagcctcccaagtagctgggattataggtgtgtgccactgtgccaagctaatttttttattttttgtagagatgggatttcaccatgttactcaggctggtctcaaactcccagcctcaagcgatgctcccacctccacctcccaaagtgctgggattacaggcgtgagccaccatacctggcgcatgcatattttttaagagtacccactggagtctaatatatagcctgggttacctgggatgaagaataaagagagcaaactaccacaaccaatggttgagcccctgtcaagtgccagtcatgatagtagtaataataataataaacatctattggaccagg

SEQ ID NO: 6596 - DNA, 3122 bp, Homo Sapiens
  NM_173565
gggacgccgagagcccggcaacacctcagcccgagcccggcgaggtctctgggctcctggagcgagagaggtggcatctcactacgtggcctaggctgatctccctctcctggactcacatgatcctcccaccttggcccttcaacgtgctgagatcgcaggtgtgagccaccacacccggccctgataaaactcatcagtgctttgaaacaagcagctctgaaccaaagaaatcatttgattcaagtaaccattggatcttcccaaggcaatggtgaaagaaaagaaaaaagcagacaaaaaaggggagaagtctgcccgctctccctcatctctctctgataatctagacttttccaaacaagatggcaacaccactaggcaagagatgtccccagctggtgtcccattgctgggaatgcagctcaacgaagtgaaacccaaaaaagaccgccaaaacgttcagcagaacgaagatgccacccaatacgaagagtccattctgaccaaactcatagtggaaagctatgaaggggaaaaggttcgtgggctgtatgagggagaaggcttcgcagcctttcaaggcggttgtacctatcgtggtatgttttcagaaggactcatgcatggacaggggacttatatttgggccgatggattaaaatatgagggcgactttgtgaagaatgtcccgatgaaccacggcgtgtacacgtggccggacggcagcatgtatgaaggcgaagtggtcaacggcatgaggaacggattcgggatgttcaagtgcagcacccagcctgtgtcctacatcggccactggtgcaatggcaagcggcacgggaagggctccatttattacaatcaagagggtacgtgttggtacgagggagactgggtacaaaacatcaaaaagggctggggaataagatgttataaatctggaaatatatacgaaggccagtgggaagacaacatgcgccacggggaggggaggatgaggtggctgaccaccaacgaagagtacaccgggcggtgggagaggggcatccagaatggctttggaacacacacatggtttctaaagagaatccgcagttcccagtatcctttgagaaatgaatacataggggagtttgtaaatggatatcgtcacggacgtggcaagttttattatgccagtggagccatgtatgatggagaatgggtttccaataagaaacatggcatgggccgattaactttcaagaacgggcgtgtgtacgaaggcgcattctccaatgaccacatagctgggtttccggatcttgaagttgaattcatcagctgcctggacctgtcttcaggagttgccccaagactgtccaggagcgccgaactgatcagaaagcttgatggcagtgaaagtcattctgtgttgggatcgagcattgagctggatctaaatttgctcctggacatgtaccctgagacagtccaacctgaagaaaagaagcaggtggaatatgccgtcttaagaaatattacagaattaagaagaatttacagcttttacagcagcctgggatgcggccactctctggataatacctttctgatgacaaagcttcacttctggagatttctaaaagattgcaaatttcatcaccacaaactaactcttgctgatatggacaggatattaagtgccaataatgacataccagttgaagaaatccattctccatttacaacaatacttttgagaacatttttgaattacctcctgcatttggcgtaccacatttatcatgaagaattccaaaagagaagcccatccctcttcttgtgttttacaaaactgatgaccgagaacattcgtccaaatgcctgccagataaaaggcaatttattccgtgagcaacagcggacgctctactctatgagttacatgaataagtgctgggagatttatctcgcttactgcagacccagtgcagcgcctccccacgagcctacgatgaagatgagacacttcctctggatgctgaaagactttaaaatgataaataaagaattaacagcagctacatttatggaggtcatagcagaggataatcgtttcatatatgatggaattgacagcaactttgaacctgagctggttttcctggaattctttgaagctctcttaagctttgcattcatctgtgttactgaccaaatgactaaatcctatacaaatgttccagctgatgatgtgtctggaaataaacatgaaactatttatacaatactaaatcaggacgcccagaacaagagtcccagcgcggtcatgagccacgaatcggatgctgctcactctgacagtgccaggtcatcttccagcaagttagaactctcgcctgatgttaacaaaataaggaaatcagagcccaagatcaagaagtctgtaagtcatgaaagagtctccaaaatgaattttaaattgactggaaaagggatcacctttttctcatctgagagcaagaaatatgagagacccaaggatgatcgagaggaagagttcaacacgtgggtcaataatatgtacgtcttctttgtgaacacgctctttcatgcgtataaacgtgaagaagctatcaaggagaaaataagggcagacaggttacgtagcacagcacaggcccagcagcggaagatggaagatgacgaactggaagcaaggctgaacatcttcatcttgagagaggaagaggccaagagacatgactatgaggtggacatcacagtgctcaaggagccggcagacgtgtcatcctctcacctcatactggaccctcccaaggaggatgtgaccgtgtccccatccagcaagaccatcaccagcaagaagaagaaaaagtagagagacacgaggacacacacacaggcttaggatggcacgtgctgtaagatttcctgagcattacagttcttagcactgaactcgtcacagtgttttaacataccccttggcccactgcatctcaggtttcctacatggctggattacgggagttcgagaccagcctgggcaacatagtgagacccccccatctctgcaaaattaaaacatcagccgaccgtgaaaaaaaaaaaaaaaa

SEQ ID NO: 6597 - DNA, 3778 bp, Homo Sapiens
  NM_173570
ggggcacccggaagcgcgcgtggacctggcgcaccgagccgggcgggcggaggggcggttgggacggcgcggggaggcgggcgcgccgcccgggccgcggcgggctgtggtcacaggtgggcggctgcggcgagggagcggccgagcggagcccgggtcccggagactcctgccgtcacgcccggggctccgcgtagcagagatcgggagacgcgtctgtgcctccggggaagccgacccatctcccctccgcctctttggctgcagttgcacctccggccagagggcaggtgcaaatcatgacacagaagggcagtatgaagcctgtgaagaaaaagaaaaccgaagaacctgaattggagcccctgtgctgctgcgagtacatagatcggaatggggaaaagaaccacgtggctacttgtttgtgtgattgtcaagatctggatgaagggtgtgatcgatggattacatgtaaatctttacagccagagacttgtgaaagaatcatggatacaatttctgatcgcctccgaattccttggcttaggggagccaaaaaagtgaacatcagcatcatccctccgcttgtcctgctgcctgtcttccttcatgtggcttcctggcatttcctcctgggggtggtggttttgacctcccttcctgtgctggcactgtggtactactacctcactcacagaaggaaagaacagaccctgtttttcctgagccttggactgttctctctgggctacatgtactatgtgttcctgcaggaagtggtccccaaagggcgtgtgggtcccgttcagctggcggttcttacctgcgggttatttctgatactcttagccttgcacagagccaagaagaatccaggctacctcagcaatccagcaagcggtgacagatctctaagcagcagccagctggagtgcctgagcagaaaagggcaggagaagaccaaagggttccctggggcagacatgtcgggcagtctcaacaatcgcacaacaaaggatgaccccaagggctcttccaagatgccagctggaagccccaccaaagcgaaggaggactggtgtgccaagtgccagctggtgcgaccagcccgggcatggcactgccggatatgtggcatctgtgtgaggagaatggatcatcattgtgtctggataaatagctgcgttggagaatcaaatcatcaagcatttatacttgcccttttgatcttcttgctcacctcggtgtatgggatcacactgaccttggacaccatttgtagagacagaagtgtcttcacagctcttttctattgtcctggagtttatgcaaattacagctcggctctgtccttcacctgcgtgtggtactctgtgatcatcacagcaggcatggcctacatcttcctgatccagctgatcaacatcagctacaatgtgactgagcgggaagtccagcaggccctccgacagaagactgggcgccggctcctctgcgggctcatcgtggacacagggttacttggatgagccaactccgcttccttcccatggataggaagggactctgtgtattattcaggtttattggcacgaagatacttgttttaagttccttgagaacccatgatggacagttgacagaatgcttaaacctgtcaaaagatgagtgatcttgtgtgggaaaagccttcccaggcgtctgtaccgaaaggagcagcaaacaaggggctaatccatgagcagtgttctgtaggctctgtgacatctttggtttataggattttggagccttttatgatctggaactatttgaggggtttcattataggccttggttctctccaggggccagatgagtttattgtggaatctttgaaaggacaaggcctctgtgaatgaatcagtcccagggaagcatttggtggtggcggcagtggaggattgcccggtgaacctataaatcagcagtctcttgggcagaggagcaagcccctcgaacatgatttcaaacaagcaggtcctcttctctcatctcacgtccttagtctctgttaatgaacatactggatgtggagtttaataaattacctactatcatctggccacttagattattatcacaccactgtggactgttcctggggggagaagaacagaccgatttgaaagattcaagggagaaagattaaggatcaggattgcatgaaagaagaaaatccttcaatatttaaaatgtttcttacaatacccacggagcacttttatggttccagccgagcgttcctgaaatgaactgaccattaacagcgcctctttgataggttaccctgatgctgctaaagtaaagccttaagtgtgtttttgggacaacgtgctgcttattccacctcagccacatatgtgtttgtgtttaggatattgtaaatctttgctaagtagtgttttccttggtgaatgaagtcattgttgtcttcaagtgtaccatctgcctagcaaaaaattgctacaaactttctcttatgcaatagtccttggtacttctaatatttttagcaagagacaattttctgtactagaatcttccactgccagaaaacacagtgccagtaaggttctacataccactgaccatctgcttaatagacatgtatttcctttgagtaggacattagcttttgattataaagctcaactagtataagcaaaaatataacatctagaagcacagttttagccaggatgtttaaaaattacagttttgtgagacttaagggtctttttaacctaggtaagtttatatgacctaacttaattgtagccatattctggtaccttccattttgaaaagtagaggttgcttaagcaagcaatggataataagagacttttcctgaggcacctgtttggaatctggttttctcagcggcagcttgacatgtgcacccttttgtattaaacactgcaagggtgatgcaggggagcaggaaagccatcctaaactcactactgagtacgattcagtatgttcctgtggatgtctgctgtgactaatataaatttcttgcagaatcagctacacttaattatgttgctgatagacaagcatccacgcttcagctggcactaagtgttttcattgtaggatcagcagcaggttaaagactgaacggttagtgaagacaaatgtcttaagaggctgcgatgtctaggttgggcttgtgacttcttagtggcctagccttcttgatggcaccttgaaagtgaacttctagaaatctacatttaaaaggcaaagctttaaaagcagagctagtctattctagttactgatgcaactaaaattctgtatttcttaagatggagccactgacgagatgtcacagtatagagcctgcagtctcaactcattgtgatcctaatggtctgggtgattggatggtttgagttgttagggattttgagtttttcattttattgcatatctgggttggatgttagactaaaggaaacccaggaatatttacctggtgttacatttaatatttaatgtaactggtctagcaacattaagggggatttctgaagccaactccggaggctgtgggctgcacattttgcactgtttttatatacttgtattcatatcctcttatcacctcagactcagacacaaggccttttacatggaaattttacaaattacttccatttatgtaaaataacgtcctgtgaccaagttgtttaaatggaaaataaagtgctttctttaaggaaaa

SEQ ID NO: 6598 - DNA, 1665 bp, Homo Sapiens
  NM_173574
ggggaggtagcacaaagggaggaccatggtcttctaactgaggaacctgagcagatgccttgacccagaccagagacccaagccaaggaaagcccatgatcaccagagtaatggggatatgaaggaagaatcagctgcacaattaggttgttgtcataggcccatggccctgggaggtacagggggctccctgtcccccagcctggacttccagctcttccgaggtgaccaggtcttctcagcctgcagaccacttccagacatggtggatgctcatggcccatcctgtgccagctggctgtgtcccttgcccctggcaccgggcaggtctgcactgctggcctgcctacaggacctggacctgaacctgtgcaccccacagccggcacccctgggcacagacctgcagggcctccaagaggacgccttgagcatgaagcacgagccaccagggctgcaggccagctccaccgatgacaagaaattcacagtcaagtacccacagaacaaggacaagctgggaaaacagccagaaagagctggcgagggggccccctgcccagccttctcctctcataacagctcttccccaccaccgctgcagaacagaaagagccccagccccttggctttctgcccctgtccccctgtcaactccatctccaaggagctcccatttctcctccacgccttctaccctggatacccacttctcctgcctccaccccacctgttcacctatggggccctaccttctgaccaatgtccccacctcctcatgctgccccaagacccctcctaccccaccatggctatgcctagcctgctgatgatggtcaatgagctggggcaccccagcgctcggtgggagaccctgcttccctacccaggggccttccaagcctctggccaagctctgccttcccaggcccgaaatccaggtgctggagctgccccaaccgactccccaggcctggagcgtggtggcatggcatctccagcaaagcgggtcccattgagttcccagacaggcaccgcagccttgccttacccgctgaaaaagaagaatggcaaaatcctgtacgagtgcaacatatgtggcaagagctttgggcagctctccaatctcaaggtccacctgcgtgtgcacagtggagagcgtccattccagtgtgccttgtgccagaagagcttcactcaacttgcccacctgcagaagcaccacctggtgcacactggggagcggccccacaagtgctcggtgtgccacaagcgcttcagcagctccagtaacctcaagacccacctgcgcctgcactccggggcccggcccttccagtgcagtgtctgccggagtcgcttcacccagcacatccacctgaagctgcaccatcggctgcatgccccacagccctgtggcctggtgcacacccagctgcccctggcctctctggcctgccttgcccaatggcaccagggggcactagatcttatggcggtggcatctgagaaacacatgggctatgacatagatgaggtcaaagtgtcctcgacatcccaggggaaagcaagagcagtgagcctgagcagtgccgggactcccctggtgatggggcaggaccagaacaattaaaaatgtttcttctgtcaaaaaaaaaaaaaaaa

SEQ ID NO: 6599 - DNA, 8519 bp, Homo Sapiens
  NM_173582
cggcggcggagccaggacccagacatctgggactgttgttctctcgcggcgcgaccgcctcagtcacttcgcccagagacccggacctggtccgctggggagcaggcggccataaaccccctctctcccggttccctgacgccgcggcaggagctgttacaaacaccctgcggttggtctccgatgcccttcagtgaggtggggacgcctggaccctggtgagcgaaccccaagccaccccccaccccaactcagtgtcttcgccggcccccggcccgtacgcctgtctggtcgccatggctgaaaacacagagggggatctgaactccaacctgctccacgccccctaccacaccggggaccctcagctggacacggccatcgggcagtggctccgctgggataagaatcccaaaacaaaagagcagattgaaaacctgttacggaatgggatgaacaaggagctgcgagatcgtctttgttgccgaatgacttttgggactgcaggacttcgttctgccatgggggcagggttttgctatattaatgaccttacagtaatacagtcaacacaggggatgtacaaataccttgagagatgtttctcagacttcaagcagagaggctttgtggttgggtatgacactcggggtcaagtaactagcagctgcagcagccagaggcttgctaaactcactgctgcagtcttgctggccaaagatgttcctgtgtaccttttttcaagatatgttcctacaccttttgtaccatatgcagttcagaagctcaaagcagttgcaggtgtgatgattactgcctctcacaaccgcaaggaagacaatggatacaaggtttactgggaaactggtgctcagatcacatctcctcatgataaagaaattctaaaatgtatagaagaatgtgtggaaccctggaatggttcctggaatgataatttagtggataccagcccgctgaagagagaccctctgcaggacatttgcaggagatacatggaagatctgaaaaagatctgtttttacagggagttaaactcgaagaccaccttgaaatttgtgcacacatcttttcatggggtcggacatgactatgtgcagttggcttttaaagtgtttggttttaagcctccaattccagtaccagaacaaaaagatcctgatccagacttttctaccgttaaatgtccaaatcctgaagaaggagaatctgtgctggaactttccttgagactggcagagaaagaaaatgcccgggtagtgctagccacagatcctgatgcagacagactggcagcagcagaacttcaggagaatggttgttggaaagttttcacagggaatgagttggcagctttgtttggatggtggatgtttgattgctggaagaaaaataaatcaagaaatgctgatgtgaagaacgtttatatgttagccaccacagtctcttctaaaattctgaaggcaattgcacttaaagaaggatttcattttgaagaaacattaccaggttttaaatggattggaagtaggataatagacctcctggaaaatgggaaagaagtcctttttgcatttgaagagtctattggttttctctgtggaacttcagttttggataaagatggggtgagtgcagctgttgtggttgctgagatggcatcttacctggaaaccatgaatataacattgaaacagcaactggttaaggtttatgaaaaatatggttatcatatttcaaaaacttcctatttcttgtgttatgaaccacctaccatcaaaagtatatttgaaaggcttcgtaattttgattctccaaaagaatatccaaaattttgtggaacatttgctatattgcatgtacgggacgttaccactggatatgacagtagccagcctaataagaaatcagtgctgcctgtgagtaaaaacagccaaatgattacatttacttttcaaaatggctgtgttgctacccttcggacaagtggaacagaaccaaagataaagtattatgcagagatgtgtgcgtcacctgaccagagtgacactgctttactggaggaagaactgaagaaactcattgatgctctgatagagaattttcttcagcctagtaagaatggactgatctggcgttctgtttaggggtacaccaatatgtcatgacactgtgtgggcatatggaacagagcaaccgagaactgcatacattgaaccttgtgttagcattctctctctatctcatctggccgagtatctttttccttttattttctttctttttggtcaactggctagactaaacaaagtataagtttgaaatgaaatggtctagagggaaatgattcaaattttttcataattcaaacaaaagttattacactaaaagtattatagtaacgtattgtccttccgttaacagaaacatcacaattcaaaagtgagttttcttattatagtgtgattaagcctagttctgtatctcgtaattgtgtatagcatggtaaaagaaaaaaaaaaagacaggtaaatgttatataattgtagggttagttaaggaaattagtccataaaattggcaagaaaatggtactttccttgattgttatgaaaaagtgtcattgtgacatcacaggtattaatttacaaattagagtatttgaaataggatatttagcatttctgtagtttagaacagatgttacagtgtgtggttttggcatgtctgtttcaggtgcccttggtgcagtataaatttactgtatgtatttaaaattctgatgtttactgaacataaaacaatagtggcaacactcctattggctttgttcttatcaaatttctcagtgccttctcagggtctggtatgaacagaaaaaacagtgttcctgcatttaccataatttaatcagtcaatttgcagatagctaaggaaaatcttccaaaatctgtaggtgcttcctctatatcaagtgagtttgctgattttaaaatcttaggaatataaataaagatcttaataaaagcaagcttaatgtagttaaggatcttcatattagaattgtgtcatttatcaaaccttttattacagaaaaaaatctgaactgagaaaggagctctgaatttatttgacagtctaacttttgaattacatttttgtaagtagatttattcttttattttatgaagtaatgttaattttactaagaataaaacatccaaattttaagtattatgaaatactaaaactacatgttttaaaacagaggtccagtttattctaacatcttgctgacttctgtagaatttctgattgcatgactattatttatcttcttttagtgtagaaaataattttttacaaaaagtcacttttgggctgggcgcagtggctcacgcctgtaatcccagcactttgggaggctgaggcaggtggatcacaatgtcaggagtttgagactagcctggccaatatggtgaaaccctgtctctactaaaaatacaaaaattagccgggtgtggtggtgggcacctgtagtcccagctactcgggaggctgaggcaggagaattgcttgaacctaggaggctgagattgcagtgagccgaaatcacgccactacactccagcctgggcaacagagggagactccatctcaaaaaaaaaaaaagtcacttttggctaatcatgcagtcttctgaaaaggtttaatagagaaatgctgtttaggctgggcttggtggctcacatctgtaataccagcgctttgggaggctgaggcaggaggattgcttgaggccaggagtttaagttacagaactatgatcacactgccgcactgaagcctggatgacagagtgagaccttatctcaaaaaaaaaaaaaaaaagagagagagagagaaaaagaaatgctgtgtttaatcttcttaaaatgtatcttgtcctacatagttctcagaatacatatggggtatagttaggagataacaataacaagacctaaacaaattgcttatgggagatagcactgtaattagagaatttatttcatataaaataataatataaagtttgaactgattagaatgttccttaaatcatggtttcgtttgttgcagctgtcagctaacatttggttgagctcatataatccaaacctaattgtccaactattgtattgccactattgttaatttgttccttccttactttcttattgttggatcttatatgactgtatgactgtagataatagacagctagctaaatgtagagcaccatttttctcaatgagtttgttttcaaaggctttgcactggagaagatatgtgtagaatttttgttttatttttaaaatgtgtaaaacatcttttgttttatatgcttttaagaatgtagattgtaatttaggaaatggcatatattctgcaaagtggtataatgttgtatatatgaaaaacaggtatatttggtttagttctgtgtttcagtgactgataaacaaaaatgaagctaaaatgaatcaacggctcattcatagttactaaagccatgtcatgactgtcattctattatgaagaaaacagttttatttgagtgctttaatataatgcaacatttaagtcatcttaaggtgaaaagttattgaagtgttcttctctcaagttaacaaaattttacaaatgttcctgaagtgtatcgattgagggaattattttattctagcctgtcatgagtctgtctgagcatgatacttaacatgaacttgatgtagtaggtgcacatttgcctaacaggataaattcagtgatagcccaagctggtcaggagagacagaagtgctggctaggaggtctcagcctcgggcactacaatgtttatctttttctttttgaacaatattgtgaaaatgattgcattctcattgagcatgaaagtcaaaactggaattttctaaagctttggagaaaaggagagaattagtagggcaagatcaaagcatacattggaaataaacagtagaaataagcaaacaatataaagagacacgggaaatgcttctcgtgaagggcaaatgtaacaccataacagtagggaataaactgtgtcccacctgtttacttgtgtttatttgttgttatgatgagtatgcacctaccattttcctttattgtgatcactaaaatgaggccaaggtttaggaggtgagaaaaagtatcccttttacggattcagttcctgctaggatgttgtatcagaatcatgtgagaactcaggaagaggtagagcagaaataaaaaggaagaaaatgtagattagaaaataagacttctgagaaaaagttcaaggaataaagattgtttgactctggagaggagaaagctgttgagatagtttgctaagtttgctaataaagctttattgagtcttttattgaagggttcaaagtaagaaatactatgccatagtgttctccatctctagtgaagacagaaccagagggaataaggatcttttttttaaagacagcatggaaagtttaagatttaggaacttcttgagaaatcttcataatatcttctattcaaaatcttttttttatttttaagggaataaaaattttaaaaattaagagatatacagatgactttttaagggtccttctttccagcacattttttttaaaaactcaggttagaataaaaatgtcataaagggcactaaaagtaacatttgggtttcactccatatctagaagaatttagctcacaaaacaatttttgtgtgttttgagtaactgatgcataagtgcaatgaataattttcctgcttcactgttatttttaatttaacctggcaaattaagtgagacttgaacaaaattttgttcatcttgaagaatgtatagtggcttaggttatttgaggttttcgttttgaatatatatgttgttattttgatgtagatacgttagcagatggagaggttctaagagattggatactttggaatgtctttatataggaaatagacctcccatttcttaagcaagttgcttctggaattgatgcaacagggatattagctgtagtttaatggataagttgttctatgagctgctgctatcagtacttttttccacattttccattgatatttgtgatgcttgaaaaatccaaacttcacttggatacatttaattttatgcctttttctctctacctcccacttttcctaggcacccttgcacattttgttactgtgaaggactattgccctgttacctcactgataagaaatctcaactgtattcattcagaatgctttaagcttagtcataaactacatttgcctatggacctttggttattttgttaatgttgtcattatatttaagacttattgtaggaagtaattttaaatctatttcataacctgttttgatctgtctgcatactgctatatgttaatttattacggccttttacaattcacttgtcatctgagattgttctagaaactgatgaggaaagagtcgtactaaccaaaatgaatgggcaattgacataacattctatttcaggtttccttgtacttggggagccaaagcacaagatctaaggaaatcttattcacatttgtccctcagagcatcttaccctaagccatagaggtataaatagtaagatgagaattgctcattgtctgactccttgcacagcatgaatttaattctagttggaaacaaagttagtgttgactactggttaccttaaagtattcaccatactatatatttattagaccatctttcctctttgtttattcaagactatgtacttataaaagagaacctataagaatgtgtagagtgaccaaatagggacaaagtgacatacctagagtttgctgctcaaatttttccactagcgtaaccctaaagcagaggggcatgatgaagggggaaggggttctgagagcaaaatcagaatcagcctaccactgacatgaagtgtgttctgtctttaaaatgtaagtgaattttgcattctttataataaaacttttaatataaaaatgatatgtttaatctttactgaaacttatgccaccacaaaggagcaccatgttcatcacgtggctgctcagttttctcccccagtgccctcacccccagtggaggcaagtccttgagctacacacactggctgtagtgcaagatatataaacataggccgggctcggtggctcatgcctgtaatcctagcactttgggaggccgaagcaggtggatcatctgaggtcgggagattgagactagcctgaccgacatggagaaaccctgtgtccactaaaaatacaaaattagccgggtgtggtggcacatgcctgtaatcccagctactcgggaggctgaggcaggagaatcacttgaacccaggaggtggaggttgtggtgagccaagatcgcgccgttgcactccagcctgggcaacaagagtgaaactccatctcaaaaaaaaaaaaaaaagatatataaacatagaacatatccagactatttcctgcccttggaatctgaccttcagaaggattaatgccaaactaaactgacctgaaacagttttgttactattggcattccttgactaaaaaggaccacctgatgctcagtcccgagagtaggaatcgtggtttattatttttcatatccataccacctagttcagtacctgttatagagtgtttaattgctgatactaggaattaagggattttttaaaagtagcaaatagtttaaggaacaatcaaaaaatgaattttctaattcagttttttcaatgaagtcccatcactgaactttataatgtaatgtttattaagcagacatccccttaaatactcagtttctttggagagagcaaagcatatctctctgtggaaattatatataatgcctggtattttacactcaaagcaaggtgttggccaggaaggtaaagaaatggtgtctatgtagacttaatatcactagtctaagtgtcattttgagcctagtagcactaccttccaagtgagtcacaacaaatttgatcctatttggtatgtttttgtccactgttatgattcatcatgtatcttacaagagccactcaagcaagactctgcttctatgtatggtgaggccttgttgttctaggctagaataaactctttgtatgcctcattgaatatgccaggtaaaatatatgcagtcaagaatgaattatttttctgactaaagtgtgtagcagtagttcaaaattgtgcccttgttttaacagtttctgtcaacatcttctcatttttccctacaaaaacaccagggtgtattataagtactgcctgtgagaatttgcactttatgtatttgtgtgtggatttcttgtggttttagccaaatgaagtgttatcagtaataaacaggtctcttcataggaaaaaaaaaaaaaaaaaa

SEQ ID NO: 6600 - DNA, 1838 bp, Homo Sapiens
  NM_173584
aggtctagccggcaagccggagggcgggcgagacaacaacgtggcctggaggcaatggccctggcctctcgtgtccccttctctcacccgcccagacttgccctctttggaggtcgcccgggctaagctttcaggaccccaccttccttatcaccaggtcttctccactggcccctgagattgccatcacctccagctcctcctctcctgaagttggcagcccctcctgggttccagcctcctgagatgccagacccactggggcagtacccacaggccctgagcctacatcaaccaccccagtgacaccccaagcctgcagcattttccacccccagccccctggtcccaccttgccttccgcccaccttcccacctgctgcagggagggccctcggctgagccttcagacacacttgcaccccatccgctcccctcctgaatttcttctgaccctcccttggcttcacagcacctgaaggccaggctgaggccccctgctctcatggccagccctggaaagcctggggctgatgaggcccaggaggaggagggggaactcgaggggggctctgcagggccgcgggctgcaatactggagcaggctgaggagctgtttctgctgtgtgacaaggaggctaagggcttcatcaccaagcacgacctgcagggtctccagagcgacctgcccctcacgccagagcagctggaggctgtgtttgaaagtctggaccgggctcacactggcttcctcaccgccagggagttctgcctgggcctggggatgtttgtgggggtggcgtcagcccagggagcgaacccctgcaggactcccgaggagacctttgagtcgggcgggctcgacgtgcagggcacggcgggctctctggatgaggaggaggaagaggaggagcgattccacactgtgctggagcagctgggggtggccccggtcctgggcaagcagcgggctgtgaggacgctctgggccaggctgcagcgcgagcgccccgagctgctgggctctttcgaggatgttctgatacgcgcgtcggcctgcctggaggaggcggcccgggagcgcgacggcctggagcaggcgctgcggaggcgcgagagcgagcacgagagggaggtgcgcgctctgtacgaggagacggagcagcttcgggagcagagccggcgcccgccgagtcagaacttcgcccgcggggagcggagaagccgtctggagctggagctgcagagccgcgagcaggacctggaacgcgcgggcctgcggcagcgggagagacgtggtcgccgtctccaggaacatgcagaaagagaaagtcagcctgctacggcaactggagctgctcagggagctgaatacacggctgcgggatgacagggacgcctgcgaggccaggcgggcgggcagcagctgcaggaaggctctgacaacagcccgcctgcctgggcccacctgctgctgctgctgttgctgggctcggccccccagacgcggctctggccaccttcccagtgcccggtgaccagccccgagtgactcacggaccatgagctagaagctgcccttgcaggaggcttgtcatgggtcgggggtgcccactcaggatgcaggctctccccagtgggccccaggctcgcctgactgaagacatgaaggacctagcctaggagtggtcagggtcccgggagtggccagggtcccgtgtgtgccctctgccagtcttcgctctgtccccgttcaatcaaccccatctcagttcagcagaaaaccccctcgtcaaataaaacccactgactgcactgcgaaaaaaaaaaaaaaaaaa

SEQ ID NO: 6601 - DNA, 3233 bp, Homo Sapiens
  NM_173589
aacggttctaacagctgggtgcgggtggagctgcgggcgatcgccagctcgagtgcagattccttgctgtgaccgaggttcagagtgagctctgtcggtgtgtcagtttgcctcttcaggtgattgcacgtctgtgtgcgagtctctccgtgtatgggtggctatgattagggtgagcctcagactggaactcaagtctaagttcattcactgctccagcaggcactcttcaatgaaacctcatcagcagatcgggctctcttcccttgccttgcctcctaacccccctaggccaggtgagggggacagggtactgggaggtaagaaggaactcttctgcaaggagggctctcacgtctgtcttaggcctgctccttaccagagtctttggggaagcagtagggagggcctgagggtctcaggaaaggctctctgctggtctggctctgctctgtagctccatctatttccctgtcccaggtcctttcttcctcctaaccccattgactctgaccatcccctgcccagagcctgaggtcccttctctggcccctctgctgggctggcccatgcaggtgaggccccgcatctggcatcctggaactggcagttggagcctgagctatgggcaaggtcacttcgacagcagttgaatgcccagctcctcatggtcccggaggagaggagggtaggtttgtcttctgatgagacatcatctgattcccttaagtcttggcactccatatgtgtcttggacagcaaagaacagcccttggcctgccagcagaaacagaggcagttcgtgaagccagtgactgagtcagagcagcccacagtgctggaactcctgctagctgagctccgaactctgttctcagctgtgttgcaggacagtagccctgcagcttggcgctatcttcatgcagtactgggtctactgcctccatatcgtgagttgctagttggccaccttgatttgctgcccttcctggagcagctgtactgctgggcaccctgggtccaaacccacctccatctggacctgctaggtgccattgtccaggcctttcctccagacagctctttgttagacagtgcttcccatgctgactgctgtccccagaagcggaggctccatcacaggcccccatgcccagcttgcccttttgtgcaggcccagtggagcaggcagcaagtaaaggaggagctggccacctggctgcgaccattgacactgcctgagctacagcgctgcctgggcattgttggtgctcaggtggccctagaagaggctgtgtggctggatggacttagtctccttcccttggcactggcagcggacatccctgtacggtatgaaagcagtgacactgacaatgcagaggtggagcctgttggaagaaaagagaccaggtctcagcttgactatgaagttcccagggaaaaggccttccaaaagagcagcaccggcttttcacctgagacttccttcctggatagccaggtgatgactgctctgaagatggagagatacctgaagaagatccacttcctctatctcaatgtggctcccagccggtactttaggccttacagcctgatggtggtgccacccgacaaggtgaatcccgagcactacatcttctctccctttgggatcttgcatgtacatcctgtggaaggtagcgagacgatgacactgggtacctggcaccatcactgtgttctctggcagcagctccagttcattccattctttaagtattgcctcttacgcaagtcctttacctgttggaagaagaatgtgagattacaggggctgcatcgactccagaaattcctagagaatcatctgctcttggctgtgccccactttggagctgggctactccatattagcaggcttctgcaggagctacactctgtgtcctggctaccccaggaactggatcggtgctatgagctgctggacctgcagacggctctagccgaggagaagcataaggctctacggctgctccatcgttgcctaaacctctgcacatccattcttcgactggttcacgaggacacataccacatgcaacagtgcctacaggagcgagtacaaaactgtgacaggatcaggacaggccaaggctccatataccttcagagggtacagcacaagcaactggagcagaagctgaagcaagcagaggcctggtggctgcagctgggaaagtttgcccgcctggttgactacatgatttgtcagagcctcatttctgtcttggaagagcagataacctcttttgtggccaacatccttcaagccccaaggcagaaaccctttctctcatcacagctggtctttgatgatcatggtcaactgtctcatgtgccctgtgttgaaaatatgatccagactctaactggaggcctacagtctgtcaagacctctgccttgcaggtattctgaattgggcagagagctggctgtgggaattcccagttcctatcctctgagtaatcagaagctcacaacctggtttgaatccctcattgctttcccatttctgccccttctccatatcctggcatgaaggtagtgcagtctgcagacctgaagacctcctcggattccctgtattctgaaggtatttagggagacctaggcagggggtaggaaggctgaaggagggaaagggcacaagtactaatggcatgggaagaaggcaggaggtccaggctatagagtcaggcactgggtgtggatggagcagctctaacctgggtactgcacatatgtgttgtgggtagaaaggtcagggaatgtttttgctcacaaattcacgtggttatgtgtatgtgcgtgcaatgagagggtgtatgaaagagtgtgagtacattgtccttccaaacctgattcatcccaaactctgtgaggtttttctccagtgccataattgcatttcatttactactgaattttattgctaagtaaatttgtacttgtttgaagagctctgcttgctcaacacttgctttatgtcatatagctctttttcatttcatatggattaattcattgtattgaaatattttatggttaccaattattattggttatcagtcttcacacttattaaccatcagcgtggaaacacatcttcacatttcccttatttaggatactaatgctgtcacaaataaaatcattaaatgcaatcagtcaaaaaaaaaaaaaaaaa

SEQ ID NO: 6602 - DNA, 2946 bp, Homo Sapiens
  NM_173607
cgggtgagtcccacttcccgacagcctggctcggccagcgactgggcggggagaccaaggatggaagtgggcttaccggccattaccctctttctcaccagcgccagcagccctgtggtggcgacgacgatggaccaggagccagtgggcggtgtggaacgaggagaagccgtcgcagcctcgggagctgcggccgccgcggcattcggggaatctgcagggcagatgagtaacgaaagaggctttgaaaatgtagaactgggagtcataggaaaaaagaagaaagtcccaaggagagtcatccactttgttagtggtgaaacaatggaagaatatagcacagatgaagacgaagttgatggcctggagaagaaagatgttttgcctactgttgatccgacaaaacttacctggggtccctacttatggttttacatgcttcgggctgctacatcaactctctcagtgtgtgacttccttggagagaagattgcatctgttttgggtatcagcaccccaaagtaccaatatgccattgatgaatattatcggatgaagaaggaggaagaagaagaagaagaagaaaacaggatgtctgaagaagcagaaaaacaatatcaacagaataaattgcagactgattccattgttcagacagatcaaccagagacagtgatatccagctcatttgtgaatgtcaattttgaaatggagggagacagtgaagtaattatggaaagcaagcaaaatccagtctctgtcccaccataaaatgaaatgactatcaagcttcaaactcttaagttttttttttttaatacaaaaactttcacattctttattcagtgggacttaatacaattatttatattttaaattattaaagtatctggaaagggaaaatgttttcttcatttttaggatctatctagcaaaagccagatctgaaattcagatatttgtactgtttttactgtgtatagaaattagtgctttggttttaaaatgatcttttaaaaaagttaaggacatcctagagccttaatagttaagaagagttaaattatcaagcctatttgtgcatttgctttttttgaaaaaggtaagttgctgattaagtctaattggaattgataattccatagtcttagattaaaatgaggatattttctcctagattttctcatgttatgccatgcatttatatatctaaccattaatttcacactaaggatgcttcaccatataataaaaggagcaagatggaagcactttgaattttctttcattgagaataactgttttatgtaagaatctgtatttataacaccagatattaagataggcttccattttttaatgcaagccacttacttaatcttgtattctttttcaggactcaaataactagctttgaacataatattaaaacactacttatagaatagatttattaatgttaatacctagtgaatatccatgtggcatcctggttatgttatcggttcagcgttaatcctatagaaaagtggtttggaggggattgggggatagtgggacaggtatagatttaatccatcaggagcaattagatattgtataaggtgcaatgatagcctaatgaaattacccgtcattcatcatttagaagtagcaacagtgaagactggacagtttacttgaatctggttggccactcctctacctacttggttatttgtaaaccttacaaatgtatatattgtgaagctaattttgaaaatattcctaaatatggccaggtacggtgctcacacctgtaatcccagcactttgggaggctgaagtgggcagattacttgaggtcaggagtttgagaccagcctggccaacgtagtgaaaccccgtctctacaaaaatacaaaaattagccaggcgtggtggtgcacgtctgtaatcccagctgctcgggaggctgaggcaggagaatcacttgaaccagggaggtggaggttgcagtgagccaagattgcaccactgcactccagcctgggcgacagagtgagactccatcttggggggaaaaaagtatatatatatacacacacacagacacacacacacacacatatatctctaaatgtgtgtatagaaccttttatcagtataacattgatttataattaaatgtgggtgaggaagaatgtgtggagtgtttcagaaattttgatcttaaaagccttttcagaaactcaaagctttcagaaattaatagttatattaatagccttctaaacagcattaagttttcaattttaatatatctatataaaatatagtgtcaaagaaagtaacatcaatatagtgggtctgtaatggaaatctgtcaatgaacatgaactgagttcttcaactacaggttgaaggataattaaacttttcattaggagtgttcagctacatggattcatggaatggtggttcatagtaagtgatggtaatctttttattcatgggtgtaaaccctttataacttagtgcttaaaatattaatcttttgattatataatgtcccatgaattatagtttaccaatagttctaaaacatgctaacctgaccttttccttctaatttgtttttaacttcattcgagatagtacctctcactcacagatatttatttggttatcaagtgaagataggtgtgtctaaaagtgatcttctgaatcctgtctccctagaggtactagtatctagagtttacccagaaaattttatgattgtaacaaaaggaagtagtgacttatgaaggttttgtttcttgaattttacttttgctacttgtccaatagtggctagtttatgtttatcaatatagttattcactgtgccttaagtttatactttgtttatgcaaactataaaatttcccataaatgtattcaaaaaaaaaaaaaaaaaaaaaa

SEQ ID NO: 6603 - DNA, 1563 bp, Homo Sapiens
  NM_173608
ttccagccggagcggtaactgggcgcaggtcccagccgccgcactaaacccggcccgtgcggtgattggacgcaggccccgggccgcggcggaggcgggcgatccgaaagaggctggtgctggctgcatggggaggcggcggcagcgggtggaccccgcggctggggcccgggccggggccctgcctgaggccatcgccgcgttgagtcggtcgctgccctcgggacccagccccgagatcttccgccgcgccaagttcgaccgtccggaggcgacctccgcgctctggcagctcctcttccgtgtgctctcgccactccctgcgggcaacgccttggcatcgctcgccctggaggtccaagcccgcttggtgaagtcagcactatgctcccagggctacccgaggctggcactggcacaactacctgaggatggctcgcagggcagtcgggagctgctgctggctctgtcctggctcttggcccgaggacctgtgcccgagcagatgctggcccaggcccgagtgcctctgggtgacgagatgactgtgtgccagatccacctgtacacacgcggctgccacagcgaccagagccttagccatctgtctgtcactgaagcagagatgctcagggacccagagggaggccagcagctgctgcggactctggagcgtgagaaccagcgcctggaggctgtcctggcgtggcggcgctctgagctggtcttctggcggtggatggacacggtcctgggcacctgtgccccggaggtgcctgctgcagcctcacagcccaccttcctgccctgggtccccgagcgcgggggtggcgagttggacctggtagtgcgggagctgcaggcactggaggaggagctgcgggaggctgcggagcgcaggcgggcggcctgggaggccaaggctggaggctgtggacgggggccagagtggagtgccgcgcggcgggcctctcgggaggctgtggaaaaggagctgggagctctacagcagtgctgggagcgagacggtggcccggcccagccccatgggccacaccggctggtgagacgagaggatggggcagcaggggaccgggacctgcgggcagctgtggtgatcaggacgctgaggagccaggaggcctgcctggaggcggtgctacgtcgactacagggacagtgtcggcaggaactggccaggctggtgggagcccgccctggtctcatctggatcccgccacctggacgctgagggcctgtcgacgggccctcgtgtgggaagcctgccctggcccagcctggctgggtcttggaggagcagattccaaggccaggtggccgcagggacgatgcagatgcagagcccacgtcacatgctcgctccaggggtggggctgggctgactctggccggatcccaggcctgtggctagcagcactggggacaggaatggctggtcccttgaggaggtcgtgacaggctcagcctggtggtctggaggggactcggaaataaattgtagcagctttcctgccgctggccctccccctgccaaaaaaaaaa

SEQ ID NO: 6604 - DNA, 1185 bp, Homo Sapiens
  NM_173618
acagccttgcagcgtctccggaagtggaggcgggagcggcacggcagccactgcttggggtagcgggagggcagactctgggcgccactcccgggccggtcatgaacgggccggcggacggcgaagtggactacaaaaaaaaataccggaatctgaagcggaagctcaagttcctcatctacgagcacgagtgcttccaggaggagctgaggaaagcgcaaaggaaattactgaaggtgtcccgggacaagagtttcctcctagaccgacttctgcagtacgagaacgtggatgaagactcttcggactcagatgccactgcatcatcagataacagcgagacggaggggacacccaagttgtctgacacaccggcccctaagaggaagagaagccctccgctggggggcgccccctctccctccagcctctccctgcctccttcaacagggtttccccttcaggcctccggggtcccctccccatacctgagctcgctggcctcctcccgctaccccccattcccttctgactacctggccctgcagctgcccgagcccagtcccctgaggcccaagcgggagaaacggccccgcctgccccggaaactcaagatggcggtgggaccccccgactgccctgtgggagggccgctgaccttccctggccggggttctggggctggggtcgggacaaccctgacccccctcccaccccctaagatgcccccccccacgatcctgagcacggtccctcggcagatgttcagcgatgcaggtagcggggacgatgccttggatggagacgatgacctggtgatcgacatcccggagtgaccgtgacatcacgccatgcccaccacggccccgcccggcgccctccccgtgccagcacacacgagtccagcttcctcggaggtgtttattgatgcccagctgccatgctccggccactgacacaaccagaaaaggcgtaaacatgcacgggtgtcccccaggagggtggcaggggccctgccttcaaaccccggccccctccaggggacagttatttaaacgagtggccgggagcatctgccacctgctggggaggcagagaccctgcaatggccacctctttaaaagggctgctgtacagggctaggttttttcaatgaagtttctgtattaaaggagtggctctggg

SEQ ID NO: 6605 - DNA, 2272 bp, Homo Sapiens
  NM_173620
cgccgcagcgcgcgcccttcccctcctcaccgctacctgctccggttccggcgctcggccgctccgttgccctcgggcgccttggttgcggccctccgctgaggagccatcggaccaggccgccgcggagccgggccggacgcgggcgccaggcccggggacgaacgccgtaacagggagcgcgaggcaggcacggcgcagggacgcgagtgcgacgcgctcggccatcggcccctgggctggcggccaggcccgagcaatcggcggccgagcggggcggggctcagagcggaggcggcggccgcgagggcggggcggccgggcctggctgcgcccccggacctcgcgggaccgcggcggcgcaggaagaagtccccaaggagacttcgccataggagttcacaggaaatattgaaatgtcaggttccactccatttcagatgagattagttcatttagaccttaaaggagctccaccaaaggtctcgtacctctcagagatttttcctctgttccgtgcgctaggtgcaaacggcctcctcattgagtatgaagacatgtttccctacgagggccctctgaggctgctgagggccaagtacgcctacagcccctctgaaatcaaagagatcttgcatctggctggactcaatgagctggaggtgattcccttggtgcagacatttggacacatggagtttgtgctgaagcacacggccttcgcccacctgcgggaggtgggctccttcccctgcaccctgaacccccacgaggcagagtccctggcgctggtgggcgccatgattgaccaggtcctggagctacacccaggcgcccagcggctgcacatcgggtgtgatgaggtctattacctcggagagggggaggcctcgcgccggtggctacagcaagagcagaacagcacggggaagttgtgcctgtcacacatgcgggcggtggccagcggcgtgaaggcccggcgccccagcgtgacacccctggtgtgggacgacatgctccgagacctgcctgaggaccagctcgcagcgtccggggtgccgcagctggtggagccggtgctctgggactacacggccgacctggatgtgcacggcaaggtcctcctcatgcagaagtaccggcggtgcggctttccgcagctgtgggcagccagtgccttcaagggtgccacggggcccagccaggccgtgccccctgttgagcaccacctcaggaaccacgtgcagtggctgcaggtggcgggcagcgggcccacggactcactgcagggcatcatcctgaccggctggcagaggtacgaccactactctgtgctgtgcgagctgctgcccgcaggagtcccgtccctggccgcctgcctgcagttgcttctacgcggaggatttgatgaagatgttaaagcgaaagtggagaaccttctcgggatttccagcctggaaaaaacggaccctgttaggcaagcaccctgcagccctccctgtccccttcttcccctccccttcccccgcccgtggagacagctgttctcagcagggctctccgcagggagggggccggctccttccctggcagcaacatccttgcccttgtcacacaagtcagcctccatctgcgcagctctgtggatgcgctgctggagggcaacaggtatgtcactggctggttcagcccctaccaccgccagcggaagctcatccacccggtcatggttcagcacatccagcccgcagcgctcagcctcctggcacagtggagcaccctcgtgcaggagctggaggctgccctgcagctggctttctacccggatgccgtggaggagtggctggaggaaaacgtgcaccccagcctgcagcggctgcaagctctgctgcaggacctcagcgaggtgtctgcccccccgctgccacccaccagccctggcagggacgttgctcaggacccctgaggggagagctcatgccagggggctcctgctggaggctgggggggctctgcactgccaaatggcctgggcaatacgggcccacgtgggcgtcgtgccctctggcccagcagtgtcttgcccacactcagttcctgagggccctgggcagcccctgggggagagactagaaaacacagaaggaagcagcacagggagacccgctttgtgatctgcatgtgtgacactgattctttggaaataaagagtggaagctgcaaaaaaaaaaaaaaaaaaaaaaaaaaaaaaaaaaaaaaaaaaaaaaaaaaa

SEQ ID NO: 6606 - DNA, 2489 bp, Homo Sapiens
  NM_173622
aggggcaagaggatggttagctgcagcaaagagagagccaaagagaagtgggattgagagcacaggggacagctggagacaaaatataaacgccgggcaggggaacagccaagatagtgcaggaaggatggggaatcacagaaacttctcaggaacccagtgaaatgagctgcaccaggaactttaagagagagttttcagctgggagaagaggaaggcaagatatcagaacaagaatctgaacctgtgatgttaagaaatcagtaaatattaaaaagaagatggatgcaagaaggatgaagaaagaaggactcacagaaaacactggacttccccggaagctacttgaaaaacatgacccctggccggcctatgtcacctatacctctcagacagtgaaaagactcattgagaaaagcaaaactagagaactggaatgcatgcgtgccctcgaggaaagaccctgggcatcaaggcagaataaaccttccagcgtcattcagccgaaaaggaggaagtcttccaagtcttctggcaaagctgtgttcagggacacgctgtcagaatccacgttatcaatgtggggcgcttattcggtattggccatggctcctaccatgatcccagaacccacacacttacatgcggattccagagactgtccaactgaaaactataacaagatcatctttgcccgcaagcctatgatgaggatgctccctacagttcgctactgaccaacaaggagaaacatgcaaatgttttagccaggggtccctgcagccattccccaagaacgtacaaaagttaagctccatttaccactcacttgacagtgtcctttaaatctgaacttgctcttgctcatgcggagcttggctaagagaaaccagatcagaatgcaagctgtaggtgggtgggtgagtgtgtcccctcccacactgctctctggtgggtttgggcagtccctggctctagtctctgctgcagattctcaggaccaaaatgtgggtgatttgtctgggtccaggcaggagacagaaatcacacaagctcttttattagagataatataaagaatgattaaccaggtgacagtaaagggcaggaagggaatacaaaggtatccatggaggtagcaccacaggaagcaggcatcacacttgaggcttgggaacaaggggaagatgctggactcattgaaaggtggttgcttggagaagggacatggggctgaatctcagacttctgaggtgggggagtggggatgccactcaatgcagctggtatctctgagctctgaggagagtcctgtggggatggtgccccctcctctgaataggggagatgttttgttggtgtctctgaggggacccccatgaggctgcttttgtgagtgttggaaaaaccaaaaactgcattgaaatgtttctgggaggagttgccactgcctgggtgaagaaaaagcactgctagggttagcaacctgtctggcaagggacaggaagctgatagaaagtgaacaggaagcaaacaggaagtgagcaaggggccacttcctacttcctcctttagcctagcagattccttctagctccccctgggggctgagcctatcagggcacaaagccagaatgtggtttgtagaatcccagccccagcatctccaagcataggatggattttgaagccaagagggaattagctctcggccgggttctgagtgatcccatccagctgctcctggacctggtattgagaggtttttcccttggagggcaaacaaagtggcagtggggaccagggtgtcccctgctgagaaatggagagctcttttcccctgtacttctctggggtttgccttgtggaaccaagtgcttgggggaggagctcctggcaggactccagctgttatttgtcagaggacagctaggattggttcacccttgctctgagttggccccaaagcgagctatgctgaactcttctccatctccaagcagacaacctttgtctttacatgcaagagggatccaattatgacaggctgacccagctggtttcatgtttggggtttatctactgagtaaggctgaccttacctgagtttctgtatgtgtatttgcaagacagttaatactaatccatcatccctcacagagatgtagaggatgagatgtagtaacttatagcagtgtcatttggaaaagttgaatttgccctacaaggcatgttctccattcaagggtcttgtgtaaacgtttgcagacacaggtgcagctttggagaactcacctctggctcttgtgcttttatgttgggacagctgcctaaattaggagctctagacctgttattggttcccaactgttggccagaatgaattcttcgaaaaatataggtggtttccagggaatttgaatgattgtattttgtgtccatggaacgtttatagacatggaggcaggcaataaattcctccaataatt

SEQ ID NO: 6607 - DNA, 7109 bp, Homo Sapiens
  NM_173630
attaattgtggctggacgcagtggcgcggcagtttaattctccggcggctgcagattgacgggacgagatggtcctggcagggctcatcaggaaactcggtcatcagctggccgagatcagggagcgcgctctcaagagtattctctgcaagattgagcacaacttaatctgctacgctgatctcattcaggagaggcaactttttcttcatttgctggaatggttcaatttcccgtccgttccgatgaaggaagaggttctgaacctgttaagcagattggttaagtatcccccagcagtccaacatttggttgacgttggtgcagtagagttcttatctaagcttcggtctaatgtggagccaaatctgcaggctgaaattgatggcattctggatggactttttcttcttccttcggaagttcctgcactatcttctgcctcataccaaaccaatcaaactgaattgtcaaaaaaccctgaaatcttaacaggatattttccccaagacaaaagtaatttccagcagatggaagtgccgccacgaccagtggtaaatcagactgtgaagtgcttgaagttttctacatttccttggctacccctgaccaccacagacagacatgtcctctcctctaatgaaagctctttaagaagtagtaaccacactttaatctggaacacctgtgaactattgaaggatgttatcatgcaagattttcctgctgagattttccttcaaaggccaaaaattgttcagagccttttatctctgttgaaactggcctttggagatggaaagcatcgcctggcattacagtcggtgtcctgcctgcagcagctgtgcatgtatttaagaaacagacttaactttcaccgagatccaggttttttctccaataaacacgacacagtttcccaaaattcttctttgtcttattgtcatgaagcaagaggtactcatcattcccagaatccttccccaggaagcagcagccctcggccttctgtggttgggcgcacaggccagcgacccagaggagatggccaggactgggatgcagcgtcctctagtggaagtagtagtcatgctcatgtaaactccaggatatccgttcattcacctttggatatgggacacatagatctgccagagctggaaactgaagacacattggaactacaattccagcagctcagtcttccccagttttgtgtctccattctggaatcagctgttcctctcttaagaacaggtagcagacaagtgataataagagttctggaattgcttacagaggatatgacacttattggtgaagcaatttcaacagatatctgggatgacagcagcctttttggtatagatatgaaggagaaactactcctggtgttgggagcccttggagaaaccatgtgctaccataaaagtagtatcagtttggagcagccagaggtgatgcttgtgcaccacagaatggcctttatcagcatttccctgtttgcagttcgactgctacaaacgcttctccctgttgaaaaggcaagcgagtttttatcagagcctatgtcaacagcattatttctcctttctttggacatgcctatttctttggaatatccaaatattcatgaagctgttgtggcctatttggaacagctgaattctgaaaactacagtatttataaacgaactgcagaggccgtttattcaattgaatgcacctgtaacttcctgtctgatattgggaaagagggagagaagaatctcttagaattagtggagctggcagaccaagccttgcgtagcttttcctatcatcagcatttcccgctaataaaggaaatcatcagcatttgttcaaagatctggaaatctgctcaggccagtccattactacaaggagaaagtcagaaggtgcttctccatatgttgtctcacccattgccacgagtgaaagctgaaacttaccactgctgtctggaaatcacgaaggaatgtttaggtgtccataatgtcactaaacccgtgtcttcactttgcaatggaattcattttctacttcatccaaaagttctgtatgaaatctctgtatttggcattcaagagcccgaaagtgaggtgaacactgctgccaaggccattctgttatacctgcttcagggacgattgatgatgacagcattgacctggaacaagtttattgaatctctctgtcctgtcatcccaatactacagggctatgccgacacagaagatcctctgggtaactgcattctccttctaagcaaagcaagttctgacacagaagagatgcttccgtgtactacccgattaaagtccatgctgcgacttttgctagtgaaaaagccatcggtccgttcgctagcattaaagcttttagcattccatcttaccagtgaagaaggggctgatacaaagcgtcctctaatagacgccagagttctctccagagttactgatttattcattgggaagaaacctattgaactcagactggatgacagaagagagctggttattaagttggagactgttgaaaaggtatatgaaatcttcacctcagatgatgttgatctcgttttgagaaagtcagctgctgaacagttagctgtgattatgcaagatattaaaatgcatgctgtggtgaaaaagttatgcttaattgacaaaataattgagtatttaaatgaatgtgtgagtcaagatggcaaggttgtagaatgtttggtacaaccatgcctcacactcttgaggaaggttttatgtggtgatccagtcatgcgtgtttcgctctcgcaacagtcttctcttttgaccgtgttattcagagtttccttaatatttcatgaagattgtagtgtcgtgactgaagttggagcactattttgtcttctattatttgatgaagtatcgagaatggatatgtggtctgttaatccttccaataaaccttctttgccatcggtcttcagtttgcctgtttccgtttttagaaggtaccatctacctgttcatgtaattggacaccatgctgtgagtccttactccatagttttgcccttatctgctgattgtttggccttgaagccggtgtcagatatgctgagaatagcttggaacctgtcatggtatcatgggagtgataatctgttgaagcaaatgaactctgaaactaaaacgcaagaaattttagatgcattgaagttatctacagaggacatcctcactctgaagataacacacatggctagtgggctgcaggactgcctccattccattgttcaggctgcaacccacagggaagttagggctgctgtcaccaggatgagtttttatcttctgaatgacagattgtctttaaagggttgccctggtccatgtggggttaccttgaagtccttggcttggcacaccgcactaaacaggtttttacaggtgcttcctgcttgcactgaagatgagaaactgctaatagatatcatacattttttaaataaattaataaaggaacaaagaaaaaattcttcactagaacttctaaactggattctcgaattacttcttagacatagtgcaaacccactgttagacctcttggttctgacagagtcacaggcacgagaagaaacagatgatatccggactgctgtcaggcaacaacttcagaaagaactgattgctctttttgataccttgctgctcaatttcatggaagttactgacaggaaatgctcggaacttctttacgtttttcaaacgcagctggctctgaaactgctccagtgtctgaaagtgacggatgcgcctcatttctatggcctgccgtcccttgagcggaccttacgagggatggctaacctcactgcgtttccgggatggagctcacactctcctctcacaaagcctctagatatctgtgtgaagtacttgtcaggtctccttgaggtcattacttctttttatgtggagcgtggaggaaatgctatgtccttcatgggaaaaggtgttacaaagagcacaattctttgcttgcttcacttatcccatgagatgatggcccaggctgggagcttggagtggatgtcactttggttcttgcctttgggtagtcatagtgaagaacatattcctactcaacaaggattggcttggttgattccattatgggttgatcgggacccagaggtgagattcacttcactgggattaggatcagcactgaccacccttgaaacgggctgtgtggccttagcaaacagttgtcagaacatttccggtgggctctggggaactgtggtgaacattcttctggaccagtcagaatgtagtatggtgcgccgggaggcggcatttattcttcagaatctccttgtaattccaatgcctacagaaattataaaggattatacttggcagggtccctgtgttcatgatgaggactctggcctatcgctcattggaaaacctgcccttcaggctcttttatatcactgccatttttatgaacatttgaatcagatggtaaagcattgttacctaggacggtgtatgtttgatttgaatttttctgcttttgatagaaattcagaaagcaatgatttaaatggtttagatgactcattcaagttttggagggctccatctaggacaagtcaggatcgagatccaagttctctctccacctcagaaacaacggtggcaccttcattggggagtactgaatttcagccacttgtgcagtcaacaacacttctacctgaagcctcccatgaccagtttgtggctcaaggtcaccaggaaagtacatcaccacggccacctcatgattcatctctttctgctcccctgcccaaactgtgtgtttttgttactccatctcttctttcagcaatgtgcagcctcttggacaacctcttgacgattgctcccagagacactgcaaaggcttttcgacaagctcatctcatagaacttctctgtagcattgcagatgctaccctcatacagacatgtgtccaggaactcagagccctgctgccttcatcacctccagctgaacacactcaggctcaggtttcctttctcctggaatacctatcctctttgtccaggcttctgcagtcatgtttattggtggagcctgaccttgtgattcaggatgagcttgtgaaacctcttatcaccaatatcattggaattctcaccatatgtaccaaagatgtattagataaagagttaatatcagctttttatcacacatggacacatttatttaatcttctggccatgctcctgaggaaagctggtgccatcacactcccgtttgttaccgtggccctggccaagcactggacagcggcgattgatatgttctgcacatgtgcaggcttgtctgccacgtgtcctgccctgtatactgccagcttgcaattcctttctgttctcttgaccgaagaagcaaaagggcatctccaggctaagagcaaaacacatttatgctgtagtccaacagtggcttcacttcttgatgactctcaggaaaatcagaaatctctagaacaacttagtgatgtaatccttcagtgctatgaagggaaatcctccaaagatatcctgaaaagagtagctgcaaatgcattgatgtcactgctggctgtcagtagaagagcacagaaacatgctttgaaagccaatcttatagacaattgcatggagcagatgaaacacataaatgcacaactgaacctagattctctgaggcctgggaaagcagcattgaaaaaaaaggaggatggtgttattaaagagttaagcattgccatgcagctcctaagaaactgtctttatcaaaatgaggaatgtaaagaagcagctcttgaagctcaccttgtccctgtcttgcactctctctggccttggattttgatggatgattcattgatgcaaatttctctgcagctcctttgtgtctatactgcaaattttccaaatggttgcagttctctttgttggtcaagttgtggacaacaccctgttcaagctacacatagaggagccgtgagcaactctctgatgctgtgtatcctaaagttggcttcccagatgccactggagaacaccacggttcagcagatggtttttatgcttctttcaaacctggccttgtcgcatgactgtaaaggagtaattcagaagagtaacttcttacagaacttcctctctctagcattgccaaaaggaggaaataaacatctaagtaatctgactattctttggttgaagttactcctgaatatatcatctggagaagatgggcaacaaatgattctgaggcttgatggctgtctagacttactaacagagatgagcaaatacaagcacaagagcagccctttattgcctcttcttatctttcataatgtttgcttcagtcctgcaaataaacccaagatcctggctaatgaaaaagtcattactgtgcttgctgcctgtctggaaagtgagaatcaaaatgctcagaggattggagcagctgccctttgggctctgatttacaattatcagaaggcaaaaacagctttgaaaagcccatcagtaaaaagaagagtggatgaagcatactccttagcaaagaaaactttcccaaactcagaagcaaaccctctaaatgcctattatttgaaatgtcttgaaaacctcgtgcagctccttaattcttcctgagtgccatgggatgctacaccttgaagctgacagtcatcaacaggggagctaaagttgaagccagctgtgtgtagcagctgttacctgaagacgtgctacctctctacaaagtgttgatccccttctttcccatgagagagagaactggtgatactccaacaccgtccagttgtggcagctctccagaagtaatagcagctgacaactttctgtgccttttcctttctgttgaaaaggcatagaaagttctgggaacataaacatttttacccttttctatgccatttattttgtaaaaatcctatttaacagttatttaataaaacaatatttttagaaactaaaaaaaaaaaaaaaaaa

SEQ ID NO: 6608 - DNA, 1838 bp, Homo Sapiens
  NM_173639
tggaccattagtttccactgcagtgtttgcagatggagtcgaatgtaaccccccgggaatggagccgggagggtcagagaacgcggctgcgctctggatctccgaaggggggcgggggcctggaagaggtccgggcccagaatggacctccaggtccctgctgccgcaatctggccctgccctccagcctaccccttactcccagaggaagggacccagggagacccacccagatgccctgaaaggaggtggaggatgggggtggggcaatacgcagagtttgtctggtgaatgcaggaaaggggtgggggctggagaggaaaaggatggagcagccgtcagcttgtcaactccgcatctgctggctgcctcggccgggctccagcctgcgccctcgcccctcggaacagcgggacccaccaccctctctcaggcaccttcaggatctggtactgttctggagtggcccgttgcagacactgaaccaccagccagctgcatttgttgtcctggatgtcagtgccaattttgccggtcacactggggtccccaaagaggtcaaggcacgctgcaatcctgtaccctgaaaccagctagatgagcatgtcctatagaggccaaggctaccatgggcaccctctgggcatcgggccctgtctgcaatacacctgcaggaagagctcgatcaggttcagatctgtccccggcgggtaagggatgaatccatgatgtcatctgccaccaggaagaaagcttgcagctagaaagagtggaataagacctgcagggctcctcattactgttccttctatcagcaacagagctgctactttatatctgtatatagttttgcttttttttggtaggggacagagtctcactattatccagtgcagtggtgcaatcacagctcactgtagcctctaactcccaggctcaagtgatcctcccacttcagcttcctgagttcctgagaccgtgggcacataccccatgcctggctattttttttttttaatttattttttgtagagacagggtcccactatgttgctcaggctggttttgaacccctgggttcaaatgatcctcctgcctcagcctcccaaattactgggattacaggcatgaggcatcacagccggccagagctgctgcctttgacagtccctatgagctgggaaagtcaggatggggagacagaagacttctgtgctatggagacttggaaagtgacataacatgtttggctcagactccccgcctataaaatggaactaaaacactcttgttttaggttaagaaactagaacagatctttgacatctctaatgagccctagattattcctggtgtcagggagattaggaaacaccttcatataccgtactctattcttgccaaaaacctcaatgaatgcttaaagtaagatctattcatgaaactgacttcacattacttcctaaataaaagaaggctattcccacattgcccccagcactgtgtttgaacaccctggtgactaggaacacagccttacctaaagcagctccttagcagtgcaggtctaataaggtggaactgaaatctgactttgacctatgagtctcagacatctttaaacatctttaaacattaactaagggcttactcttctgagtgcccatctgaaggtacctgaacgtgtcgggtttcccactagaccatgatctccttggaagcagggacagtaacttccccctcttagcatttgcagagcctagcacagcattaggcctggagtgagagtttcctaaacacttgtctgacaaagaaattaataaaacactctaacattc

SEQ ID NO: 6609 - DNA, 2968 bp, Homo Sapiens
  NM_173647
gtgcgcagcggccccgaccccgcctcagtcttccagggcggcggtgggtgtccgcttctctctgctcttcgactgcaccgcactcgcgcgtgaccctgactccccctagtcagctcagcggtgctgccatggcgtggcggcggcgcgaagccagcgtcggggctcgcggcgtgttggctctggcgttgctcgccctggccctgtgcgtgcccggggcccggggccgggctctcgagtggttctcggccgtggtaaacatcgagtacgtggacccgcagaccaacctgacggtgtggagcgtctcggagagtggccgcttcggcgacagctcgcccaaggagggcgcgcatggcctggtgggcgtcccgtgggcgcccggcggagacctcgagggctgcgcgcccgacacgcgcttcttcgtgcccgagcccggcggccgaggggccgcgccctgggtcgccctggtggctcgtgggggctgcaccttcaaggacaaggtgctggtggcggcgcggaggaacgcctcggccgtcgtcctctacaatgaggagcgctacgggaacatcaccttgcccatgtctcacgcgggaacaggaaatatagtggtcattatgattagctatccaaaaggaagagaaattttggagctggtgcaaaaaggaattccagtaacgatgaccataggggttggcacccggcatgtacaggagttcatcagcggtcagtctgtggtgtttgtggccattgccttcatcaccatgatgattatctcgttagcctggctaatattttactatatacagcgtttcctatatactggctctcagattggaagtcagagccatagaaaagaaactaagaaagttattggccagcttctacttcatactgtaaagcatggagaaaagggaattgatgttgatgctgaaaattgtgcagtgtgtattgaaaatttcaaagtaaaggatattattagaattctgccatgcaagcatatttttcatagaatatgcattgacccatggcttttggatcaccgaacatgtccaatgtgtaaacttgatgtcatcaaagccctaggatattggggagagcctggggatgtacaggagatgcctgctccagaatctcctcctggaagggatccagctgcaaatttgagtctagctttaccagatgatgacggaagtgatgacagcagtccaccatcagcctcccctgctgaatctgagccacagtgtgatcccagctttaaaggagatgcaggagaaaatacggcattgctagaagccggcaggagtgactctcggcatggaggacccatctcctagcacacgtgcccactgaagtggcaccaacagaagtttggcttgaactaaaggacattttattttttttactttagcacataatttgtatatttgaaaataatgtatattattttacctattagattctgatttgatatacaaaggactaagatattttcttcttgaagagacttttcgattagtcctcatatatttatctactaaaatagagtgtttaccatgaacagtgtgttgcttcagactattacaaagacaactggggcaggtactctaatataaaggacaggtggtgtttctaaataattggctgctatggttctgtaaaaaccagttaattctatttttcaaggtttttggcaaagcacatcaatgttagactagttgaagtggaattgtataattcaattcgataattgatctcatgggctttccctggaggaaaggttttttttgttgttttttttttaagaacttgaaacttgtaaactgagatgtctgtagcttttttgcccatctgtagtgtatgtgaagatttcaaaacctgagagcactttttctttgtttagaattatgagaaaggcactagatgactttaggatttgcatttttccctttattgcctcatttcttgtgacgccttgttggggagggaaatctgtttattttttcctacaaataaaaagctaagattctatatcgcacatgagcattaagttcttcattgccttgttaaggaaaatgagtaggcagactcagaatctgttatattgatttcagttacaatttaatctttacaattaaaagggcgaaagatgtagaattttagtttttgttgttgactcgaaataaccagttttcttgattagagtttaagcagatttaataccatgaccttgcttaaccgtttcttcttttttacttgcttgctgttcttttgggtcaaaggagcaggctaatgcaaagcttttggagactgctaagtgttaaaaagtgattaaacacacactctgctattttttcacttcttggaggtagaagtcgagtatgaggcagttattttttagagtgtggaattatagtctttccttgctcctagttattctgtatatctttactttgtaggtaaaaataaatgtttatttaaaacaatttttaaaattataaatttatttttatagccatatgtaggatataaagatttatatagattattttctcaagctacttaatgctttaattctagctactcatcatgaaatagtaaacagttttactgaaataaactctacagacagatgcagtatgaggagctattgaagtagaaaatgtatttcgctttgcacactgagttggttttagcagacaacctcaagtaggtttccataacagccattacctttgaaatctaccttctgtagtttattataaataggaaaatacatcctgattctgtagcaagtagattgtttgctctttgtctttaagaaatactaggagggccgggcgcggtggctcacgcctgtaatcccagcactttgggaggccgaggcgggcggatcacgaggtcaggagatcgagaccatcccggctaaaacggtgaaaccccgtctctactaaaaatacaaaaaattagccgg

SEQ ID NO: 6610 - DNA, 1776 bp, Homo Sapiens
  NM_173652
caactatggttgctaacacaagaatcggcactggtgacttttgagccatcaatcatcctttcctaacacatgaatcttttggaaaatggtctcaaatagtcaagaccccctgctgggaggagcttctatcctgctctgtggaagaaatgggcatgccagatgcctggaagatcagaggctcacattccagttcaaagttagagaaacctgagaggggtgtactggtatgaccacccgagatcccatcgctgagaaagataatggccctggagacaaagactgatgaagaaagacagtatccagctgtgatgcagatgaaacatgcggcatggttgcactcactatgcagccaaggctggaagccactctggatccagccactctggcacagcgttcttgctctaggaagaacaactgaacatggccacacaggcctcacagctggcatatggaggctgttaataagctgagcttgaggcttcaaaggactcttgtagcctgtgctggatctagcagtgaccagtatgccagtggccatggatgcccaggcccatgttcagtagtgaagcaggtgctagcagcagaagcaatagaaatggaaactgggagatctgctgtggatgaatctcattatcttctttctctgaccctctttggactaaataaactcccagtattcttgaccaacagaggtagggttggaacagaacctcaaaagtcatcattagacttcctactaatagggcattggaagttcaagcgactaactaggaaacaggttagtatttgtacccctacactgtgcaacagattacataccatttgctctatttggcatcctttccttaggctagattcccagaagaaagattactgattcgaagggcatgaacatttttatgactcttggcctaaattactaggccaaggttttttcaaagggatgcactaattttcactatttccccacaccctttcaggtgataaataattgacttgatttgtttacactgacgccaagaattcttgggaagaaggatcaaagtgaaaagtggtagcccatggtggggaggccacactcagtgcagttgtgaagtcagcagcatttttaagcccattcattgccagtagccctgagatgagcattcccaagctgcttcccaggtccctcctccactctctcagggacatccattctgtaccagccccctcagatactcatgcccttgccctcccttctccatgctcattaaaaccagcttaagagcagatatgacatcagtcacttaccttttcgtgtggctctaaatcaaagtgtcacctctcccaagcacatgcttgcatcttagctctgattgaggaatgaaaagctttgttctctgttaaaagaactttgagcttagatgccccagactgagaaatccaccaaaagctggacctttgacttgagcggcaaaggacccccatagtcaggctgtgatttgaggagcatcaagaggccagagtttccaagttgggacccagaaggtggggttggcagggggagggtaggagcagctggagactctgctctaccaggggaatacggaggtggggaccaatcccagggtaaggaatgaaagtaggagccccagaagctgaaaacatacttcaccgatgtcagcattttacccagagccattccaaggtgaccataactcacttaaaagcctgaaagctgttttatgccaactaataaagtgcagtttaataaaaaaaaaaaaaaaaaaaaaaaaa

SEQ ID NO: 6611 - DNA, 1244 bp, Homo Sapiens
  NM_173659
gcacatgcgcgctgtcctggctcgggagatggacggccgccgtgttttgggccggttctggagtggctggcggcggggcctgggtgtccgcccagtgcccgaggacgcaggctttggcaccgaagcccggcatcagaggcaaccccgcggctcctgccaacggtcggggcccctcggggaccagcccttcgcggggctgctgccaaaaaacctcagtcgggaggagctggttgatgcgctgcgggcagccgtggtggaccggaaaggacctctagtgacgttgaacaagccacagggtctaccagtgacaggaaaaccaggagagctgacgttgttctcagtgctgccagagctgagccagtccctagggctcagggagcaggagcttcaggttgtccgagcatctgggaaagaaagctctgggcttgtactcctctccagctgtccccagacagctagtcgcctccagaagtacttcacccatgcacggagagcccaaaggcccacagccacctactgtgctgtcactgatgggatcccagctgcttctgaggggaagatccaggctgccctgaaactggaacacattgatggggtcaatctcacagttccagtgaaggccccatcccgaaaggacatcctggaaggtgtcaagaagactctcagtcactttcgtgtggtagccacaggctctggctgtgccctggtccagctgcagccactgacagtgttctccagtcaactacaggtgcacatggtactacagctctgccctgtgcttggggaccacatgtactctgcccgtgtgggcactgtcctgggccagcgatttctgctgccagctgagaacaacaagccccaaagacaggtcctggatgaagccctcctcagacgcctccacctgaccccctcccaggctgcccagctgcccttgcacctccacctacatcggctccttctcccaggcaccagggccagggacacccctgttgagctcctggcaccactgcccccttatttctccaggaccctacagtgcctggggctccgcttacaatagtcctccctctgttcctgaccccctcacacacactggaaagtgagggtgggggctctgcagtcagacaaacctaagatcacatcctggacaggccacttgcttgctgtgtggcattgggcaagtaactttacctctctggacttgtgataataaaagttcctacctcaaaaaaaaaaaaaaaaaa

SEQ ID NO: 6612 - DNA, 2367 bp, Homo Sapiens
  NM_173676
agacacaaaatcagccagggggagcccacattggagggcagtccacaatggaaggcttcttggaggaggagatgattgagctgcttctactaagatgagtatctcagagtcctcaacgtgggtgtggccgaggtgaagaaatccttcctggggcccttgtccccgtcctgtaagatggtgcagatgatgaggcagtttctgtaccgggtcctgcccgaggactcctacaaggtcaccacggggaagctccatgtgagcctcacccgcttaacggacggggagaatgtggtggtttcagagttcacgtccaaggaggagctcattgaggccctatactgcagctgcttcgtcccggtgtactgtggcctcatccccccgacttaccgcggtgtgaggtacatcgatgggggcttcacgggcatgcagccctgtgccttctggaccgacgccatcaccatctccaccttcagtgggcagcaggacatctgtccccgggactgcccggccatcttccacgacttccgcatgttcaactgctccttccagttctccctggagaacatcgccaggatgacccacgcattgttccccccggacctggtgatcctgcacgattactactaccgagggtacgaggatgcagttttgtacttgaggcggctgaatgctgtttatcttaattcttcctccaagagagtgattttcccccgggtggaagtgtactgccagatagaactcgcccttggcaatgagtgccctgaacgcagtcaaccaagccttcgagcacggcaggccagtctggaaggagccacacaacctcacaaggagtgggttcccaaaggggatggaaggggcagccatggtccgcctgtgtcccaacctgtgcagacacttgaattcacatgcgagtcacctgtttcagcaccagtctctccacttgagcagccacctgcacagccactggcctcttcaactccactttctctaagtggcatgccacctgtatcattcccagctgtgcacaagccacccagctccacacctggttcatcactgcccaccccaccacctggactgtcacctctgtcacctcagcagcaggtacaaccgtctggatcaccagccagatccctacactctcaggcacccacttcacccaggccatccctggggccttcaactgtgggggcacctcaaacactgccccgaagttctctttcagccttccctgctcagccacctgtggaggaactaggccaagaacagccccaagctgtagctcttcttgtctcttcaaaaccaaaaagcgccgtgcctctggttcatgtgaaggaaaccgtcagcaagccttatgtaacggagagccctgctgaagactcaaactgggtgaataaggtcttcaagaagaacaagcaaaagacaagtggcaccagaaaaggcttcccaagacattcgggatccaaaaaaccaagcagcaaagtgcagtgagcatgtctaatgttccttaaatcccacggagaggagcagctttgggaactgtgttcagagagattccgaggaatagaggagagtgtaagggagtagggggtgcagtgggagattgggctttggaacagacacatccgacataaaattcctgctctgccacagctccactcagggatcatggttgggacacttgctctccctgagcctccatttcctgtaaaatggggatgataccacttcataaagttgtgagagttaaatgtgatcgatgatgtaaattgcttcatagaatgcagaatgtgtaatagctcacaataagtaggtattatgtttacatattatgtttgtatttatgctacttaaatacaaaactggacaggccaggcatggtggctcatgcctgtaatcccagcactttgggaggctgaggtaggtggaaaacctgaggtcaggagttcaagaacagcctgaccaacatggtgaaactccatctctactaaaaatacaaaaattaaccaggcttgatggtgtgcacctgtaatctcagctactcgggaggctgaggcaagagaatcgcttgaacccaggaggcagaggttgcagtgcaccaagactgcgccattgcactccagcccgggcaacaagagcgaaaccccatctcgaaaaaaaacaaaacaaaactagacaagtgagtgcctacgtgacactcaaatgttgccagcatacagttaagggccctagtcaatgtaggcctgcttcttatagctttttgactatattatgctgtctttgacttagtcagtcaacacttattgagcacctactaagtgccaaacactctcctggactctggcaaaataaaaaatgaattaaaactct

SEQ ID NO: 6613 - DNA, 4577 bp, Homo Sapiens
  NM_173681
agctcagtgtcacagacctttgtggaagcaacaacagctcccatccttccaacctttctggagaagccgtggcctgatggtgagccgaatgggctggggggggagaagaaggcggctggggcggtggggagatctggggcccggatcggtgcccctcctccccatgccactgccacctcctcctcctccttcatgccggggacctgggggagggaggatctccatcttctctctgtcccctgcccctcatacaagaagctccccctcctcattttcccctcccaccgcagggcccccttgctcagtgctacaggggacaggggcttctcagtcttgccacagtgctctccctatcccagccacccccccaacacaggctcaacctgcaatgacacctgcctctgcatctccctcctggggatcccactccaccccacccctggccccggcaacccccactccctcacagcagtgcccccaggactctcctgggctgcgggtaggccctttgatccctgaacaggattatgagcggctggaggactgtgaccctgaggggtcccaagactcacccatccacggggaggagcagcaacccctgcttcatgtccctgaagggctccgaggctcctggcatcacatccagaacctggacagtttcttcaccaagatctacagctaccaccagcggaatggctttgcctgcatcttgctggaggatgtcttccagctgggacaatttattttcattgtcaccttcacaaccttcctccttcgatgcgtggattacaatgttctctttgccaaccaaccaagtaaccataccagacctgggccgttccacagcaaagtgaccctgtcagatgccatcctaccctcagcccagtgtgctgagaggatccgctccagcccgctgctggtcctcctcctggtcctggctgccggcttctggctggtccaactgcttcgctcagtctgcaacctcttcagctactgggacatccaggtgttttacagggaggccctgcacatccccccggaggagctgagctcggttccctgggcagaggtgcagtcccgcctcttggcactgcagcggagcgggggcctgtgcgtgcagccgcggcccctgacggagctggacatccaccaccgcatcctgcgctacaccaactaccaggtggcgctggccaacaaaggcctgctgccggcccgctgcccgctgccctggggaggcagtgcggctttcctcagccgcggcctggcgctcaatgtcgacctgctgctcttccgcggtcccttctcgctcttccgcgggggctgggagctgccgcacgcctacaagcgcagcgaccagcggggcgccctagcagcgcgctgggggcgcacagtgctgctgctggccgccctgaacctggcgctgagcccgctggtgctggcctggcaggttctgcacgtcttctatagccacgtggagctgctgcggcgcgagcctggcgcgctgggggcgcgcggctggtcccgcctggcgcgcttgcagctgcgccacttcaacgagctgccgcacgagctgcgcgcgcgcctggcccgcgcctaccgccccgccgccgccttcctgcgcaccgctgcgccccccgcgcccctgcgcacgctgctggcccgccagctcgttttcttcgcgggtgcactcttcgccgcgctgcttgtgctcaccgtctacgacgaggacgtgctagccgtggagcacgtgctcaccgccatgaccgcgctcggggtcaccgccaccgtcgccaggtctttcattccggaagagcagtgccagggtcgtgcgccgcagctcctgctgcagacagccctggcccacatgcactacctcccggaggagcccggccccggcggcagggaccgcgcctaccggcagatggcgcagctgctgcagtaccgagcggtctccctcctggaggagctcctgtccccgctcctcaccccgctgtttctgcttttctggttccgccctcgtgccctggagattatcgacttttttcatcacttcactgtggatgtggctggggttggggacatctgttcctttgcccttatggatgtgaagcgccacggacaccctcagtggctctcggcgggacagactgaggcctcgctgtctcagcgtgcggaggacggcaagactgagctttctttgatgcggttctccctggcgcatccactctggcgccccccagggcacagctctaagtttcttgggcacctctggggccgagtacaacaagatgcagctgcctggggtgccacctcggctcgcggcccctccaccccgggggtgctcagcaactgcacctcgcccctgcctgaggccttcctggccaacctcttcgtgcaccctctcctgcctccgagagatctgagcccgacagccccctgtccagctgcggccacagccagcctccttgcctccatttcccgaattgcccaggaccccagctctgtgtccccaggaggcactgggggccagaagctggcccagctcccagaacttgcttctgccgagatgagtctccatgtcatctacctgcaccagcttcaccagcagcagcagcagcaggagccgtggggtgaggctgcagcctccatcctgtccaggccctgctccagcccctcacagccaccctcgcctgatgaggagaagccatcctggtcaagtgacggctccagtcctgcctctagccccagacaacagtggggaacccagaaggcccggaatctgttccccggagggtttcaggtgaccacagacacccagaaggagcctgaccgggcctcttgcactgactgagacgactcctcagggccccactcctggcagctgagtgctgcacctgccttctcgatcacgagcctgagaactgcacgggggagcagcccagactggctggaaaccatgttttcagagtgcagggtcaagtggcgtcctctggacagatgtgagaaggcaccacctcaagaggggaggagcggggctgatcctggtcgggcggacctgagtcgggcagccgctctcccggaactggaagggaaagccaggcggctctcaggggctgttggtgtctgagccgggagggtcgaacgcccagggcactgcgccccgcaactgacgctcctgcaaggaaaagctctggcacgccgatgacgtcgccggcctcgtccagctccatgtcgccctccgtcgccaggatgcgctgcacggtctgcaggacgttggttgccatggtaacatcgccgcagacaaacatgtggccccgctcgaggcacagcacgcggtgcacctccgcagccagctccgtcctcaggatgtcctgcacgttaccattgcgccctcagggtctcacaccttggggttgtcaggttcccgggagaaggcggtgaggactcggccaaacaccccgcgctgctgggcgttctgcacctcgtcgcggtagagatggtcaagttgggagcatcggcagccgaacaccaaagtcatgggagtgggctgcagccctgcaagcaaccccgcgcttgggaaggctcttctccggggcacagtgctagtggggcctccccacaggccaccgtcgcccagcctggcagcccagcgttttgggctgaaaccaccattactttggctgtttcatctctaagagagtgtagaatgctttcacagagaccctgcacagccctgatttacagagggaagggaagcgcgggtgaggtggtggcccctggtggagctgcgctagaatgcgcggcttcggactcagaattccatgccctttgcattgtgtgacatcgcagtccccttccccgctcccacttcatattctcccatacttataactctcctcccagtcacagccctcttcttttgattgacagaccaccctgggcaccccatgctcaatatgaacaccttgtagcatccttaggtcttggacagacctcggtcagctctggcacagtcaagaatccaccttgggcagttcttctttgagtcttagccctaatccctttgaaaattctattttcctttgtcctcaatccagtcaacacctactatgtaccaggcaccaggaagccagaagctcagggcccagcccttgcctttggtacctgccctccccttggtctcatgagcgtcttttcagctttgtggactttgtttcctgccctctctttcctatttcctgccttccagccccacccctctgtccctagattgtgtgactcccttcaggcagtcctttagtccccagcctcacctttgctctcaatgtcatgcagccgctcctgccagaatccccggaagggggcaatgccagtgcctggacccaccaggatgcagggcaagctgggatcgggtggcagccggaaggagggagccctggcaggagagacactccatcaggtcccctttgcctttcctgctccaccattctcaccatgcagggtgggtggagcaaggaggacccaagttcttcccatctcaaaaaaaaattaaaaaaaaaacaaaaaacaaaaaacaa

SEQ ID NO: 6614 - DNA, 3761 bp, Homo Sapiens
  NM_173683
acctccggagctgggaagagagtcaagatggcggcgaaatccgatggcggtggcgtgggggtgggcttcgctcagctgcacaacctggacgaggcggtgggcagcggcggcgaggaggacggggagcccgggggaggcggctgcggcggcggcggcgacggcagcgagcccggcgagagcagctcgatgcacatctgccactgctgcaacacctcctcgtgctactggggctgccgctccgcctgcctgcgctccctcctgggcaggaagccgcgccgcagcgccgccgccgacgggggggaccagccgctgcagcctcccgcggcccccggcgccggccgccaacccccgacgccctcggccgcgcggccggagccgccgccgccgcaggtggagcggccgtggctcgactgcctgtggatcgtgctggcgctgctggtgttcttcggggacgtgggcaccgacctgtggctggccctcgactactaccgcaagggggactacgtctacttcgggctgaccctcttcttcgtgctggtgccgtcgctgctggtgcagagcctgagcttccgctggttcgtgcaggactacacgggcggcgggctgggcgccgtggaggggctcaccagccggggcccccccatgatgggggccggctacgtccacggcgcggcccgcggtggcccaggcgtgagggtctcccccacgccgggggcgcagcgcctgtgtcgcctctccgtgtggatctggcagtcggtcatccacctgctgcagatggggcaggtgtggaggtatatccgcaccatgtacctggggattcagagccagcggcggaaggaacaccagcgacgcttctactgggctatgatgtatgaatatgcagacgtcaacatgctgcgcctcctggagaccttcctggagagcgcgccccaactggtgctacagctctacatcatgctccagaagaacagcgccgagaccctgccctgtgtctcctctgtgacttccctgatgtccctggcttgggtgctagcctcctatcacaagctgctgcgggactccagggacgacaagaagagcatgagctacagaggggccatcatccaggtcttctggcgcctcttcaccatctcatcccgagtgatctcttttgccctctttgcttccatcttccagctctattttgggatcttcgtggtggttcactggtgcgccatggccttctggatcatccatggcggaacagacttctgcatgtccaagtgggaggagatcctcttcaacatggtggtagggatcgtgtacattttctgctggtttaacgtcaaggaagggcggactcgatatcgaatgtttgcatattatacgatagtcttgaccgagaatgctgccttgacgttcctttggtatttttacagagacccggagaccactgactcctatgcggtgccagcactgtgttgtgtctttattagctttgtggctgggatcgcaatgatgctcttatactatggcgtgctgcatcccacaggaccacgagctaagatccttgccagctcctgttgtgccgagctgctctggggcatccctttgccccccgatgttgagcccatggcgcctgagatccctgggtaccgggggacccaggttacgcccaccagagccgtaacggaacaacaggaggatctcacggctgacacttgcttgcctgttttccaagtgagacccatggggccccctaccccgttggggcgtccttacctcccagaagggcccctcattaagattgacatgccaagaaagcgatacccagcttgggatgctcattttgtagacaggaggctgagaaggactattaacattctacaatatgtcacccccaccgcagtaggcattcgatatcgagacggaccactcctctatgagttgctacagtatgagtcttcactctaagagcatcttgaccaagttgagaaggggaccttaagtttggtttgcggcaaacagcacttgcaagaaatataaccctcccttcccccaatacacagaaccaccgccaccaccaccaacaccgccacaccaacaccaccactacaaaaaaaaaagaattaataagtcacaaccccttcaaataagctttctttccagtcgctgtatgtatacaaagatattctctatgttttgtaagtaaaaacaaaaagaaaacctttcttttgttttttacacataagaaacagtattgaaaaatcccacgctatggttcatagggtggagaaggaggagttatctccactccaaaagaaaaaaaaaaagttttttaccttacaccaagtgtagatcatttatgggattggtgctgattgaaagaacaaaacaaaacaaaacaaacacaaacaaacaaaaaaccttcaactgccttatgcccttaggtgctgagtttcattaagtactgtcacgttttctcatgcaaaactctctggtgatttttgcaccagaagagggaaaattaaacaattaaatgaaacaaatctaaaagtgaaacaaaaaccaaccaacaaatacaacacaaagcaattattcttcctatctgattatttgtattgaagaaaacaaatttaccaaaagcaaaagcataaacccctccctcttttcagtttctccccctcctctcctgaccttctccccactttgcagagccttctaggagctcaagggctgtttgaaactcaaatggctggagaagctacttgaaggctgattatgtgccattttagcatttgcctagcaagaatcacattcgtttcccagtgaaaagcaaaccagaacaaaacaaaaagccaccgcaataattcggtaaggacaggatattctaaagcaaattaaaggagatttctgtacacatagtcagtaataataaaactcagcatagtagcaaaaagaacgacatcagtttaaaggcacaatacttaatcagtgactggcaacaacgattagttccatcattttaaggctgtgaatggtagacatttatcacatgtgatattgtgtaaagcctcttctgtttccatttggtgggaagccttaaattgatctggaaagaattcttcatttttcatttgtgcttttttaaaaaaaaaaataacacaaagaggaaaactagaatatatatatatatatacatatatataaaaagtcaaaattgtaataactgacccatttcaaagactgtttggtgcttctgtctttcaccattgtggttggctgaaaatcattcagctcacctggtgcatctgggttgaatgggaaattttgtgtgtgtagtatgtgtgtgtttgtgtgtgtatgtgtgtgtgtgcccatagcacacgtatatatgtgtgtgtccctgctgcaaagtcttgccagagatatacaaaactgatgtaagacgaacttggatcacggcttggttcagcagagcatgggggcgggggctctggagtggtggggaagtgatgctgcctgcccacgagccctggtttgggtggcaagactcacaccagcagcggactgcaggccttagaggccatgccatttgggtgaggatttgattccactgtttattttctcattgtatcaagttgaatttctgcaggtgttgcaagtatgttcaacgatttaaatttttttttatttttcaaagtattgttcctttaaagaatatttctgttctagggcatcgtttcaatcgcatcgtatctctacttgggcacaaaaaaaaa

SEQ ID NO: 6615 - DNA, 1225 bp, Homo Sapiens
  NM_173685
gatgacgcaagagcccgctctcacttttcagcggcaggcgaagggggctgaggaaaggaggtgggtctaggcaggggaaattggggtgccaccagacggagacagcttggactaccagaatcaagcactcttttggaagagggtaatctctctccaaaaactgaggacacttaccttccccatatattgagtccagctgtgtttggtggcccaggtactaatttcaagatgccaggacgttccagttcaaattcaggttcaactggtttcatctccttcagtggtgtagagtctgctctctcctccttgaaaaacttccaagcctgtatcaactctggtatggacacagcttctagtgttgctttggatcttgtggaaagtcagactgaagtgagtagtgaatatagtatggacaaggcaatggttgaatttgctacattggatcggcaactaaaccattatgtaaaggctgttcaatctacaataaatcatgtgaaagaagaacgtccagaaaaaataccagatttaaaattattggtagagaagaaatttttggctttacagagcaagaattctgatgcagactttcaaaataatgaaaaatttgtacagtttaaacaacagctgaaagaactaaagaagcaatgtggtcttcaagctgacagagaagctgacggaacagaaggagtggatgaagatataattgtgacccaaagtcagaccaacttcacctgccccattacaaaggaggaaatgaagaagccagtgaaaaataaagtgtgtggccacacctatgaagaggacgccattgttcgcatgattgagtccaggcaaaagcggaagaaaaaggcctattgccctcaaattggctgtagccacacggatataagaaagtcagatcttatccaggatgaagcacttagaagggcaattgagaaccataacaagaaaagacatcgtcattccgagtaggaaaagccacctgcctgcagggacaccagcagcctacctcctaccccagctgtctgttgagagcagtgctgaccccagcagttagggactggctgcatagcatacttgttgggggtaaaacttgttgcttttatgtgtgcttgaaaacatttttcaaagttacacaacagaaatgcaatcatattgtttatttttaagtgttctataatgttaaataaaactttgatcatctgcagtgtcaaaaaaaaaaaaa

SEQ ID NO: 6616 - DNA, 3853 bp, Homo Sapiens
  NM_173791
ggagcgtctgaggaggcgcgggccgctgcgggctcgggcgccgcagcgcgccggcccgagcccctggacgaggcccacggagccgctcgccccgacccagccgcccgatgtcctcaaaatggaggcagcgggggcggcggcgtgaagaaagcggcgctgtgggcgcgggagtaggggcccgggcggaggcggtggcgggatggggctgctgctcatgatcctggcgtcggccgtgctgggttccttcctcacgctcctcgcccagttcttcctgctgtaccgcagacagcccgagccgccggcggacgaggccgcccgcgcgggcgagggcttccgctacatcaagccagtgccgggcctgctcctaagggagtacctttatggcggcggccgggatgaggagccctccggagcggcccctgagggcggcgcgacccccaccgcggcccccgagacccccgccccgccgacgcgggagacttgctacttcctcaacgccaccatcctattcctgttccgggagttgcgggacaccgcgctgacccgccgctgggtcaccaagaagatcaaggtggagttcgaggagctgctgcagaccaagacggccgggcgcctgctggaggggctgagcctgcgggacgtgttcctgggcgagacggtgcccttcatcaagaccatccggctcgtgcggccagtcgtgccctcggccaccggggagcccgatggccctgaaggggaggcgctgcccgccgcctgccccgaggagctggccttcgaggcggaggtggagtacaacgggggcttccacctggccatcgacgtggacctggtcttcggcaagtccgcctacttgtttgtcaagctgtcccgcgtggtgggaaggctgcgcttggtctttacgcgcgtgcccttcacccactggttcttctccttcgtggaagacccgctgatcgacttcgaggtgcgctcccagtttgaagggcggcccatgccccagctcacctccatcatcgtcaaccagctcaagaagatcatcaagcgcaagcacaccctaccgaattacaagatcaggtttaagccgttttttccataccagaccttgcaaggatttgaagaagatgaagagcatatccatatacaacaatgggcacttactgaaggccgtcttaaagttacgttgttagaatgtagcaggttactcatttttggatcctatgacagagaggcaaatgttcattgtacacttgagttaagcagtagtgtttgggaagaaaaacagaggagttctattaagacggttgaattaataaaaggaaatttacaaagtgttggacttacacttcgtcttgtccagtcaactgatgggtatgctgggcacgtcatcattgaaactgtggctccaaactcgcctgctgcaattgcagatcttcagcggggagatcgacttatcgccattggaggtgtgaaaatcacatcaacactgcaagtgttgaagcttatcaagcaggctggtgaccgagtcctggtgtactatgaaaggcctgttggccagagtaatcaaggtgcagtgctgcaagataactttggccagttggaagaaaactttttgtcaagctcatgccaatcgggttatgaagaggaagctgccgggttgacagtagatactgaaagtagagagctggattctgaatttgaagacttggcaagtgatgtcagagcacaaaatgagttcaaagatgaggcacaatcattaagtcatagtcccaaacgtgttccaacaacactttctattaaaccccttggagctatatcaccagttttaaaccgtaaattagctgtaggaagtcacccactaccaccgaaaattcagtccaaagatggaaataaacctccacccctaaaaacttctgagataacagacccagcacaagtgtcaaaaccaacccaaggatctgctttcaaaccacctgtgccaccacgaccacaagcgaaagttcctttgccttccgccgatgctccaaatcaggcagaaccagatgttctcgttgaaaagccagagaaggtggtgccacctcctcttgtagataaatctgctgaaaagcaagcaaaaaatgtggatgccatagacgatgcagctgcacctaagcaatttttagcaaagcaagaagtggccaaagatgtcacttcagaaacttcctgccctactaaggacagttcggacgaccgtcaaacatgggaatcatcagaaattctttatcgtaataagctaggaaaatggacaagaaccagagcatcctgtttgtttgacatagaagcctgtcacaggtacttaaacattgcattgtggtgcagggatcctttcaagttgggaggtctcatctgtttggggcatgttagtttaaaacttgaagatgtggctttaggatgcctagctacatcaaacacggaatacctttccaaattgagactggaagccccctcacctaaggctatagtcactagaaccgcactacgcaatctgagtatgcaaaagggattcaatgacaaattttgctatggtgacattactattcacttcaaatatttgaaagaaggagaatcagaccaccatgtagttactaacgtagaaaaagaaaaagaaccccatttggttgaagaagtttctgttctccctaaagaggagcaatttgttggacagatgggtttaacagaaaacaaacacagttttcaggatactcagttccagaacccaacatggtgtgactactgtaagaaaaaagtttggactaaagcagcttcccagtgtatgttttgtgcttatgtttgccataaaaaatgtcaagaaaagtgtctagctgagacttctgtttgtggagcaactgataggcgaatagacaggacactgaaaaaccttaggctggaaggacaggaaaccctcttaggcctgcctcctcgtgttgatgctgaagctagcaagtcagtcaataaaacaacaggtttgacaaggcatattatcaatactagttctcgtttattaaatttgcgtcaagtctctaaaactcgcctttctgaaccaggaaccgatctcgtagaaccttcaccaaaacacacacccaacacgtcagacaacgaaggcagtgacacggaggtctgtggtccaaacagtccttctaaacggggaaacagcacaggaataaagttagtgagaaaagagggtggtctggatgacagtgttttcattgcagttaaagaaattggtcgtgatctgtacaggggcttgcctacagaggaaaggatccagaaactagagttcatgttggataagctacagaatgaaattgatcaggagttggaacacaataattcccttgttagagaagaaaaagagacaactgatacaaggaaaaaatcacttctttctgctgccttagctaaatcaggtgaaaggctacaagctctaacacttcttatgattcactacagagcaggcattgaagatatagaaactttagaaagtctgtctttagaccagcactccaaaaaaataagcaagtacacagatgatacagaagaagaccttgataatgaaataagccaactaatagactctcagccattcagcagcatatcagatgacttatttggcccatccgagtctgtgtagcagacaggtctatttaaactttcaaatgaacagggtaaagttgcatctaaagtaccacagatacaaccatgtttaaatcctcgtatgcactctggcctgcttctccagttacttgcttgtgtaagaacaaaaatgagaaaggttgttttccagtaaaaacatgaccagcttacaaaaaaaaaaaaaaaa

SEQ ID NO: 6617 - DNA, 1170 bp, Homo Sapiens
  NM_173794
gcggagacaggactacgcgcctggagtaggagaaggaggaaaaaagagaccatagacttccatcctggcctagagcggcccttaaagtgccagggagaggagggcgggtggggaccactccagaattggccgctggcggtatcatggcgacccggaacccccctccccaagactatgaaagtgatgacgactcttatgaagtgttggatttaactgagtatgcaagaagacaccagtggtggaatcgagtgtttggccacagttcgggacctatggtagaaaaatactcagtagctacccagattgtaatgggtggcgttactggctggtgtgcaggatttctgttccagaaagttggaaaacttgcagcaactgcagtaggtggtggctttcttcttcttcagattgctagtcatagtggctatgtgcagattgactggaagagagttgaaaaagatgtaaataaagcaaaaagacagattaagaaacgagcgaacaaagcagcacctgaaatcaacaatttaattgaagaagcaacagaatttatcaagcagaacattgtgatatccagtggatttgtgggaggctttttgctcggacttgcatcttaaggacatgaatattctcccataacggattcaactatgagaagagaagtggcagcaataaggcagtctctcaaaagtcatactgccagagtctctagggcaaggagaaacaactagctggacaatactcaattcacaacttagcattttgccatctgaagcttggcaaactagtatctgctgtaaaacaacctatatggtatgtgaaccgtagtattcctgagcaaaacgtggctttcatcgctttgtaaaaatttgcatctgtttagaaactagcctataaaatatcaccattggatgtagatatggagagaaaagaaatatgttgggtttattgcttagcgaaatattctctttttatttaaataaaatgttcttcattgtgttttatggtatgtgtccataatttaaaattcatgttatagtttcagtattaaggctgactttttttttttaagatatgtttgcaataagttaaaaaactgtaatacccttttgtggaaagctttagaaatgatataattattaaagatattaaacagactctgctgatgtaatatga

SEQ ID NO: 6618 - DNA, 2978 bp, Homo Sapiens
  NM_173799
cgtcctatctgcagtcggctactttcagtggcagaagaggccacatctgcttcctgtaggccctctgggcagaagcatgcgctggtgtctcctcctgatctgggcccaggggctgaggcaggctcccctcgcctcaggaatgatgacaggcacaatagaaacaacggggaacatttctgcagagaaaggtggctctatcatcttacaatgtcacctctcctccaccacggcacaagtgacccaggtcaactgggagcagcaggaccagcttctggccatttgtaatgctgacttggggtggcacatctccccatccttcaaggatcgagtggccccaggtcccggcctgggcctcaccctccagtcgctgaccgtgaacgatacaggggagtacttctgcatctatcacacctaccctgatgggacgtacactgggagaatcttcctggaggtcctagaaagctcagtggctgagcacggtgccaggttccagattccattgcttggagccatggccgcgacgctggtggtcatctgcacagcagtcatcgtggtggtcgcgttgactagaaagaagaaagccctcagaatccattctgtggaaggtgacctcaggagaaaatcagctggacaggaggaatggagccccagtgctccctcacccccaggaagctgtgtccaggcagaagctgcacctgctgggctctgtggagagcagcggggagaggactgtgccgagctgcatgactacttcaatgtcctgagttacagaagcctgggtaactgcagcttcttcacagagactggttagcaaccagaggcatcttctggaagatacacttttgtctttgctattatagatgaatatataagcagctgtactctccatcagtgctgcgtgtgtgtgtgtgtgtgtatgtgtgtgtgtgttcagttgagtgaataaatgtcatcctcttctccatcttcatttccttggccttttcgttctattccattttgcattatggcaggcctagggtgagtaacgtggatcttgatcataaatgcaaaattaaaaaatatcttgacctggttttaaatctggcagtttgagcagatcctatgtctctgagagacacattcctcataatggccagcattttgggctacaaggttttgtggttgatgatgaggatggcatgactgcagagccatcctcatctcattttttcacgtcattttcagtaactttcactcattcaaaggcaggttataagtaagtcctggtagcagcctctatggggagatttgagagtgactaaatcttggtatctgccctcaagaacttacagttaaatggggagacaatgttgtcatgaaaaggtattatagtaaggagagaaggagacatacacaggccttcaggaagagacgacagtttggggtgaggtagttggcataggcttatctgtgatgaagtggcctgggagcaccaaggggatgttgaggctagtctgggaggagcaggagttttgtctagggaacttgtaggaaattcttggagctgaaagtcccacaaagaaggccctggcaccaagggagtcagcaaacttcagattttattctctgggcaggcatttcaagtttccttttgctgtgacatactcatccattagacagcctgatacaggcctgtagcctcttccggccgtgtgtgctggggaagccccaggaaacgcacatgcccacacagggagccaagtcgtagcatttgggccttgatctaccttttctgcatcaatacactcttgagcctttgaaaaaagaacgtttcccactaaaaagaaaatgtggatttttaaaatagggactcttcctaggggaaaaaggggggctgggagtgatagagggtttaaaaaataaacaccttcaaactaacttcttcgaacccttttattcactccctgacgactttgtgctggggttggggtaactgaaccgcttatttctgtttaattgcattcaggctggatcttagaagacttttatccttccaccatctctctcagaggaatgagcggggaggttggatttactggtgactgattttctttcatgggccaaggaactgaaagagaatgtgaagcaaggttgtgtcttgcgcatggttaaaaataaagcattgtcctgcttcctaagacttagactggggttgacaattgttttagcaacaagacaattcaactatttctcctaggatttttattattattattttttcacttttctaccaaatgggttacataggaagaatgaactgaaatctgtccagagctccaagtcctttggaagaaagattagatgaacgtaaaaatgttgttgtttgctgtggcagtttacagcatttttcttgcaaaattagtgcaaatctgttggaaatagaacacaattcacaaattggaagtgaactaaaatgtaatgacgaaaagggagtagtgttttgatttggaggaggtgtatattcggcagaggttggactgagagttgggtgttatttaacataattatggtaattgggaaacatttataaacactattgggatggtgataaaatacaaaagggcctatagatgttagaaatgggtcaggttactgaaatgggattcaatttgaaaaaaatttttttaaatagaactcactgaactagattctcctctgagaaccagagaagaccatttcatagttggattcctggagacatgcgctatccaccacgtagccactttccacatgtggccatcaaccacttaagatggggttagtttaaatcaagatgtgctgttataattggtataagcataaaatcacactagattctggagatttaatatgaataataagaatactatttcagtagttttggtatattgtgtgtcaaaaatgataatattttggatgtattgggtgaaataaaatattaacattaaaaaaaaaaa

SEQ ID NO: 6619 - DNA, 9348 bp, Homo Sapiens
  NM_173822
agttggcaggctgctgcgggaggcggcggcggtaggaagccggagacagcagggtgacagaattggaaaatatttaactcttaacaaatgaattccccacttgaactctgccgaattcctgtgccacctcctcctttagaaaactgatcttaatacagagataaaagaggagtagaaggtaaaagaaaatgctgggaactgaccgttgtgttgtggaagaatggttatcagaattcaaggcattacctgacactcagatcaccagttatgcagcaactttacaccggaaaaaaacacttgtaccagccctctataaagttattcaagattcaaataatgagctcctggagcctgtctgccatcagctgtttgagctctatcgtagctcagaggttcgacttaagaggttcacactgcagttcttgccagaattgatgtgggtttatttacggcttacagttagccgagacagacagagtaatggttgcattgaagcacttctgttaggaatttacaatttggaaatcgctgataaagatgggaacaataaagttctgtctttcactatcccctccttatccaagccttcaatataccatgaaccttcaacaattggatccatggctttgacagaaggggcattgtgtcagcatgatctcatcagagttgtttatagtgatcttcatcctcagagggaaacattcactgcacagaaccggtttgaagtcctgagttttctcatgctgtgttataattctgctattgtatatatgcctgcctcatcttaccaatctctttgtcggatgggttccagggtttgtgtgagtggctttccacggcaacatgaaaaacactggaaagaactctgtggtcgaatagtattggatcctgaatttatggtgcaacttctcacaggggtttattatgccatgtataatggacagtgggaccttggccaggaagttcttgatgatatcatttatagagcccagctagagcttttttctcaaccactattggttgccaatgccatgaaaaactcattaccatttgatgctcctgattctacacaagaaggccagaaagtccttaaagttgaagtcactccaacagtgccgaggatttctcggactgcaattacaacagcttcaatccgtcgtcatagatggagaagagaaggtgctgagggtgtaaatggaggagaggagtctgtaaacctgaatgatgcagatgaaggattttcatcaggggcttccctcagcagtcagccaattgggaccaaaccatcctcctcttctcagaggggaagcttaaggaaagtagcaactgggcgttcagccaaggataaagaaacagcctctgccatcaaatccagtgagagccctcgagattcagtagttcgcaagcagtatgtacagcaaccaactgatcttagtgtagattcagttgagctgacaccaatgaagaaacacctgagcctgcctgctggccaggtggtgccaaaaatcaatagcttaagtctaatccggacagccagtgcttcctcaagtaaatcatttgactatgtaaatggcagtcaagcaagtaccagcattggggttggcactgagggaggtactaatttagcagccaacaatgctaatcgatactcaactgtcagtctgcaggaagaccggctaggtcaagctggcgaaggtaaagagctcctcagcccaggagcccccttgaccaagcagtctcgatccccaagtttcaatatgcagctaatatcccaggtgtagttttgacatcctccctcatctttctgcttaccttttaaactgaacatttcattgtgcaagaagacacttcatcccacattgtgaaaatattggtcactgttatcagatttcatttagtttaggtatcttcatactgtattttgtatcaaaacagcaataaggttttctttatccctctttcctacatcttctcttcacctatcccttgtaaatgtgtttgtgaagcagtataaaatggttgccttttccatgccttcctttctccttgggtgatgtgcaatccatcgtaggctgatcggtcccatttcaacactgtgagactgagggtacattagaggaaatggtgtatatgatccctatgaaacgattctttggcttttgtttaaaaacaaaacgggtttgttctcataatctatagaactatgaagattactggatcatatttttttctcttaaccaggagtgcctcagagattctgctatgactttggacttctctgagtctgtgcaatcattttctggagaagcatggggaaaggtggtagactgctgcactttttcattaaaatgagggtagctctttctccacccccccatctcctttatcccgaagacataaatgttcaattacggaggcatttaaatcaagttgtgaccacctccattggagggcaggactcttgattgtgtaattgataatgcactttctcaatggctgtatagtcattattaacgtgtcttccctcttccccacaaggacatataaggtcatttctgtccttcaagtttggccaactaacaaatcagaatctgaggggcatgttctatttcccaggaatgattgacactttggtgctggggttttgtgggggcggggggtagtttttgtttagcttttgtggagattgtgtgtgtgagaggagatttgatttttttttcttcttttcctttgtgagctgatggctgaagtgtaacagtacatcttcaggtaaagagagggatttctcaatctactttctgttatgtcagactataagagaaaccctttcagctgctttctagatgtacctaaattcagtcagacattttggattaagaaacctaaagtcctgatacattacatactccaaggaaatatatcagggacagacaattggctgaaacactgatacttcaatgtgacacatttttatagaacatttctaccagggggtactgaccttgatttctcctacaaggaccacactgcctttgtgtttaatgtaatgcaatttgtgtaccttctaatcatatatctgcagttcctcatttttataaaactttgatatcatgccagtaagctagatgttgaatgtatgtaagtagcatttggtaactgctaagaggttacaaaaacattattggtaaaaaaaatttccttagttctgatctggttggataagattttatcataacttttctgggtctcaggctctgatgtttgaaaaagaagggaatatattgggttttaaaaaagtgtattgtgacttaaactgttataagttatccttccacagaatacatcagagctatcagtgctttgtacatttagatgtttttacttgattattgtttaagaaaaatatactgaatttatagaaagcaagtattctcctaattagcaaaagttaaaattttatctctaccattaaaattacaatagattttgataaataaccagaaaaaacgcctttttttttttcacacctagcaatcctcccgtttttattgtaaggactttcttttttccctaagagactttctgttagactctttatatatgagatgcttgtttaaatatggtggtctgtaacatttttccagctcatgtgaaaatggaaaactagaacctgaactagtatctacaacattgccaaagtccagggtaaagctaaaagttgataagtagacaatttattgttttgtgtgtgtctgtgtgtgtgtgtgtgtgtgtgtgtgtgtgtgtatggtgtgtatatgtatatatcacaaagttgtattttaaatattttaaataccctttcttttaatttaagggatgtcaaataaatgaaaggagtttaaaaatagccaaaataaatgagctataaaggcccataacatactaaaacaggcagtttcaggtatgtaaggaaaggaacattatacttacctagaaagtgagatctaaaaaaaaattaaaaataaataaaaaataaaaaagaaagtgagatcttggctatggctggaggtcagtcactttatggcataaattatttgggaggtaaaaagactgttttcaattcaaattgtgcatttattggcatctaaatctagcatgattttggttagagcacaaaagaaataccacataataccaaatcacagcaaatgttagaattaatacaacaaaattttcctttggctagaaatcttatgttatacctgaaaaattggttttaaaaaatgttcatcttggccgggcacggtggctcacgcctgtaatcccaacactctgggaggctgaggtgggtgaatcatgaggtcaggagttcgagaccagcctggccaacatggtgaaaccctgtctctactaaaaatacaaaaaattagctgggcgtggtggcaggcgcctgtaatcccagctactcgggaggctgaggcaggagaatctcttgaacctgggaggtggaggttgcagtgagccaagaatgcactactgtactccagcctaggcaacagtgcaagactccatctctgaaaaaaaaaaaaaaaaaaaaaaaaaaagttcatcttagaggattttatttatctgtatgtatatacatatatgtttgtatgtatacatacccacattaacattttatgaccctgtaacatttgttttctattcttttaggtgatgtgaattgacctcagtgaagaaacatttcatttagtctaagccttgcattcagggtcttacaacagatttcttgtgcaagaattattattagttaaaatggaaggtgttagtttaacaaactgagagtcaaattttctaagtttttaaatatgcattttaacatgcattatttttggcatttaatttaaaatagttttgtttcatgtatacaacagctgttacagatatatgccagcaatattcatacttttttaacaagcttttgttatatattttctaatctccataaaagtctaatcatctatgaaaaagatatttagggagaaaatacttgttttctgtaataaaacaattaggttggtgccatgtatgccaagttggataaaagaatacaaagaaacagctgaaggttttgggagctcgctctgacattaattactagaaagcaaactaaaatgcaaagtgaatagttaactcagaagatttgaattttttgaaatagggtctcactctgtcctctaggctagagtgcagtggcactatcacggctcactgcagcctcaacctccctgggctcaggtgatcttcccacctcagcctctggagtagctggaactccaggcatgcaccaccacacctggctaatttttgtatttttagtagagacgaggttttgccatgttgcccaggctggtctcgaactcctgggcttaagagatccacccacctggcctcccagaagtgctaggattacagacataactaccacacctggcctgaagatttttaaatgtgaaaatattttaagaagctaaggggaaaatcgttattttaaaatcctgatccccttaactttaccccttaccattccccttacctttccaattcacttttgtctatttattatagaatcagaattgtgctaagaagaaaccctggagataatctagctagtctcccactccctcaccccaaccttcatcctcaagaaacagaggctcagaggttgtggtgtgatcaagatcatatacctaaagcagagccagaatcaaacccagtctcccatgggtttggggaggcagtgggttgttaactccatttttgcagtttctttatagttctggtctagtagttggtgaatacaacacattaagaaaagtgttaaatccagaaaaaatgtagagtaatctagatggggaaatgttggaaatgttaagtatatctacagatgtaaggatcaatacattattctaatttatgccttactattttctgccacataacagttgtatgctgccattttatagttgaatacatttgttgggatttatttaaatataaaataaaccctgtgaaatggctttgatcagtgttttctagttattttaaagtaatttttgagtcagccagctttcagtcaccagtgtggcaagctaattatattgcacaatagagtattgcaaagtaaagattaaataaatttgattccattactttttaatgtagaaagagactgaatcttatgcttagagcaaatgcaagcaatatttccttatatgattgaaaaaggttctatagtgtgaagcttatgattccataatggaacagtgaccatgatgtcatttaaagtgtgtatataccatataaaatgtcttaaatgcggtagtctcagctatataagctcagtatttccagtctgtattctcagattccatctagtagctttaaattaattaaaattgtttattagacactggaatactgagaataacttctttcagattgttttgtttgcaccacttttgtgaatattttaatgaagtggagtccatttttgagtacttcagttgttgacaatcagttgtctcgtttaaatctctgcatgttcatttgtaaataaaaaatgtagtacctgtctttaggggtagtcccctatttattacaaacactggcaaggaatatctgtccatttctgaccttggattacaaagtatgttttgggtttttccttttttaatcagtatttcagttacatctttgttttcagctttaaaaagtttaacgggtcatgccaatgatcagaaaatctgtaagaattttagagcaatttttctatgtacagctatgttaaacagtctgaacatgagactttttctttcaagttgaagattattgtcatcgttttaccactaagttggttgagacacttacttgtaatactttaatttttttaaagtgtttttagaaacaagttgtttgaaaaccaattagaaattagaatatttgccagattataagcagatggaatgcagtgtaaaactgttaacaatgctaataaaattatgagtcatcagattggtacagttttccctgccaagatggtcatattgataatgtaagacaaattttagtattacttgcattatgtgtacctaataggtatatcatactggtactgagcatatatagaaaatactattcatagaggagtcatcaccacccaacctccttgcctgtgtaggcatatttcttctgaacctgaccacacaagtacaacattttggtaacttcagtcttttcagtatttttgtaatcttagccatagtcctatgagaaatgtacataagagcaaacaattcaggatagaaattagcagaaagctgggaatgatgtgaaataactggcagcatagtacagaaatgtaaggtatatgttttgcttctggatttttagaaattgtgctaatcatgtttacaaattaaggcatattcagatgtctgctattatgtttaatattgatttgataaaaaaatggaattaggtgtagcttagagtataaatgagtctttttaaaaatgtgtatctggaagtagggctaataaagaaatccttttattttcaaagaaatgaacttaattggacaactcatccccaattacagaattgatatcaatatggtttgctgtatttgagtataaacagctcagtgttaattatatcaaaggaagttctttacatcttcattgattacaaaatttaccaaagaaaatgtatctaccaaatataatttttaaagtacttgttaaggaatgaggcctctttaacatataaagtatcttaaaaatattctctgacctggaaaataggtttacagtagctacaagattccattttaggttttcttatgtcaataaatgtcaatattttacacttccagcaaaagtacccgttaaagctaaatctaaatattattcctcatagcacagtttctggtctccttaaattaaggatcctactcatcaggattgaataaaaagggggaaattcctaaaattggtatattgtataatattgtgggttaagtaaaatttaggggggcattatggaaatgtacctattttaaagggcagtggcaattactataatattggttaaactggtaaagtttgttaaataatttatgtccatgatcattctgagtgttttttttctttgcagaaaaacaggattgggttaagaaaagctaaaatactcatttttttaaaatgtatagcccaataagaactaaatgatttatttcaaaagttaaataattttttttggaaatcatggaatgtatttgcatattgatgttccaaacaggttttatgtattgttttttatagcagggagtagttgaaaagtaatgagtatattgattagctgtcttggaaagagaggattggctttctaacaatcactgatacaggtttgggtttgggggggtttgtttgtttgtttttaagttttatcatccatactgaattgagagatatgctccatgtttaaaaatatttgtaataagttcatctacttgacactgaatcttttttattcttactctaaaattattctggctttacattcagtttaagtggttaagtgaaacagtttttagggtgcaaaaattattttcccactgtttttctcatgataatttgagtctcctgagctataatttctgaaggatttttactactttggcattatgtaatctgatctctgtcacaatgatattaaataagaactatctcactttcatatgtttgcttcataaaaggatatggaatgtacacatcagctctttttttttttttaaactagcatcaacctataacttggtataaacttcccaagtatttagagaatagtgctggtgaaaatttaaataggataggcatatagaaattatgacttgtattgagtgatgtcctttcaacctaggactagtgacaaccttcattttttcagagctgaagaaaaaaccgtgaatttaagatcatatttattggtgcatgtaagccattatcctgtcttaatgaaccgattaatgctgttgattgttgaaatgtgaaatgtagtcactgttgaccttgtaaatatctgccagagatgaaaaaatattttaagttattgtaaataaagatgtataaaattcagtatcagtctgcaatgcagaaacatatcttagatgttaaaatactgtgtttgagagatgtgtaatttacccttagatgtatctagttacattaagagtgtaaatttttttgtacagtataaaaatacagctctatttggcttttaactggaaaaaaaaaaaaaaaa

SEQ ID NO: 6620 - DNA, 2782 bp, Homo Sapiens
  NM_173824
tggaggagggacttctctttcggtaaccagctcccttgcggatagtctatgttctccatataaacccagcacttcccttaattgagatacgtgggacttcactccgtccccagcccggaaccacaagtgagggcactgcgtttcctgattgacctctttggcgattacttccgcccaggggcctggaatactggaggcccttcgacggagaacaacaagaaaggcacttccggtgtctgttgccaggcgcgggcccagtgggccgtaggggcgacattgttgccgtcgtctttccccccccagtcccggggatggagatgtcgggactcagcttttcagagatggagggctgccgtaacctacttggcctactggacaacgacgagatcatggccctatgcgacaccgtcaccaaccgcctggtgcagcctcaggaccgccaagatgctgttcatgcaatattagcatacagtcaaagtgcagaagaacttctgaggcgtagaaaagtccaccgagaagttatatttaagtacttggcaacacaggggattgttatacctccagctactgaaaaacacaatcttattcagcatgcaaaagattactggcaaaagcaaccacaactgaaattgaaggaaacgccagagccagttacaaagacagaggacatccacctatttcaacagcaggtgaaagaagataaaaaagctgaaaaagttgattttcgtcgcctaggagaagaattctgtcattggttctttggacttcttaattctcagaatccttttctaggaccacctcaagatgaatggggaccacagcacttctggcatgatgtgaagcttaggttttattacaacacatcagaacaaaatgttatggactaccatggagcagaaatcgtgagccttcgtttgctgtcactagtaaaagaagaatttctttttctcagccccaacctagattcacatggactgaaatgtgcatcttctcctcatgggctggttatggttggagttgctgggactgtccatcgaggaaacacttgtttgggcatttttgaacaaatttttggactcatccgctgcccttttgtggagaatacttggaaaatcaaatttatcaacctgaaaattatgggagagagttcccttgctcctggaacattaccgaaaccatctgttaaatttgaacaaagtgatctagaggccttttataatgtaatcactgtatgtggtaccaatgaagtacgacataatgtaaagcaggcttcggatagtggaactggggaccaagtttgaggtagtggaaatgagacattgctgaacaaaagagaactgggtttacctgaccctctaaagcgctaagtactgtcagcctgaaaaaaatcttctatacagaaactcttccaaatactatatcagtaatgtctgaatgatttcagatgtgaaaattgacatattttagttgaaatacctttctggactacagacttacatatcatgtgaatacttacctatttctacccgagttgcagcaagtattctgaaagcttaatgcaaataaatcccactttagatcttacagctaactgtgtgccttagaaaccaggtaatattttccttttacttagtgaatattctgctaatatctgcacttttcatgtgggaaaggattaataatggtccaggcttcccctctttaagtttcatgtttacttttgtctaactctggataattgtattttacaaatgcatctcactgtagtatatttttaaaactattaaatattttagagatgtttaacgtaaactcaaagttctcattttagaaaatttaaataacattctttttgcaaaaaagtccaataatttaacagttgaagaaaaacttactacctctttaaagatttgagaaacatttttcaaagttatcagctgtagtccaagctaaatatcttttgtaatctgcaacattttccttactgtttttgggcagtgataaatgctgttctcgaaatagactttattcttacctaggcttcagacaacagttttatagagcagttactgtaatacaatataaaggaaatatgctgttgaaattttaaaggtatgcccagttcctaacttttaaacgaattaccgttcttcctcttggctgatcttggcagagatgacaaaaaaaaccccaaaacaacccatgcatgtataatgtgtgtatacacatatacataagtatacatatactcccacattataacttagaatatttagttttttacctgttactaggtttgagttacatggttgagttgccaaattatttacatgctttgtttaaattcttcatcacctagcaactgtttgctgatcatggatttacttagttactttaatttataaaattaccatttggaaaagaactcaattgggaaatgtgatgacgtattgtacatgttactttttcctttgctataatcatctagggagactgataagaattttggaaatgggagcctggaaactcatctttgtttttttaatgctatgcctcttacgaggaatacgaattggtatgtcctaaaataagaacttaataaaggagggaaatcccttttgtctgctataaaaaaaaaaaaaaaaaaaaaaaaaaaaaaaaaaaaaaaaaaaaaaaaaaaaaaaaaaaaaaaaaaaaaaaaaaaaaaaaaaaaaaaaaaaaaaaaaaaaaaaaaaaaaaaaaaaaaaaaaaaaaaaaaaaaaaaaaaaaaaaaaaaaaaaaa

SEQ ID NO: 6621 - DNA, 3883 bp, Homo Sapiens
  NM_173825
aggcgttaacccagggaaggcagtggcaagatggcgtccctggatcgggtgaaggtactggtgttgggagactcaggtgttgggaaatcttcgttagtccatctcctatgccaaaatcaagtgctgggaaatccatcatggactgtgggctgctcagtggatgtcagagttcatgattacaaagaaggaaccccagaagagaagacctactacatagaattatgggatgttggaggctctgtgggcagtgccagcagcgtgaaaagcacaagagcagtattctacaactccgtaaatggtattattttcgtacacgacttaacaaataagaagtcctcccaaaacttgcgtcgttggtcattggaagctctcaacagggatttggtgccaactggagtcttggtgacaaatggggattatgatcaagaacagtttgctgataaccaaataccactgttggtaatagggactaaactggaccagattcatgaaacaaagcgccatgaagttttaactaggactgctttcctggctgaggatttcaatccagaagaaattaatttggactgcacaaatccacggtacttagctgcaggttcttccaatgctgtcaagctcagtaggttttttgataaggtcatagagaagagatactttttaagagaaggtaatcagattccaggctttcctgatcggaaaagatttggggcaggaacattaaagagccttcattatgactgaattacactcatcctttggaagagtgagcaagcagtggcagtttttcacagctcatcttgctgtgttcaattattaccatcacagccttttaacaaaatcatcttaaaatgctacccttcagccttaccctttaatggaaaaatgaaaggaagtgacaatacgggaggtccaaactttgtccctgttctctgtgttccttacctttctgtccctgtgtatagattatgtaaaagccttgtgtaaatatgagatgttgtcaaaatgatgcagtaaatgagcaatgacagtgtactgcagagaaaatttactcttgcctagaactggagggtttttatgggtctgtaattttcccacactcattgctgaaagcttaattaagtacttcaaaaacgtatctccattgttttaccttcttgaggggaacggtcttgttaaccagccctgagttgtctaccccaaacaatctctgtcattttcaaagatgcaaaatggtgttatttaattgtctccaccattgtcacacacaggaatgcctaataatagcaacccttgtctccctcttctctcctttgcaaatggctcagtgactggaagaggcggactaatagccagagttaaatataaatacaaattaataatacatagagaacagcaataccagaaaaaaagaattctggtaaaatgatgtgaaaaattgacagctccctcactcttaaggttgctgctatatacagtctaggttttctgtttggaaataggtagggtaaaatctaagacctgcacaagggcagtgagagacatttacagcctcctctctatttgtttttttaaggaaaagtcaactcctgaaatgtcccttagctataatcagaaaactaagaatattattctgtgtcaacaatgtatttatggagagaagtaaaaataagttccacagcaacacatttacatgaattatgaactaggattcttggatttcataatcactccaaagctttttggggatggtgtgtgtgtgtgtgtgtgtccgtaattgttcatcattactttttttaacctatctttttgcttgcttaatcttctctgccccagttcttcctgagtatatgaatttgatttctaaaaacaatttattcaacactctatcacccgtattctctctctggctctgctgcaggtctctgcactcctgattttgctccatacttttaaataacaataataaatatacagttttcatttctcatttaaaaaataggtggaaaacaccaaattcactttctgttccattttaattaggtttcagaagtatcttggaaatcaaggtatgctgcaagaggatattaaaataagaatgttagagagtccttttagaaaggcagtcttgggaatttggaaaaggatttttaaagcagctttcatcagctagactgttctccagcctttctttacttcctctttgaaaggacatagccctggtttctttttgacacaaaggaaagctatgcaaatcatgatctgtatgtagaattggtcacaagtatgttgttgcataggctgtacagttgggaagtagaaaccaaatgctacccagagacctaacccaattaagctctttgtatttctccttcaagaaataaatcttccttccttctttcttcctctttcttttaattttaaaaaaattcatcctgatttttttattttctatcttatttaaaaaataaaaataggccaggcgcggtggctcacacctttaatcccaacactttgggaggcgggtcgatcacttgatatcaggagtttgagaccagcctggccaacatagggaaaccctgtctctactaaaaatacaaaaattagccaggcctggtggcacgcgcctgtaatcccagctacttgggaggctgaggcaggagaatcacttgaacctgggaggtggaggttgcagtgagtcaagatcgtgtcactgcactccagcctaggtgacagagtgagactccaactaaaagaaaataaataaataaatatataaatatataaataaataataaaagtaaactattgctgatgactccagggtcaatctggaaaaattaacagtattcctcaactccattactttctgcagccaagcttgattccttgaattatagttttctaagaaaaaatagtttttaataatctaaggtaaatttgttgcaattattagcagcagcataataaggctttttgcgcaaatgaatgttattagctagagttattcaaaaaagaatgaagcacaatttttgctaggacttcttgagaactattcataaaaatgcttttagataataaacaagtataaatgtcaaaatatttttttaaaagtataattggccaggtgctggctcacgcctataatcccagcactctaggagactgaggcaggaggatcacttgagctcgggagtttgaggctgcagtgattcatgattgcaccactgccttccagcagcctgatgacagagtgggactccatctctttacatatgtatatcttactctcttgatgggacaagttggtagaaataaagattttttttttctgttgtgatttcggtgtctgaccaattttctgactcattgtgaaggtgaccagatatgaaggcatatatatgactactcctctgtcccttaggtgtataagacttagctggaatccaactaaagatttgggctggtctctccatcttaacgttgatgggattcaggacacataaccccaaaatattgcaccctgttatttgagaaaactgcagaagcaaggtttctcataccttccccttaccccttctcccctgaagcaggccataaaccctaagtgactgttccctgaagtagatcataaaaccttcattccataggtaccctttatcctcacagatacagagacaccaagaagaatctggacaaataggacttgctaagttctccacagtttattaccattagattatgtccttttgtcctctgattatacttctgcataagactgtacataaaaatacacaagttttcctatttcttttttgtcttcatttctgaagattcctgtcatgtaaaacttacagtaaataaatgtgtgtgcttttctcaataa

SEQ ID NO: 6622 - DNA, 3702 bp, Homo Sapiens
  NM_173826
ggggaaggcctggcacgctccagccaaccagggcgtcacctgcagctcgtccccctgcccgggcttgcctcgagcgccctgccgccgccggagcggggagggtgttgggggcaggtggagccgggagggcccagctgagaattcagggttgggggctcagagggcactgcggctaggagcccgtcaaagcctgtcgcccaccggggcgagggcaggtgggagcgcctggccgtgcgtcgcgcgctggttggccagctgacgccccagtgcgcatgcgcgtccgaacagccctgcgggcggagcgactgtcctcccttctggtgtactgggtgggaggtggaactagtcggacaaagccctcgcgtcggacccttgccagaactcaattaatggatgcctcgaagttgacgtacatatatattcagaaatgttttgccacctgagacctatgaggaggttatgtctagagaagatatttccacactggtttcccttttcaagagctttatcgggagctgaagcagtcaatgccttgaggcctttctattttgcagtacatccagatttctttggacagcaccccgtagaaagggaaatcaatgaaaattctcttaaaaggttaagtgtctacctagaaaacctccagaaaccaggcttcaagtctttgaaaccaactcagcttacattttatgtaagagaaacagaccagagttcctccgatggccaggaaccttttagtacttccggatttcgagcagtcaaatttactttgcacaccagagatctgctaagcacagtgttatatattctcaactcctgcagtttatctgttgaacatatccaaagcttgaatactaatatgcatacccagcctctcaaagaagctaaaaggatgcctgacaggcccatcaaatgggacaagtcttattactcctttactggattcaaggaccctgatgaagaccttgaacaagtctcgagagtggaaacaactctcacatcctggttagataacaatgggaaaagtgctgttaaaaagctaaagaacagtttgccacttagaaaagaactagatcgtttaaaagatgaactgtctcatcaattgcaactctcagatatcaggtggcagaggagctggggcatcgcccaccgctgtagccagctgcatagtttaagccgcttagcacagcagaatttggaaacacttaaaaaagcaaaagggtgtacaatcatatttacagaccgttctggcatgagtgcagtgggccatgtgatgctaggaacaatggatgtccatcaccactggacaaaactttttgaaagattgccaagttattttgaccttcagaggaggctgatgattttagaagaccaaataagctatcttttaggtggcatacaagttgtttatattgaagaattacagccagtattgacacttgaagaatattactctcttcttgatgtgttttataatagactgttgaaaagtagaatactatttcaccctcgaagtttgcgtggtttacaaatgatccttaacagtgacagatatgctccaagcttgcatgaactcgggcattttaatattccaacactctgtgatccagcaaatctccagtggtttattctcaccaaagctcagcaggcaagagagaacatgaaaagaaaggaagagttaaaggttattgaaaatgaattgatacaggcatcaacaaagaaattttctttggagaagttatataaagagcccagcatttctagtatacaaatggtggattgttgtaagagacttctagaacaatcactgccttacctacatgggatgcacctctgcatttcacatttttactctgttatgcaagatggagacctttgtattccttggaattggaagaatggagaagccattaagtaacacagaaatctgttttatttttttaagagataagaaaggaacttaaattaaaaatatttaaatccacaatttgatataacagtattatttacataagaacaaagtttctaactgctgctttaaaagtagacttttttaaaaaaattaatttctgctaggagaggttttatatgccaggcgtggtggctcatgcctgcggtcccagctacttagggaggctaagataggaggatcacttgagcccaggaggccaaggttgcagtgggcccagattgcaccattgccctccagcctgagcaacagaacaagaccttgtctcaaaaaataataatgataatttaaaataaataagtaactaataaaaagattttatatcccagtcttatgatgttggttggcaaggctagataaaaagatgttagaatgaaagaacatatttttagtgatatgtaaatgaaggattctacaatagtcatatatttttatatgaatgaatgttgggttgggctggagaggtatgtgtgtgtaaatataaaggtctcacattcagagtatagctctgaaataatggaactcatgtctacaattcaacatgcatctgtatagttacatctcatgtaaatatacacagacatattttgcagccagtaattgacagttaatgtccaaaacaggtgattgataggtaacagaaattagataaccaccaattttgcccaagagaaagactagaaggactaaaagcagttgaatgtatggtactgacattgtcataagcagtctgataaccagtttattgaaacgtgtgcattaacagagaatttaattttaaacccataatttctcctatccattaaaatattataattgttagtagtatgaaaccaacaggaaatgttttttaatcatttagtgaggtgattcatttgtttcatgggcaaacactatccaggaaaagccttgcttgcctgtttcccaaagagctctaagaaatagaatcaagtgtaaaatggttcagaccattcaggatttcttgtcactcttctcaaccacgatcttcctgttattactgatgtttgaaaccctgtcattagccccggcctggttaaagcccctcagagtcacctctcattcatagcaatagaattcaaccccaagtggttgatggtgtccccagcacagccgagagacctgatctctggattcagtgcttttagctcttcgagtttaccctaagataccttcgggcaatatttttaaccaacccaaaagctcttcaggtcatttctgaagaggacaaggtgaatcttggcttggaacaccatttttgggctcttgctactgaatgaatcagaaaggaattttttctgaagagcattagaaagtaaaagagatgttaaaataagttcttgaagtatgttttatatttatctaaaacactgattttaaaagtttacattcaaatgtgtattcaaaagaagtactgatttgtaattattatagtttgtgtgtatcatcccttttaaccgtgcctaacaactgtacttaaattttgttttctagtgtaacaaatgtttcccataagattttctagagccaaataatgggagtgaaaaattccttaagtgttatataagaaaatatattagaaaatcagctttggattatacgatttctaaaatatactaatacagaatcctcagtaatatgttttgaattggattttttctcagaactgttacataataaataatacatcaaccagaaaaaaaaaaaaaaaaaaa

SEQ ID NO: 6623 - DNA, 2599 bp, Homo Sapiens
  NM_173828
gagctccgcccctcgcccggctcagctctcccggtatctggggctttgagcgtcccgggttgggcagggaactggcagcatagctcctaggatgcgagggccatttgtctccggccgggggtcagatcctcgggaagccgagccatcccatccagccgcttgccccaaaccgggcgcaggccgtggtcacttctctaggaagctccgaagatcccgccactccgtccctcaaaggtgcggaaagccggcttcccccagccctcggagaagattcctgactctccgctcggtcggggcatctgagggcaggagctgcgccaggcgtaccggatagaccagtggacaacacccacgccggaccgcctgtcccctacccggacccagactcggcgccgcacattgccccgggggggcccggcgcagtcacgcgcgcgcagagctcacgctctccgccccgcacacctgcgctccgccccctggtcctgggcccgcgacgggtgaaggcatttgggaagccagggcggctgcggaggcgatctccctgacccagggccggagttgcccggagcctgccaccgctctcagccagcccgcatccttctctgttcttccctccccccgcctgccacggcgcgggtatccgcagccacagcccggggccggtgaggcggcgaagggggaggggaggaatcaagggatgagcgccggaagggcgtcgggggccctgagccgcactaggacgcccctggagccggaaccccagcagaagccggaaccagaaccaaatcaccggtaccgggtcggccaggtggtcagggtgggagaaaccaaaaagggagaggggtgcgggagtactgagaggaaggggctgcagaggcctggctcaggccggcgtggaggaggtgcgggcgctgactcaggcaggatttctgctcccgccgcctaagaatgccgtcccatctcgtgctgcagtgtccttgggagggacagaagcgcgaacaagctggaaaggggaacgctcggggcgtcggggaagcgggaccagggtcgtggtagagagcttgcgttgccgctgacctcttgccgaaaggcgaaacagcactcctggcccggacagctccctggttgggtagggggtggggccggacctcagccggacgtcttagacgtgcttgtttcagatcctgaggacggcattcctacccctcccccattcccagctgcagccccctaaacccaggaggcgccctggcccgcgctcgccccccagggcctcatgtcggaaccacagcctgacctggaaccgccccaacatgggctatatatgctcttcctgcttgtgctggtcttcttcctcatgggcctggtaggcttcatgatctgccacgtgctcaagaagaagggctaccgctgccgcacgtcgaggggctctgagcctgacgatgcccagcttcagccccctgaggacgatgacatgaatgaggacacagtagagaggattgttcgctgcatcatccagaatgaagccaatgctgaggccttgaaggagatgctgggggacagtgaaggagaagggacagtgcagctgtccagtgtggatgccacctccagcctgcaggacggagccccctcccatcatcacacagtgcacctgggctctgcagccccttgcctccattgcagccgcagcaagaggcctccacttgtccgtcagggacgctccaaggaaggaaaaagccgcccccggacaggggagaccactgtgttctctgtgggcaggttccgggtgacacacattgagaagcgctatggactgcacgaacaccgtgatggctcccccacagacaggagctggggctctggtgggggacaggacccagggggtggtcaggggtctgggggagggcagcccaaggcagggatgcctgccatggagaggctgccccctgagaggccacagccccaggtcctagccagccccccagtacagaatggaggactcagggacagcagcctaacccctcgtgcacttgaagggaaccccagagcttctgcagagccaacactgagggccggagggaggggcccaagcccagggctgcccactcaagaggcaaatgggcagccaagcaaaccagacacttctgatcaccaggtgtctctaccacagggagcagggagtatgtgagtctccttcattgtgctgatggactaccagctggcagggccagggggtgggtgggcgtgaaagccctcccctccactggacagcactgccccccagctgagggaccagctctacttccacctggagttgcacagtctcaggctgggggcctcaggagaggtcacagcccctcagtctcttctccttcccctgcctgcaacaggctgcctgccccgccttccccaacacctcgctccatatgatagagcgtggcagctgggagcaggcccctgcccgtggtgggcccctaaagcaatagcaccgtaggccccctgccctcttagcacaagaggcccaggccctggcctggccttcgtgccctttattcattgtcaataaatccgctcagaccattaaaaaaaaaaaaaaaaa

SEQ ID NO: 6624 - DNA, 2302 bp, Homo Sapiens
  NM_173831
ggataacaacttccgctcgggaagtttgtaaaagtctgggctaccggcgcggcgtagtggatgcagcatcctagtggaggacgcccctgtgatggagtctcactctgttgcccaggctggagtacagtggcgtgatctcggctcactgcaagctctgcctcccggttgctgaacctgtttgcatgagttgctcctgacggccctttaggatacttccatgtctgtagggtctagagtgacatctcctcccctcccctgacgagatctgccctccttggcactgtgcttccccagaggggtggcctcgctgttcccatggacatggcccaggagccagtgaccttcagggacgtggccatctacttctcaagggaggagtgggcgtgtctggaacccagccagagggccctctaccgggacgtgatgctggacaacttcagcagtgtggctgctctgggattttgcagccccagaccagacctcgtctctcgcctggaacagtgggaggagccgtgggttgaagaccgggagagacctgagttccaggcagtgcagaggggaccccggccaggggcaaggaagtctgcagaccccaagagaccttgtgatcatccagcttgggctcacaagaaaacccacgtgcggcgagaaagagccagggaaggaagcagctttaggaagggcttcaggctggacacggatgacgggcagcttcccagagctgctccagaaaggacagacgccaagcccacggctttcccgtgtcaggtgctcacgcagcgttgtgggcggcggccgggccgcagagagcgccggaagcagcgcgcagtagagctgtcattcatctgcggcacgtgcgggaaggcgctcagctgccacagccggctgctcgctcaccagacggtgcacacgggaaccaaggccttcgagtgccccgagtgcggccagaccttccggtgggcttcaaacctgcagcgccaccagaagaaccacacgcgcgagaagcccttctgctgcgaggcctgcgggcaggcgttcagcctgaaggaccgcctggctcagcaccgcaaggtccacaccgagcacaggccctactcgtgtggcgactgtgggaaagccttcaagcagaagtccaaccttctcagacaccagctggtgcacaccggggagcggccgttctactgcgcggactgcggcaaagccttccggaccaaggagaacctcagccaccaccagagggtccacagcggggagaagccctacacctgtgccgagtgcggcaagtccttccggtggcccaagggcttcagcatccaccggaggctgcacctgacgaagaggttctacgagtgcggccactgtgggaaaggcttccgtcacctggggttcttcacgcggcatcagaggactcacaggcacggggaggtgtaggggcgcccgaagagtggggtgctgcgcctctgcgggagtactgggtcctgagggagagctgcagtgagaagttgctcttcagcctggaaaatcaacctgaattcagagaagccttcttagtcctcagagctccccagtcccccgagaagtttactgggaaaactgccaggtgggagaagcagagccatgggtacgccggagatggcgggggctctggagatggcgggggctgcgccccggcgccgggcatcctggggatgtgctgagagtgtgcgcgaccccggagccacgtgccaggccgggctcagaggcggagaagcctgcctggtgcccacagccgtctggctcagggactccaccctggccccgagtcgccgtctgctgggcctttccttcctggctctgcaccccatgctggctgcccggtctggcttcccttcttgtctctgtcttgggcgaggcagctgtgagcattgcacagaggcaaagaccctcctgcagcctctgcgctgggccgtagaaacaagagcctttgtaatactgaacctcattcaaggattaggagtggtggttaggtcagggccacccccagtgctgcaggaacggcctccacccagctctgttggtcagagcctgggtcatgcacctggagttgggagatcaagttgggtctcagggcagtgaggtggccatatccaccacatcgcatttcgtgggggaagaggtgacctctttgttttaaacttaaggtgtctgcttatccagccagaaataaaaatctgccagtggtgttcccaagggaagacccccgtgggaatgggtcgggacactgccgtgtttcaggttagccaattaaaaaaaaaaaaaaaaa

SEQ ID NO: 6625 - DNA, 6282 bp, Homo Sapiens
  NM_173834
gccgtggtcgcgagagcgaaggagcggtctgagaatccggcttgagtgttaaaggctaagcgtgtctagctggacccgtggccccgaagaagcgagacaaggcgacgcggagctgtccctgacaccccgaggaccgagggacagcgaagggccggggccgccggccattgccaggcgccattaggtgacgcggccgtcacgcgatgacgcgctgaccggcagtggcctccacgtcgcaggttccgcaaagacctgtgggagcgacccgggagaaggagggccaagatggcggaagcggaggagtctccaggagacccggggacagcatcgcccaggcccctgtttgcaggcctttcagatatatccatctcacaagacatccccgtagaaggagaaatcaccattcctatgagatctcgcatccgggagtttgacagctccacattaaatgaatctgttcgcaataccatcatgcgtgatctaaaagctgttgggaaaaaattcatgcatgttttgtacccaaggaaaagtaatactcttttgagagattgggatttgtggggccctttgatcctttgtgtgacactcgcattaatgctgcaaagagactctgcagatagtgaaaaagatggagggccccaatttgcagaggtgtttgtcattgtctggtttggtgcagttaccatcaccctcaactcaaaacttcttggagggaacatatctttttttcagagcctctgtgtgctgggttactgtatacttcccttgacagtagcaatgctgatttgccggctggtacttttggctgatccaggacctgtaaacttcatggttcggctttttgtggtgattgtgatgtttgcctggtctatagttgcctccacagctttccttgctgatagccagcctccaaaccgcagagccctagctgtttatcctgttttcctgttttactttgtcatcagttggatgattctcacctttactcctcagtaaatcaggaatgggaaattaaaaaccagtgaattgaaagcacatctgaaagatgcaattcaccatggagctttgtctctggcccttatttgtctaattttggaggtatttgataactgagtaggtgaggagattaaaagggagccatatagcactgtcaccccttatttgaggaactgatgtttgaaaggctgttcttttctctcttaatgtcatttctttaaaaatacatgtgcatactacacacagtatataatgcctccttaaggcatgatggagtcaccgtggtccatttgggtgacaaccagtgacttgggaagcacatagatacatcttacaagttgaatagagttgataactattttcagttttgagaataccagttcaggtgcagctcttaaacacattgccttatgactattagaatatgcctctcttttcataaataaaaatacatggtctatatccattttcttttatttctctctcttaagcttaaaaaggcaatgagagaggttaggagtgggttcatacacggagaatgagaaaacatgcattaaccaatattcagattttgatcaggggaaattctacacttgttgcaaaaaaaaaaaaaaaaaaagcaaagggcctctaaagaatcagcctctttggtccctttgtgctgtcacctttttgccatgtttaacagcatcttggttggcactctagtcttaatcttgctccttaactttgaatatgcagtctaaaatgtcagtagtcaacatgtaattttcctttgaaattctgaatattccagtgctggaacttatccaaaaagaagacctcagaaacttagattggtagatctctagtgcatattatcatgtgggcaccttctcttagggtggaatgaggcagtctggatgcagcatagttaaaaggagctgtttaatattctctgtagtctggcctcttaactagaaagtaaagctaaatcagaagcctgtatttaaccatgtgaacagggagggatttagtgttctgatggctgattaatagaacagctagatacttagagcatgacgtgggatgggatgagtttacagctgctgccttttcatggtgagcttagcagttttctcattagatgtgtttttttgggttggggaatagcaatttattttattgattttagactttatcaagctaattagctcccctttagataagtacatgttgcacatgtgcacctacttgtaatctcagatatttatgcacacaagtgtgaaggtttttcagggagcagagcatctgggacaggctgattctgagctaaacagggctcctttaaggcaatatgaactgttgccttctataaattgcacattgaggaactctaatagacaaagattaggtgtcaggcagaaaacactcattgtaaatatactattagttgataaacataggactttcttattccccagtttttctttatcatataatttaaatatttattcattttgtatttaaagactacctacacatagatatatgattccaaagtcatactttctccatccccacattagccaagtgaatacagggccaaatgggttcttggaatgataataacaaagcattacaaagtgggtccccttggttccagccttgtccagagtttttggttatatatttctatttattacaatttaccttttaaattgtaaaataaacctttgtgtggacagagccaatgtttcaatcttgaatgagtaaagaaaatactttggaactgatcctcattttgaaattggttctaaattattatccatttccaatgtctgaaattctcttacttcctgctaaaactctctttctgccaaagttgtttcgtaatctgtctcaatgactataatgtaaaattaaagaagtaaccatgcttctcaagggggaattaaaagtgtttattgaattttactcaggctaattgtttggtcagaaattcctaaggccacagctttggggggttcgtgtagatgtacatggtgggtgggttataaatattgggacttaaggcagcttgttctatgtatttatctttgctcttgggtgacttagggaatgattttatttgatttaaccttctttctgtttgccccgagaatactcgccagtggcgcttgcagttgtagcatttaccccaagataactttgcctacgaaatatttcgcttttattattttcacatcattctagtatatggactttggaaacaaaagacattgttctatttatagcattcttttttttttttagtagcggtatttccatttacaaaatatagtaactcttgattactgaaaatgtcaaatcctagaaaacgtagcatgcctatacatgatgttaacatcattctcgaacagttgttggccgaagattcatttgatgaatccaatttttttgaaatagacaattctgatgttctctttagaaataactcagtttttatcttttttcacattgaaaatcagttagatttgcttaagcctcaaagagaatgtttatgtaaattagcgctggcaatttttttttttctaaacaggaaaagggttaaatgaaggttgataaaatggatgttcaattgtctttctgaaagtgagtggcttgaagggatgaataaatattttcttaatatattcaaaaaagtgcattgctttctgtgatggaagttaagacctaaatgtctggaagttgtaaccctcaacacagcttttcctgatttgctgcaaaggcacatagctgattatagaagtgaagacggcaaggacggggactccaacaaaggaaaccctgttgcaggatttgggaactttcatgcttcagatgaaattcaggcatgtgagcatcactgcagaatgtggtgcatcattgccatcatgagtaatcacttgctgctcctacttctgagaccaagactcttttgtcatattctttagcaataggacgggtaaagactggatttaattgctgttcagagtataaaaactcaattgattccaacatatctgaatgtgcagtaaagtcttaaaagtcaaccgttaatcattaagtcttttgcctctaaagtcttttgcctctgaagaggtttattacatgagttgattttcatattttcattttggtggggttttcctgttgttgggcaaggtggggtcacaggacatgggactagtaagcattttactgtttactatatttgtctttttataaacagtatctcccaaaatgtgattagaaggctaccaagcctgtatttggacatttaattgtgtgctttatataatgtaactactaacagtatttggactgcctgttcattcctggagacaaaaatgaaaatctgtcagttcaagttcttgggtaacatcaagtcattagaatttatctaaagcttatcatgatttgataagacatccattgcatgcagctgttttagctcagtgcaaaacactgaaattgtgattcttagactgtttctgagacatttggatggaaataaatgtataaatgttaattcatgtatataaattagaaacacttttctagattctgtaggcttttgttaaaaatagagaatttcttggggtttacttaggccacagaatggccaaataataataatgacaatgatattactaataataatagctaacctttatttggcacttactgtgtgccaggcactattctatttttttaagaatttttaaaataacagctttattgaaatacactttaccataaacttcacctttttattttttatttttatgagacagggactcacccaggctggagtgcagtggagcagtcatggcacactgtagcctcgacctccctgggctcaagcaatcctcccacttcagtgtcccgagtagttgggactacaggcatgcgtcactacacctaattggctaatttttgtagtttttgtagagatagggtttcgccatgttgcctaggctggtcttgaattcctgggctcaagcgatccacctgctttggcctcccaaaacagtgggattgcaggcgtgagccaccatgcctggctgaaattcaccttttaagatgtacaattcagtggtttttagtatattcacacacaaaattgcacaactatcactaacatctaattttagatcattttgtaacttcaccaagaaaccccaggtctgtcagcagtcagttccattcccccttcatcccagcctctggcaaccactaatctgctttctgtcactattgatttggccagacactattcttctgtgcttctcatgcatctcctgtaataccagtgctacaattctcattttatgtggaaaattgaggcactgagaggttaagtaaattgcccacggtcacacagtaatttgatttacaacagtaataacacattagatgagaacacagtaggacacaattttgaattccatttttatgtacctgaaatgaatacacccctcccccaaggtattttccctattgttagcctttgtaccctaggtacaaatataggtattttccctattgtgttatgtacctgaaatgaatacacccttcccccaaggtattttccctattgttagcctttgtaccctagaactgactggatgtagataacatttgttttcagagtaatggaacactgtatcagcagcatctgagaacataagaacagttggacattggaaagaggtttgttgccctcatccctccttgaacctcttttctctcccgcttccaccaccaccacacatatatacccctttttctcagtcttaagcatcaaacaatttctgcctctttctttttaattctcccagagggatggttaatgcatcacaatttaacttgtctattcaggtattaatagtcaagggatgcatctgtttgcttatagtaccagttatattcctaggaccttagagagcagtagtgtgagaatagaatgcctttctatttgggttaaactatgtgggaggaaaaagtaacagagtaaaggctttgccttaatgaagtcaagtgttctgcctggtgggaagtggccacacgctgcactgcgctgctcttgtttactctgttctttcagagcctttgtactttgccatcactgctagtaatttcttggtccttttcaatactccattttaatcttgatttttttctataaataataaatctgtgaaaaatctgtaaaaagatttgtgactattaaatgtgcaactaaaaacactggaaaaagaa

SEQ ID NO: 6626 - DNA, 1794 bp, Homo Sapiens
  NM_173842
atttctttataaaccacaactctgggcccgcaatggcagtccactgccttgctgcagtcacagaatggaaatctgcagaggcctccgcagtcacctaatcactctcctcctcttcctgttccattcagagacgatctgccgaccctctgggagaaaatccagcaagatgcaagccttcagaatctgggatgttaaccagaagaccttctatctgaggaacaaccaactagttgctggatacttgcaaggaccaaatgtcaatttagaagaaaagatagatgtggtacccattgagcctcatgctctgttcttgggaatccatggagggaagatgtgcctgtcctgtgtcaagtctggtgatgagaccagactccagctggaggcagttaacatcactgacctgagcgagaacagaaagcaggacaagcgcttcgccttcatccgctcagacagtggccccaccaccagttttgagtctgccgcctgccccggttggttcctctgcacagcgatggaagctgaccagcccgtcagcctcaccaatatgcctgacgaaggcgtcatggtcaccaaattctacttccaggaggacgagtagtactgcccaggcctgcctgttcccattcttgcatggcaaggactgcagggactgccagtccccctgccccagggctcccggctatgggggcactgaggaccagccattgaggggtggaccctcagaaggcgtcacaacaacctggtcacaggactctgcctcctcttcaactgaccagcctccatgctgcctccagaatggtctttctaatgtgtgaatcagagcacagcagcccctgcacaaagcccttccatgtcgcctctgcattcaggatcaaaccccgaccacctgcccaacctgctctcctcttgccactgcctcttcctccctcattccaccttcccatgccctggatccatcaggccacttgatgacccccaaccaagtggctcccacaccctgttttacaaaaaagaaaagaccagtccatgagggaggtttttaagggtttgtggaaaatgaaaattaggatttcatgatttttttttttcagtccccgtgaaggagagcccttcatttggagattatgttctttcggggagaggctgaggacttaaaatattcctgcatttgtgaaatgatggtgaaagtaagtggtagcttttcccttctttttcttctttttttgtgatgtcccaacttgtaaaaattaaaagttatggtactatgttagccccataattttttttttccttttaaaacacttccataatctggactcctctgtccaggcactgctgcccagcctccaagctccatctccactccagattttttacagctgcctgcagtactttacctcctatcagaagtttctcagctcccaaggctctgagcaaatgtggctcctgggggttctttcttcctctgctgaaggaataaattgctccttgacattgtagagcttctggcacttggagacttgtatgaaagatggctgtgcctctgcctgtctcccccaccgggctgggagctctgcagagcaggaaacatgactcgtatatgtctcaggtccctgcagggccaagcacctagcctcgctcttggcaggtactcagcgaatgaatgctgtatatgttgggtgcaaagttccctacttcctgtgacttcagctctgttttacaataaaatcttgaaaatgcctaaaaaaaaaaaaaaaaaaaaaaaaaaaaaaaaaaaaaaaaaaaaaaaaaaaa

SEQ ID NO: 6627 - DNA, 1973 bp, Homo Sapiens
  NM_173843
gggcagctccaccctgggagggactgtggcccaggtactgcccgggtgctactttatgggcagcagctcagttgagttagagtctggaagacctcagaagacctcctgtcctatgaggccctccccatggctttagggggattataaaactaatcatcaaagccaagaaggcaagagcaagcatgtaccgctgaaaacacaagataactgcataagtaatgactttcagtgcagattcatagctaacccataaactgctggggcaaaaatcatcttggaaggctctgaacctcagaaaggattcacaagacgatctgccgaccctctgggagaaaatccagcaagatgcaagccttcagaatctgggatgttaaccagaagaccttctatctgaggaacaaccaactagttgctggatacttgcaaggaccaaatgtcaatttagaagaaaagatagatgtggtacccattgagcctcatgctctgttcttgggaatccatggagggaagatgtgcctgtcctgtgtcaagtctggtgatgagaccagactccagctggaggcagttaacatcactgacctgagcgagaacagaaagcaggacaagcgcttcgccttcatccgctcagacagtggccccaccaccagttttgagtctgccgcctgccccggttggttcctctgcacagcgatggaagctgaccagcccgtcagcctcaccaatatgcctgacgaaggcgtcatggtcaccaaattctacttccaggaggacgagtagtactgcccaggcctgcctgttcccattcttgcatggcaaggactgcagggactgccagtccccctgccccagggctcccggctatgggggcactgaggaccagccattgaggggtggaccctcagaaggcgtcacaacaacctggtcacaggactctgcctcctcttcaactgaccagcctccatgctgcctccagaatggtctttctaatgtgtgaatcagagcacagcagcccctgcacaaagcccttccatgtcgcctctgcattcaggatcaaaccccgaccacctgcccaacctgctctcctcttgccactgcctcttcctccctcattccaccttcccatgccctggatccatcaggccacttgatgacccccaaccaagtggctcccacaccctgttttacaaaaaagaaaagaccagtccatgagggaggtttttaagggtttgtggaaaatgaaaattaggatttcatgatttttttttttcagtccccgtgaaggagagcccttcatttggagattatgttctttcggggagaggctgaggacttaaaatattcctgcatttgtgaaatgatggtgaaagtaagtggtagcttttcccttctttttcttctttttttgtgatgtcccaacttgtaaaaattaaaagttatggtactatgttagccccataattttttttttccttttaaaacacttccataatctggactcctctgtccaggcactgctgcccagcctccaagctccatctccactccagattttttacagctgcctgcagtactttacctcctatcagaagtttctcagctcccaaggctctgagcaaatgtggctcctgggggttctttcttcctctgctgaaggaataaattgctccttgacattgtagagcttctggcacttggagacttgtatgaaagatggctgtgcctctgcctgtctcccccaccgggctgggagctctgcagagcaggaaacatgactcgtatatgtctcaggtccctgcagggccaagcacctagcctcgctcttggcaggtactcagcgaatgaatgctgtatatgttgggtgcaaagttccctacttcctgtgacttcagctctgttttacaataaaatcttgaaaatgcctaaaaaaaaaaaaaaaaaaaaaaaaaaaaaaaaaaaaaaaaaaaaaaaaaaaa

SEQ ID NO: 6628 - DNA, 4869 bp, Homo Sapiens
  NM_173854
gcgtggaagcggagcggcggcctcgctgtaacgcagaagcgaaatgtagcgagccgggtgtcgcggctggacgctcgccttggctgggggtgtgggggggcacgccgggggccaaggaggactgtcgaggaggagtgatgagaagagggggtgccctgcaccccccgagaccacgggccacgctgccacttgccaggcgccccccttcctcccaggcgaggggcaggtgttccacactgattctcgtgactttaaggaccagggatttgaagaggtattagctcttcccaggaagggaggaagtttctggaagagaagggaaagacggcagacgctgcgctgggaccagcagagcctgaggagctgtgggaagctgacagagcccagccaaaggagcgggaaggagccgcagccccaggctggcactgtgttctgaaagatttgaactcaagctgctttttacggaagaggggccacttcagagggcaccccagaatttggttgagctcttctactctggatgccccctgctctgaggagcctgccactgagaaccaaagaagataagaggacagatactttttcttcaagcacagagctggtgggttggagtcaggcatctgcacccctagtggctgtctggtgaggaatttcttgtttcttcccagcttgcggcttcagtgcttgatggggctgcctgttggtggatcagtttttgcagtgcctggtaggagtggagagccgtgggaagaggtcctgcggcgcccaagcctgggttcaccccaagactaagttctttcccaagttagagaagaagagagaaagcaaaaagaagagaggaaagttctcccttcccctcctccgtgcctgtcatgtcctctaagccagagccgaaggacgtccaccaactgaacgggactggcccttctgcctctccctgctcttcagatggcccagggagagagcccttggctgggacctcagagttcctggggcctgatggggctggggtagaggtggtgattgagtctcgggccaacgccaagggggttcgggaggaggacgccctgctggagaacgggagccagagcaacgaaagtgacgacgtcagcacagaccgtggccctgcgccaccttccccgctcaaggagacctccttttccatcgggctgcaagtactgtttccattcctcctggcaggctttgggaccgtggctgctggcatggtgttggacatcgtgcagcactgggaagtcttccagaaggtgacagaggtcttcatcctagtgcctgcgctgctggggctcaaagggaacctggaaatgaccctggcatcaaggctttccactgcagccaacattggacacatggacacacccaaggagctctggcggatgatcactgggaacatggccctcatccaggtgcaggccacggtggtgggcttcctggcgtccatcgcagccgtcgtctttggctggatccctgatggccacttcagtattccgcacgccttcctgctctgtgctagcagcgtggccacagccttcattgcctccctggtactgggtatgatcatgattggagtcatcattggctctcgcaagattgggatcaacccagacaacgtggccacacccattgctgccagcctgggcgacctcatcaccttggcgctgctctcaggcatcagctggggactctacctggaactgaatcactggcgatacatctacccactggtgtgtgctttctttgtggccctgctgcctgtctgggtggtgctggcccgacgaagtccagccacaagggaggtgttgtactcgggctgggagcctgttatcattgccatggccatcagcagtgtgggaggcctcatcttggacaagactgtctcagaccccaactttgctgggatggctgtcttcacgcctgtgattaatggtgttgggggcaatctggtggcagtgcaggccagccgcatctccaccttcctgcacatgaatggaatgcccggagagaactctgagcaagctcctcgccgctgtcccagtccttgtaccaccttcttcagccctgatgtgaattctcgctcagcccgggtcctcttcctcctcgtggtcccaggacacctggtgttcctctacaccatcagctgtatgcagggcgggcacaccaccctcacactcatcttcatcatcttctatatgacagctgcactgctccaggtgctgattctcctgtacatcgcagactggatggtgcactggatgtggggccggggcctggacccggacaacttctccatcccatacttgactgctctgggggacctgcttggcactgggctcctagcactcagcttccatgttctctggctcataggggaccgagacacggatgtcggggactagcttggtcactcaacattttccccatccctctgcactttctatttgaaatttttcttttgttcccctgtccctcctccaccccacactcccacctctttctaggacttcactttgataccaaattctcattattttcaatgggaatttttatacattgagccaagtttgtatagcaagaatttgggaaacacagatggcctgagataagcagtacaagtaggtttttgagacaatcaccaagtgcagtttcatggtgggtgcctccaggtgatgtggactggagcaggggagttttgtctggaatctggggacatggggtttggctttagcaacctgtcttggccctaatgagaaaccctttgtaagtgggctctggatttttggttttgttttctttttatctgttttgttttatttttggttttggttgaacagagggacagaagaataagtaacactcccaaacacagacatacttttgtagaagtggaccaacttcaaagctctggacaggagacacctgctccaggcccctgtgatcccagttctgttctcttgccctctggacctaagcgttcccactcgcagaaagagtaaggtggactgacttttcaatttgtgcacatgcctcttgttcaatggcctggtcaacatcaacaacccctccctctgatcatttccagttgattgtcatatccaggaaaaaatggaacagtgcactcttctccctgttgacccatgtccacctattggttccccaaaatccacattctccctgggcccagatgactttgtctccctgggcccagattctttgtctctcttcaaccttcatctcaaattgtctctaagcactaccttccccagagcttgccaggttgggttttgagattagggtcaggtcatgggtatgtggagaatggtttggaggttgaggacaaccacaggtgtctcattgctgccatttctcctgaggacataatcacttggtcaccttggaccctgtcacttcctaaaattactcgttctgtcatgccatagaggtcagttttcctctttcttggcttctacccacaaacattcaccaatcatttattcgttcatttagcaaatatgcagcctccgcaagatgagctctcctgcagacaagcatggtctgaaacattctttgagcaatatttattgagtgcctactatgtgttaggtactgtgccaggcactgataagccagtggtaagggaaacacagctctaacctcacctcattctccaggttacaaaggccatgtgcccctttgaatctggcagagaaagtttcctcgttgtaagtatttgcatctacttcaagccagattcttctgcctctttctcctttccagacccctactctgtgcagtgctgaccacagctagagccaccgccccattgctcaaccagtatttatttccctaaacgacccttcctcacattcccttccctccacctctccttaccaagcacccaaaagaggatttagaactagcagggtggacatcatctggttgtttctacttttctctgcctagcacaaaattgggagaaaactggagcctccatccgcagtcacacgtgtacagatctggggatttggatgtaggctttttctaacttctctctcagaagcttctacagaaacccttccatctgtagcctcaagggcccacctccaagggaaggcttaggcaatgatcctgtttctaccaacactgcaccttatcccaggaacctgccctagacctccagagaccatattttctctccctccatttctacccagacctccaggcctccttctggaatcatagaaccgtagaattggaaggaattttagaggttttctagttggagttgtgtccaacagaattcattaacaccagcctgggcttgtttttcctcctccctctggacttttttcatcttttcctccacctcaaaaaatacttacacacagattcttcttgtacaggcatcaaaaccaactcctctgcccctaaggctgtgtccctgtggtctccagccacccctaccccagtcactcgccccttcctcatctctggaatttggccaggcagtcccagaagactctggagtgacctcctttgcctaaaaagcagacagataggcatgccccaggccctgagtgagcagaggaggactgtagggtgagagggaaagaaaatgaaggtgactttcatggaagtttcatttcttttccccgattgtaccaactgcatgtacttttggcctggctgcaaggagcaatattggtttactctcgtatccttaaaaagttacagaactgtgtcttaagagaattatttatagttactataactgaattgacaaatgtcaacttaactgataaattatatttggtaaaataaagaggacgtttatttagaaaaaaaaaaaaaaaa

SEQ ID NO: 6629 - DNA, 4058 bp, Homo Sapiens
  NM_173872
gccgcttctcttccccttccgtgggtcagggccggtccggtccggaacctgcagcccctttcccagtgttctagttcgcccgtgacccggaataatgagcaaggagggtgtggtgggttgaaagccatcctactttactcccgagttagagcatggattcagttttagtcttaagggggaagtgagattggagatttttatttttaattttgggcagaagcaggttgactctagggatctccagagcgagaggatttaacttcatgttgctcccgtgtttgaaggaggacaataaaagtcccaccgggcaaaattttcgtaacctctgcggtagaaaacgtcaggtatcttttaaatcgcgatagttttcgctgtgtcaggctttcttcggtggagctccgagggtagctaggttctaggtttgaaacagatgcagaatccaaaggcagcgcaaaaaacagccaccgattttgctatgtctctgagctgcgagataatcagacagctaaatggagtctgagcagctgttccatagaggctactatagaaacagctacaacagtataacaagtgcaagtagtgatgaggaacttttagatggagcaggtgttattatggactttcaaacatctgaagatgacaatttattagatggtgacactgcagttggaactcattatacaatgacaaatggaggcagcattaacagttctacacatttactggatcttttggatgaaccaattccaggtgttggtacatatgatgatttccatactattgattgggtgcgagaaaaatgtaaagacagagaaaggcatagacggatcaacagcaaaaagaaagaatcagcatgggaaatgacaaaaagtttgtatgatgcgtggtcaggatggctagtagtaacactaacaggattggcatcaggggcactggccggattaatagacattgctgccgattggatgactgacctaaaggagggcatttgccttagtgcgttgtggtacaaccacgaacagtgctgttggggatctaatgaaacaacatttgaagagagggataaatgtccacagtggaaaacatgggcagaattaatcataggtcaagcagagggtcctggttcttatatcatgaactacataatgtacatcttctgggccttgagttttgcctttcttgcagtttccctggtaaaggtatttgctccatatgcctgtggctctggaattccagagattaaaactattttaagtggattcatcatcagaggttacttgggaaaatggactttaatgattaaaaccatcacattagtcctggctgtggcatcaggtttgagtttaggaaaagaaggtcccctggtacatgttgcctgttgctgcggaaatatcttttcctacctctttccaaagtatagcacaaacgaagctaaaaaaagggaggtgctatcagctgcctcagctgcaggggtttctgtagcttttggtgcaccaattggaggagttctttttagcctggaagaggttagctattattttcctctcaaaactttatggagatcattttttgctgctttagtggctgcatttgttttgaggtccatcaatccatttggtaacagccgtctggtccttttttatgtggagtatcatacaccatggtacctttttgaactgtttccttttattcttctaggggtatttggagggctttggggagcctttttcattagggcaaatattgcctggtgtcgtcgacgcaagtccacgaaatttggaaagtatcccgttctggaagtcattattgttgcagccattactgctgtgatagccttccctaatccatacactaggctaaacaccagtgaactgatcaaagagctttttacagactgtggtcccctggaatcctcttctctttgtgactacagaaatgacatgaatgccagtaaaattgtcgatgacattcctgatcgtccagcaggcattggagtatattcagctatatggcagttatgcctggcactcatatttaaaatcataatgacagtattcacttttggcatcaaggttccatcaggcttgttcatccccagcatggccattggagcgatcgcaggaaggattgtggggattgcggtggagcagcttgcctactatcaccacgactggtttatctttaaggagtggtgtgaggtcggggctgattgcattacacctggcctttatgccatggttggtgctgctgcatgcttaggtggtgtgacaagaatgactgtctccctggtggttattgtttttgagcttactggaggcttggaatatattgttccccttatggctgcagtcatgaccagtaaatgggttggagatgcctttggcagggaaggcatttatgaagcacacatccgattaaatggataccctttcttggatgcaaaagaagaattcactcataccaccctggctgctgacgttatgagacctcgaaggaatgatcctcccttagctgtcctgacacaggacaatatgacagtggatgatatagaaaacatgattaatgaaaccagctacaatggatttcctgtcataatgtcaaaagaatctcagagattagtgggatttgccctcagaagagacctgacaattgcaatagaaagtgccaggaaaaaacaagaaggtatcgttggcagttctcgggtgtgttttgcacagcacaccccatctcttccagcagaaagtcctcggccattgaagcttcgaagcattcttgacatgagcccttttacagtgacagaccacaccccaatggagatcgtggtggatattttccgaaagctgggactgaggcagtgccttgtaactcacaatgggattgtcttggggatcatcacaaagaagaacatattagagcatctcgagcaactaaagcagcacgtcgaacccttggcgcctccttggcattataacaaaaaaagatatcctccggcatatggcccagacggcaaaccaagaccccgcttcaataatgttcaactgaatctcacagatgaggagagagaagaaacggaagaggaagtttatttgttgaatagcacaactctttaacctgagggagtcatctacttttttttcctcctttacaaaaaaagaaaggaaatataaaagccgggtttttgcaacatggtttgcaaataatgctggtggaatggaggagttgtttggggagggaaaggagagagaaggaaaggagtgaggtatttcccgtctaacagaaagcagcgtatcaactcctattgttctgcactggatgcattcagctgaggatgtgcctgatagtgcaggcttgcgcctcaacagagatgacagcagagtcctcgagcacctggcctgttgctccaacattgcaaagacacattatcagtccctatttctagagggattactttgaattgagccatctataaaactgcaaggtcttgcccttttttttaatcaaaactgttctgtttaattcatgaattgtatagttaagcattacctttctacattccagaagagcctttatttctctctctctctctctctctctctctctctctactgagctgtaacaaagcctctttaaatcggtgtatccttttgaagcagtcctttctcatattgagatgtactgtgattttactgaggtttcatcacaagaagggagtgtttcttgtgccattaaccatgtagtttgtaccatcactaaatgcttggaacagtacacatgcaccacaacaaaggctcatcaaacaggtaaagtctcgaaggaagcgagaacgaaatctctcattgtgtgccgtgtggctcaaaaccgaaaacaatgaagcttggttttaaaggataaagttttcttttttgttttcctctcagactttatggataatgtgaccgggtcttatgcaaattttctatttctaaaactactactatgatatacaagtgctgttgagcataattaaataaaatgctgctgctttgacagtaaagagaaggaagtattctgaaaaaaaa

SEQ ID NO: 6630 - DNA, 1645 bp, Homo Sapiens
  NM_174856
gcgggaaacatggcggcattgagcggagtccgctggctgacccgagcgctggtctccgccgggaaccctggggcatggagaggtctgagtacctcggccgcggcgcacgctgcatcgcggagccaggccgaggacgtgagggtggagggctcctttcccgtgaccatgcttccgggagacggtgtggggcctgagctgatgcacgccgtcaaggaggtgttcaaggctgccgctgtcccagtggagttccaggagcaccacctgagtgaggtgcagaatatggcatctgaggagaagctggagcaggtgctgagttccatgaaggagaacaaagtggccatcattggaaagattcataccccgatggagtataagggggagctagcctcctatgatatgcggctgaggcgtaagttggacttatttgccaacgtagtccatgtgaagtcacttcctgggtatatgactcggcacaacaatctagacctggtgatcattcgagagcagacagaaggggagtacagctctctggaacatgaggtgaggccccagaaactgggggagggcaaggatgaagatgggagagaggtggagctccttgtttcccttcccagtgtcacctagctgctgctttcttcttacccagagtgcaaggggtgtgattgagtgtttgaagattgtcacacgagccaagtctcagcggattgcaaagttcgcctttgactatgccaccaagaaggggcggggcaaggtcactgctgtccacaaggccaacatcatgaaacttggggatgggttgttcctgcagtgctgtgaggaagttgctgaactgtaccccaaaatcaaatttgagacaatgatcatagacaactgctgcatgcagctggtgcagaatccttaccagtttgatgtgcttgtgatgcccaatctctatgggaacattattgacaatctggctgctggcctggttgggggagctggtgtggtccctggtgagagctatagtgcagaatacgcagtctttgagacgggtgcccggcacccatttgcccaggcagtgggcaggaatatagccaatcccacggccatgctgctgtcggcttccaacatgctgcggcatcttaatcttgagtatcactccagcatgatcgcagatgcggtgaagaaggtgatcaaagttggcaaggtgcggactcgagacatgggcggctacagcaccacaaccgacttcatcaagtctgtcatcggtcacctgcagactaaagggagctagagccctttatttcttccaaccttgcaaggaccacactccccatacccttcagtgcagtgtaccagggaagagaccttgtgcctctaagcagtggaccatggtcaccttgctgggtagagcctaggttgtccttgggccggcttccttaggggacagactgttgggtggtgatggggattgttaggatggagcccaggccacatggatgatgatgattctcccccacaggttcgaacctctgacatgggtggctatgctacttgccatgacttcactgaggctgtcattgctgccttgccccacccataggccctgtccatacccatgtaaggtgttcaataaagaacatgaaccaaaaaaaaaaaaaaaaaa

SEQ ID NO: 6631 - DNA, 2326 bp, Homo Sapiens
  NM_174892
aaaggcggtctagatgtgcagaaggtgcaagccagagctcaggcagaacttccagagtgcatctgggatctgcatttgccactggttgcagatcaggcggacgaggagccgggaaggcagagccatgtggctgccccctgctctgctccttctcagcctctcaggctgtttctccatccaaggcccagagtctgtgagagccccagagcaggggtccctgacggttcaatgccactataagcaaggatgggagacctacattaagtggtggtgccgaggggtgcgctgggatacatgcaagatcctcattgaaaccagagggtcggagcaaggagagaagagtgaccgtgtgtccatcaaggacaatcagaaagaccgcacgttcactgtgaccatggaggggctcaggcgagatgacgcagatgtttactggtgtgggattgaaagaagaggacctgaccttgggactcaagtgaaagtgatcgttgacccagagggagcggcttccacaacagcaagctcacctaccaacagcaatatggcagtgttcatcggctcccacaagaggaaccactacatgctcctggtatttgtgaaggtgcccatcttgctcatcttggtcactgccatcctctggttgaaggggtctcagagggtccctgaggagccaggggaacagcctatctacatgaacttctccgaacctctgactaaagacatggccacttagagagatggatctgcagagccttcctgccctggccacgtttccagaagagactcgggctgtggaaggaacatctacgagtcctcgggatgcagtgactgagataggggccctgggcctccgccctggccttggagctggtgggcacctccctgttctgcacagctcagggacttagccaggtcctctcctgagccaccatcacctcctggggtgccagcacctgttctcttggtcaggagctgtagagatggagctcaagcactggacgactctgtccccactgctggaataactcgggcacagagcatgggaccaaagtacagaaagaggttgggggagacccccccagccctagacttccatcattccggagaccaactcaacaccgtctttgcctgagaacctgatatatccgtgtttttaaatttttttttttctagcaaagttgggttttaatgacttatgttcataggaaacctctctgatcccacacacaaggagggtgattctgggatgagttcctggttctagggcatgaggggctggatggaccctgtccccagggaggacatggctctgagtccacagggctgaggaggcaatgggaacctccctggcccggcccggtgcttgtcctccccctcccacctcttcctcctcctagctccccaagctccctgcctattcccccacctccgaggggctgcagcttgggagcctcctcagcatgacagcttgggtctcctccccaaaagagcctgtcaggcctcaagaaccacctccaggtggggagggcagtaacgaaaaccatcgcaggaaatggcaccctcccttttcggtgatgttgaaatcatgttactaatgaaaactgtcctagggaagtggttctgtctcctcacaggcttcacccacggcgatgaggcccttgaatgtggtcactttgtgctgtatggttgagggaccctcacaccaaagggaccttcccatgtgagatgtgctcccgcccccacctgcccacaagcaaacacaccacacatgttcggcatgttgccctttgaacacccatgaggacgcctccaacctgctcttggttctaatagggagtactgactgtcagcagtggataaaggagaggggaccctctggtccctagcatggcacccagagcctcccctcttcttgtccttcagccaaagagaaactttctctgactttgaactgaatttaggtctctggccaatgatgggcctgaaaattccataatggccagagaggagagttcgagcccggctaagatcccctgagtcattctgtgagggaccaagacccacagtccaccagccccagggccctacctcctggaatgctttcctggatccagcttcccgaagatccgaccagacccagggaggacggcaccgctccgcgggagggaaagccaaagcatggtgcttcaccagctggactcaggggcgaggggacatgggcgcttgtcaacgtgatgtcattcttttcccaccgtttcttcctgttgatattcaatgaatccgtcaatctctctggaaaaaaaaaaaaaaaaaaaaaaaaaaaaaaaaa

SEQ ID NO: 6632 - DNA, 946 bp, Homo Sapiens
  NM_174896
tcagtcttagacgactgcgtcgtgctatgaccggactttttcttgaaaggggatgacagcatgggaggcaatggctccacatgtaaacccgacactgaaagacaaggcactctctccacagcagccccaacaactagccctgcaccctgtctctctaaccaccacaacaaaaaacatttaatccttgccttttgtgctggggttctactgacactgctgctgatagcctttatcttcctcatcataaagagctacagaaaatatcgaagggagaggcttcccatttccccaggcccattgctgagatgggtccctcttctttctggcaccatggcagatcactccaagccccaggccccagatcctcactcagatcctccagccaagctttcatccatcccaggggaatcacttacctatgccagcacaactttcaaactctcagaagaaaagagcaatcacttggctgagaaccattctgcagactttgaccccattgtctatgctcaaattaaagtaacaaactaactcagcttttccaatgaggcttgaatccatttcctctcatctcagccctatcttcacacatcactttcacttttttacaaattttggaccaccacctgtgtgaaactgcagtcggagttgtttagatgtgatctggcaatgctatccagcatctttggagaccaatggtcagtcttttcctggccagaggaaagattgatggccctcccacttgaactgacagcctgtgagccccttgggggcatagactgccttccttggacccttccaaagtgtgtggtacggggctcagtgcacagagtattcacccagcatcatgaatcaacttgggaggagtcaaccaaatgaacaatctaccaaaaatttcaaataaagtcaaaccccccacaaaaaaaaaaaaaaaaaaaaaaaaaaaaaa

SEQ ID NO: 6633 - DNA, 2646 bp, Homo Sapiens
  NM_174900
agtttctcctttgttttacgtttgggaggaggtggcattggaaatagcagagtgcttcgcggtaacaggggttggagtgcaatggtgtgatctcagctcactgcaacccctgcctcccaggctccagcgatcctcccacctcagcctcctgaatagctgaccaccagcacactaggcaaacccaccccactcaccgcctcccttgggaattcagacctaaccatcgctgagctgaaacaaatgtactgaggctggagcctgtgtgaacagaacagaagaggccttcactctagtagtgctcacagtccagcaggtgtttgctgaagacagcttactcagatcactactgcctggaggtggttgatatatcctggtgtaaaccttcaagaagggcacaggcaggaaaacatgagccagcaactgaagaaacgggcaaagacaagacaccagaaaggcctgggtggaagagcccccagtggggctaagcccaggcaaggcaagtcaagccaagacctgcaggcggaaatagaacctgtcagcgcggtgtgggccttatgtgatggctatgtgtgctatgagcctggccctcaggctctcggaggggatgatttctcagactgttacatagaatgcgtcataaggggtgagttttctcaacccatcctggaagaggactcactttttgagtccttggaatacctaaagaaaggatcagaacaacagctttctcaaaaggttttcgaagcaagctcccttgaatgttctttggaatacatgaaaaaaggggtaaagaaagagcttccacaaaagatagttggagagaattcgcttgagtattctgagtacatgacaggcaagaagcttccgcctggaggaatacctggcattgacctatcagatcctaaacagctcgcagaatttgctagaaagaagccccccataaataaagaatatgacagtctgagcgcaatcgcttgtcctcagagtggatgcactaggaagttgaggaatagagctgccctgagaaagcatctcctcattcatggtccccgagaccacgtctgtgcggaatgtgggaaagcgttcgttgagagctcaaaactaaagagacatttcctggttcatactggagagaagccgtttcggtgcacttttgaagggtgcggaaagcgcttctctctggactttaatttgcgtacgcacgtgcgcatccacacgggggagaaacgtttcgtgtgtccctttcaaggctgcaacaggaggtttattcagtcaaataacctgaaagcccacatcctaacgcatgcaaatacgaacaagaatgaacaagagggaaagtagtcctccaacaggatgaagcagattaacagaagagtgatcagtgacaaacatgcctcattgattattgtttctaggaaggaatttctaaatcaatattgcaaccccaaaagcggttataatttggtgttactaagatgctcctacactttgtgataccgttttaaggacatggtgcatttttttttcttttatttgttttatttagaactttttttatttgttttatttagaactttgtgtgttcttaaagtgtgcttccaacaggaaggtcagtgataaattttcaaaagcataaccttcaatatattatctgttggattattggatataagacttattttcatgtactataaatatgaaaataactttgatttttaattgtgtagtttccatttcttagcttttgccttttaaatttatacttcagccaggcatagtgactgatgcctgtaatcccaacactttgttgggaggccaaagcaggaggatagcttgaggccaggagttccagaccagcctgggcaacatagtgagatcctgtctctacaaaaaaaattgtttttatttgtatttatatatttttatttttgtttttgttggtaggcgtctcgctctgtcacccaggctggagtctagtgtcgtgatcttggctcactgcaacctccacctcccgggttcaagtgattctctggcctcagcctcccaagtagctgggactacaggtgtgtgtcaccacgcccggctaatttttgtatttttagtagagatggggtttcaccatgttggccaggctagtctcaaactcctgacctccagtgatctgcccacctcggcctcccaaagtgctgggattacaggtgtgagccactgtgcctggccccccacaacatgtttaaacttagctaggcctggttgcatacgcctgtgttcccagctactcaggaggctgaagcaggaggatagcttgagcccaggagtttgaggctacagtgagctgtgattgcaccactgtactccagactggataacagcaagagcccatcttttaaaaaaagtaaaaattaaaaatatacttcatggttcatgtcatagccctagagaatgaaaaatttgcagtagatagtcaataaatgaatcagtagttaaatattccttaaagtcaactgtatttcattgtgatttttgttttctttttatcattgtatcaaactatatggaaatcatatggttagatgtgattatttgataatgttagtccatttgaatccattttagatatttcacaattaaagaatatgaaacttc

SEQ ID NO: 6634 - DNA, 8421 bp, Homo Sapiens
  NM_174908
ggaaagactatgttttaggtgacccgtgtggcctttttgttgaggcctttaggatacaaggcccccacctaaagacgcgaccctcccgtaggaggggggcagggcccgggggcgggagcacagcggggccccagcctcaggcggcgcgtcactgagcacaaaggagacaacagcgaggcggcagcgggcgctgatcttcgctcgccagccactcgcaattgcggttacagacctgcagctccccctcccccagccggcccgcccgcctttctgtctcctctctccctccgtactggacggccccggtccatttccgggctccggatatttggtatcgattggggccggggacgcggagcaggtggccgcggcggggcagctgggccgccagcttggtgcctcggggaccgtctcccgctgctttggtcaccagcccctgcccgcccgacccgctccgttctccggcctgcgagccctgccggccggactttgcgccgcgtccggcgctgctgctgcgctcggggccccgctcggcgccggcggtgaccgggaagcccgcgttaaaggggcaaccgggaccctggcccggtatggctgaagtcagcatcgaccagtccaagctgcctggagtcaaggaagtatgccgagattttgctgtcctggaggaccacaccctggctcacagcctgcaggaacaagagattgagcatcatttggcatcgaacgttcagcggaaccgtttggtccagcatgatctccaggtggctaagcagctccaagaggaagatctgaaagcgcaggcccagctccagaagcgctacaaagaccttgaacaacaagactgtgaaattgctcaggaaattcaggagaagctggctattgaggcagagagacgacgcattcaggagaagaaggatgaggacatagctcgccttttgcaagaaaaggagttacaggaagagaaaaagagaaagaaacactttccagagttccctgcaacccgtgcttatgcagatagttactattatgaagatggaggaatgaagccaagagtgatgaaagaagctgtatctactccatcacgaatggcccacagggatcaggaatggtatgatgctgaaattgccagaaaactgcaagaagaagaacttttggctacccaggtggacatgagagccgctcaagtagctcaagatgaagaaatcgctcgacttctaatggctgaagaaaagaaagcttacaaaaaagccaaggagcgggagaaatcatctttggacaaaagaaagcaagaccccgagtggaagccaaaaacagctaaagcagcaaattccaagtcaaaagagagtgatgaacctcaccattctaagaatgaaaggccagcacggccaccaccacctatcatgacagatggtgaagatgcggattacactcattttacaaaccagcagagttccacacggcatttctcaaaatcagagtcctctcataaaggttttcattacaaacattaaaaacctaggaatctgccttgaaaatggactcactatagcaaatattactgggtgatacagaatgaattctacacttactttttttctcctgtgtttgcattcctgggatttatcctcaagtgcatttctgaccataagtaattttaattcatttcaaatgttttggttattcatgatcacttgggcagtataagaaaatgtagcttctgaatattggccacctctatgctgcatatacttcttgggatatagtatctaagacctttgtaaactgccattttgttaggtatggagtttggtatctagggagtaggccttatttagcaattcaaattttatggagatgaatgatcaaagtgaaacaatgtttggatgcaacgcagaataaaagaatataagaaatagctttttgttgcattaatgtatgatattttgaaggacagagcctttgctttttgtattctttaagaaaagcacaaccataaagtattttaaaaaaagaaacacttggagcaattgaaatatgttattctgactagatggactgtagaggttttgcatttctcagccctcctggggagattggcctagatagcattctttaacacttcctctgcttttgcctcagtagcaaggctttcctaagctcctgggcaatggaacatttattagtatttattgacaaaaatttagttctctgaaattttaactcatatatatgaaaaactttgtattccatctcttctttttcatttacttgtagagccaaggaaatggaattgaaagatgattgcataagtaatgatgccatccttctctctggctgtagactgaggcttttctcttgcttcaagtcagagcagtatttgttgataacctctcaataatgtttggtttacatgccagtaattaaattaattcaacatgaagttgaatttgatgaagtggtcatctatccaagtatttggtttttgttttgttttgttttgttttttgagttggagtctcgccctgtcacacaggctggagtgcagtggtgcaatcttggctcactgcaacctccgccacctgggctggagcaattcccctgcctcagcctcccaagtagctggaattacaggcatgtgtcaccacacccggctaatttttgtatttttagtaaagagcgggtttcaccatgttggccaggctggtctcgaacccctgacctcaagtgatccacctgccttggcctcccaaggtgctgggattacaggcttaagccaccatgtccagccagccaagtatttggttttaaacatttgtattcctttgtgcaagggattgtattcctctgtacaagacctttaagcacctcttcaagaaatttagtctttgtgtagctgctaaccttactgcaatatttattttcccttattttcccatactacttagttgacaaatggcaatcaagctcacttgttctccctctctctgtctcccccccatgtacacatatatatatcccttcagcttgacttgctattatttttcattgtataaatatgaaattcttggcatttcaatatggcatttgtttagggaaaaaatatgtaggtcactagagaaaaatgttaatttttttcccactgtgaattgccttctgtttgccttatcttttcagatagtctttaaagttgggcaatattcaggcagctatttagaacagtttctcagagtggatttgggtctctcatttgagaaagatttgtagtttcaatgaagtttgtatattataggaatttaagtaaaatcatctgagttaagttttgggcaaatgttaatcagaaagataatctacatccctactttatgtagtcattttggagaaatggaggaaaaggaaaataacaggactttttatagctgtgataaaatgggtaaagaaaaacctccatttaaataaggaaggggagacaaaatggaaggtcctggccttaagtcaaattccagatagtgctttcaatatccaaagcttaggccttgtttacttatagtaatgctatatttttctttatctgccctgtgatttcgcttcgtgtccttcaaagtttttttattgtaattttaaaggaaaaaaacaatgtatttttatttgataactaggcaaaatcatttgccattttttatttcataaatatttatttttctatctcatacaatgatcagttttactttaaaaattctgcatttctcttgcctctcatgtacttcatccagttatttattattgtaaaatgttaactggagatactgcattcaaaaaaaagtcggaccacttaacacttaccaggaatgttagtgtttcagctgttttagtaagtgaccaagtaagctatcaccttgtgatagctaattcaacatctttattgaaaatttgttactttttttaaaggtttttaaaagattacaattttaaaatattttatgtttattttatttttgtgtaaagcaaacacttttaaaataatatcagagtaattattaccctatgaataaggagatagaaatgaaattcagccagttaaatcctcatactctttctcattcaaataatataataatgtttgagactatagaagcaactcaactgtattttaatgaactgccagacacttttcactgtgttctctgctttttactttgtcatttttatataaatgtgaaagcattttgttgttgttgttgttgttcctgctgctagaacacatgcagtttaatttttaggcccacagtgtattatgctttaatgttgtgatgtaaactaatacttctggcctgggaaaacctttctgtttctgtatctttgtcctttggaggccaggcctcattaacaccagtattgttgaataagcacaatatatgacggagccttatcataaggctgcttgacatagacacccactctcctccacattttataaatcattgtttggaagtaaagttagataagagtcaaattaaatgttttgacttgaaaaatatttgacttttgcgttcaaaccactgttagacgtaagtattttattagacataagtattttattttgggactagacagttgctttacatgtatttaagggaacattgtgattttcagaaagtggctttacatactattgaattgctatttcccaagttactttacaaccagcagcagcataccaataaattacaaaagcagaaaatgaaaattaaccctaggtgttctgatgatagagaaatagctaaattagaaaagaaagatatggatagatgcttttaggaggaaaacctttttagaatggcaatgaccacttggatctaggtcaacatattccaaaatgtgtgaccttgggctttgtgtttactgaactcactctagaaaattctggacctgattcattaaccccgcttttcttctctaatgtgtcctgaagctgagctagatgatgagtaaattctttgctgactgttgctcatcactttctctcaaagttagaacttttcagtataaaaataattagcttttaactgattattaattttctttaatagtttctgtcaaaacttgtctaaaatttgtgttgtgccaaattggaaatacccactataatatggtgcattcagtttactccacaagtggttaacattttaagtcctagattttttatgtcttgcctttgtataagcatcgctttggggaataccaagatgattcattattcagtgattattttcttgaaagataactatgatgattggctgtaaaatcttcaccctaataaaggagtgagatctctgtgtaaacagctttctgaaggactgataatagaatagaacttgcagccaaaggctttttcccttttgagaagacggtatttgtgtaaggagtgctaaggtagacttcattgtacatagagtgccatattctgttgaaacgatcataacaaaatcaaaacctcatgcttcagcaaaaaggaaaaaagatttttaaattactttgtctattacttactgctcatagagaagtgactatataaaatggtccaattttctcatttctggtggtgcctgtgagtcttaaagccatatctgcttatcttactgttgatagaatactttttttctttttagcccatgataagtaatatgggcaggtagaagcaaactggagactgtcctgttaatgctgcatggggcacaatgtctttcaaattattggtggaagaatctcttttatccatggcgagaggtaagaatattaaagagtcaggatattgttgctcctggtatttaacaactgtcattagaaatgctgaaatttaattgtagagaagtcaagaaagaaagagtaaactgagaaaatcttactactacagagtcacttttacaatgagacctgcactttatgccagcactgtttgtgaggagcagtactgccttaaattagtttgactctgactgatgtcagtgtacgttacttcctttatgtgactgacagtcagctttccattgagatataacattcacagatgatccccaagtatccttgtcatcagaagctttggaccttttctgccactgacttgtggctgatctgtaacacaataaatacataattttatttcatgttgtctgtccacctctgaataagcagtggcatgaccaaaaagactggtagaaggagagaatttcttggccaaatccttcataccaggtaccacttcttgagtaactgagagttgactgtcttctatggtgactacatagaagatatttccaaaggttctgttatgcagtgaagacattcagattatttgtaagaatttcaccaacacccttgtgtattgaaatgcttaaccattaacagggaaaaaaaaggagaaaaccgaacaaaacagagacatttacttgaaatgggaggtttgctaatgtgaagagtgtttctgttttattacttataagagaaaagcaggaaaacttttgctttgataagaaagacaccagagtggtgattctgtttgatgccacaggctaacacaatcgtgtaatcatgttgagttgtagaaatatatggccctaaaaaccattctctttcccttatatatataaatatgtgaacactgcctagtaacattttaatagatttaagatgcatttgtacattctcagcaaactagaagaaaatgttttttctctttttgagttaacttcatagcatagagaaccagcactgtgcaggtttcagcatttcagataagggcataattaattgtgtaacttaatgccctgttattcattgctgaggttcatataaagaatagaaaaattgaaagatgggtttgggcgacattttcttcccaaaagatcaagtaaggagtaagaacaagtaagggaagacagctaagagaacatactatgacatatcatagaattgggatacatttttgttgcactggatttcaggctatactgctaaaataatttctacctgttaaattttgtgagagggtttttgacatcagaatttttgtatttctggtcaaattggtcttggaaatccctatggtctctaatttcagctcttgctgtaaactgcaagccaaatgctctttctcagaaagagctatatttttctcttcttacaggcaacccaatatttatttcataaagtgttataaatattgagaagatacactggggagatagcatataaaaatgatgctccaaaatgagaattctatatggggctttccctaagaagaatccatcccagcacatattttgaaaaggtgctgaattaaaaagtacaagagtttgctcatataaatcaagttgcccaggaaacctgaggtgatgctatcatttgtctcataatttagaaacgtgatctcttgagagagagactacgcattgcctgggcactttcagattccttaggaagtgcccctttgatatttggaatgtggatatatttataaaacaaatggattgttattccaaatccacatggatttataaccaagccccagaagaataggcagctttgaaatagctagttcgtggaattgaacagaaccttgatggaatgcagttgcctgtgtgaggacagaaaacaaagaggctgcctcagaccacatgcctatctagagattaagtgaatttgtgagggacattttgtggatgccttaaagatgaccagtggtgggttctgatgggaatatatacactcatctggactaggccaatggaagcagtctctttcagttcacctccgtacagcacaagttgttcctgctcatgacctcattgaggaaaatgagaattgtggtgctggtgactttcatgtgtcttgggaggttgaggtgttcaacatcgttaaggcactcccaaaacgcaaacctccttttttaaatgccaattgtacatctacattaattcatctatgcaaacttgtgttttcatggtttgttttttacactatatttctcattaggttctttaaacatcaggtttaatattgatattatgaataatttttaaaccaaagtattctataagtctgtgtgctttgttttcctggatggtttgaccaaggtaaacatcagtcttgtccttctctcttaataaagtcatccatttgttaagtcagtggtctctgtctcatgtttttgttttgtttctttacagcattcaaggacagggaaacttacgagagtcttattataattattattatttacaaaatgaccctaataggtctgtttagtaacagtgaaattttttcttactccatttccatacactttctgtaaatatgtataacatgataatgatgcctggtgtattgaaatcctcaataaatactgccaagtgtggatcagttgga

SEQ ID NO: 6635 - DNA, 4608 bp, Homo Sapiens
  NM_174909
gtcttggtaggcggtgccgtgacaagcccaaccggacggctggagagggcgagaagggcagacgggacatgcagcctcttccgcctgagccccggaagggtgatgtggctgcggcatcgccggcctcgctatgtctgccattttcaattttcagagtctattgactgtaatcttgctgcttatatgtacctgtgcttatattcgatccttggcacccagcctcctggacagaaataaaactggattgttgggtatattttggaagtgtgccagaattggtgaacggaagagtccttatgttgcagtatgctgtatagtaatggccttcagcatcctcttcatacagtagctggggaaaatgccagaatgtagttgccatcagatttgattgtgaacaaggactgactgcagaaaataatggaaaggatgtttaactcttttatctccgaacattgaatgagataaatttccagatgctgttctctattttaatgttattggaccaatgttctgtataaacaattaagatgtaaccatttaatagtctgtaacaatcaacctcagtactgtcactacaatattacattctgcaaatgttattctgttgtatcagatacaaaattttagtgaggtatctctaaggcacatagtagaaaacaaaattggttaattactcaagttcctttcactgtgatttggaaatgatttaatctttatagaatgagaaccttttttggactagcttttttattaaaatggctcaatttgtgttgataaggattgcattaatatttaatagtgcttgcttttcctctgggcacaccattttgatcattaaccagagtacctctactcttagcaaactctagtttatgacaagtatttaaaatatttaaaacaagcttatgcagttcttaaggacgaaggtaaatgagatgtaacttaaaaatagtattgggaaaatgttgatagttaacattagtggatttagactagccaaatgacatagtaggctctgaaacatcttgtcaagtatatgtattttgtgcatgaatttttgctggaaagctgtctttctctgaaaaacacaacgttcttagaatgaaaagaacaattataaaataattatcctatatgtgtttttcattctttttagtgtcatggcttcaaaaatgaaacatttattttaattgccgtaaaggaactgtatttttgttttgttttttaacacagcactttaaatccagtttgtgttttgtcaacttgaactggaatctcttttgttactttggaggtgataaatagttttcaaatctgctgatttgtatactgtggcacaagtatctttgaactttgatagtgaaaggagaccttcaacaatttttagtctaggcgagaggaatattaggaatgtgacttctaaattttacaatagagcagttattttaaggtcatggttaacatttcttaaggttcaactaaaattcagttaaaatttcagagctacgaggaacttaaatcttagctaaaaattacctgttgtagatagtattaattagattgtttgcagctattaattcatcataaagataaaatgaagaaactctccctttttttaaacaaaaaaaattatttctagattaataggctagtagttatttctgcagaaacaacgtatggaactgaaagccacctatttttattttagactaatttaaaccacttggaatggattctaggaaacatcttaagcttgtgtgttgcctgtggtggttttttgtttgggggtgttttttggttttggtttgattttctgtattttgttatctggggattttttgtttgtttgttttggtttggttttggttttatatttttggcatgtctatggcagttaaaagtggtatattttgctttagatagggaatcaggttataatcattgttcttcctctaaactgcctcttgggctttacatcaggtcaaggatttttagggtttctcaaaaataggattcttgtcagtgtatgcatgctgagtaagtcacctttctggctctaatttctgggtggccatctgttgtccagctctgctgccaactggactttccgaaagccatgtcaactaattttttatatgctaagacaaatcgaatatgaaaagaggaagaatattctagatattctaagacatttcttaatttggcatctcagaggaggtaggtggaaagtaaaggaagagataattttgggggaaaatttgtggaaacatacaaaacgttttgctttgtatagatgctaaacagagtgggaggcagcatatttgtaacaacaaccattctgaccttttgaaacacaagcttttggagaagtcagggagagacacagtatgaataaaagcaattaacattttctttaatgtatatttttcaaagaggaccacggaatcctgttctctaacccaaggggcagtgtaggtggttttaagcccacagaatattgagatatttctcttgtggttttggtggggtggtgggatgcagaaggttattaaagatcaatttaagcatcagatagactatcccttttatttttttaacttttaggttcaggggtacatgtgcaggttgttatataggtaaactcatgtcaagtggttttgttgtacagattattttgtcacccaggtgctaagcctagtacccagtagttattttccctgctcttctccctcctcccaccctccaccctcaagtaggccccagtgtctgttgttcctttctttgtgtccttgagttctcatcatttagctcctacttctaaatgagaacatgtatttggttttctgttctgtgttagtttgctaaggataatggcctccagctcagatggaatatctctatcatatagacctgttgttacagggcaggatcggatgatggacactgaagtcctcagcttgctaagttcagttgctctccctagcctccttttggcttcagagtcttttgattccatctatcctggtattttttgtgtgctgatgtttagttctggattggcttcagctgtgctaataggaagggcgttgtcttttcaagcaatcttaaaaggtggtcaatcaaaaggccagagtctgaatcccttctgtggcttaaataatttgaggatcaagtccagtgtcttgttaatccctgttctactgtgccagacactatcttgaatgcttttatatgttcaggttcaaaatcgctctttcataccaggggatgatagtaacgtgtaacttgcaatagattccttcatcttagtaataagatgatcagtctagttaggacaaaatagagattgaataaattaacttttccaagtttacagagtaaaaatgagcagatctctgcctggttttgtgaaaaagagttagcactggtaaatagaatatttctactcctacaccattctttcagtatatcatcactgaagacaggaagataggcacacagattcttcctcgtagtaattcatagtgcactaggtgaaagagatgaagtatgtattaaaagtacaatgtgatggcatttattattcagataatcccaggattctagaagaaaataaagaagagtgacagttcagttagggtgtgaacttccagaggagcactgcttaagctgaacttgagagcattgtgcaaaagcacagtagtctgttaagaactagaaataacctagcttgtgccacttcgggagtattaagacataagcctagaaaggtaggcaaaggttagatcttagactgtcttgtatttttctcattcctgttgattacctacctcaaaattgaatatgtttttcctcctgcctaacacaaaactactcaagggcagaaatttaaattcttccttggtgtatgtgcaaagaaggttgaatatattcatgcctaccttattttggactaggaatacagtagtatactttccgaagacttgcctgaatagtatataaggtggaggcaactgactagttaggtcagtatttttagaaactcttaatagctcatactcttgataccaaaagcagccctgattgttaaagcacacacctgcacaagaagcagtgatggttgcatttacatttcctgggtgcacaaaaaaaaattctcaaaaagcaaggacttacgctttttgcaaagcctttgagaagttactggatcataggaagcttataacaagaatggaagattcttaaataactcactttctttggtatccagtaacagtagatgttcaaaatatgtagctgattaataccagcattgtgaacgctgtacaaccttgtggttattactaagcaagttactactagcttctgaaaagtagcttcataattaatgttatttatacactgccttccatgacttttactttgccctaagctaatctccaaaatctgaaatgctactccaatatcagaaaaaaagggggaggtggaattatatttcctgtgattttaagagtacagagaatcatgcacatctctgattagttcatatatgtctagtgtgtaataaaagtcaagatgaactctcaaaaaaaaaaaaaaaaaaaaaaa

SEQ ID NO: 6636 - DNA, 5503 bp, Homo Sapiens
  NM_174911
aaatgccacgggctgcgctcccgcccgggagcccggagccggatctacaatcccgtccctccagctccggtgcttgttgctcgcccggcccaagcgggagctgttgccgccaggctgcgaggctgccgtcctctcctcctcgcgccccacctcccccgagagctggctgaggaggggcagcagccccagctggcgggaggaagcgcggtgtgaacagggattgccccccgccttcaagtatcggggcgctacgcagccgcgggggaaagacatgcccctagtctgcccgctgcgctgccctctgcccagcctcgctgccgcccgcgccgggagaggagggactgccgagcctacaccttcaaactcgccctagaagtctcggggcgcggcagggagcccttccccaggccccacggccttcacctctccgcgggtagcctcagcccctgtccggggacctgtgcaaatgaccctggagttggtttcgctttctccccttgcggcggtgtgaacgtgtgtccgcagcgtgatgggcaaccaggtggagaaattgacccacctaagttacaaggaagttcccacggccgacccgactggcgtggaccgggacgacgggccccgcattggggtctcctacattttctccaatgacgatgaggacgtggagccgcagccgccgcctcaggggccagatggcggcggcttgcccgacggtggggacgggccgccgccgccccagccgcagccctacgatccgcggctgcacgaggtggaatgctccgtgttctaccgggacgaatgcatctaccagaagagcttcgcgccgggctcggcggcgctgagtacctacacgcccgagaacctgctcaacaagtgcaagccgggcgatctggtggagttcgtgtcgcaggctcagtacccgcactgggccgtatatgtgggtaacttccaggtggtgcacctgcaccggctggaggtgattaacagcttcctgactgacgccagccagggccgtcgcggccgcgtggtcaacgatctgtaccgctacaagccgctaagctccagcgccgtggtgcgcaacgcgctggcgcacgtgggtgccaaggagcgcgagctgagctggcgcaactcggagagtttcgccgcctggtgccgctacggcaagcgcgagttcaagatcggcggcgagctgcgcatcggcaagcagccctaccggctgcagattcagctgtcggcgcagcgcagccacacgctcgagttccagagtctagaggacctgatcatggagaagcgacgcaacgaccagatcgggcgcgcggccgtgctgcaggagctcgccacgcacctgcacccggcggagccggaggagggcgacagcaacgtggcgcggactacgccgcctcccgggcgcccccctgcgcccagctccgaggaggaggacggagaggcagtggcacactgatgggcgagctgagcgcagagctgcgaaggggaactgtttgcagtagcagccgctgctccctttctccctctcttcctccctcttttgccactgtctgggccccatctgggattcctgggccctttggaaaagagttggtgaaatgcgcagccggctgtggacgggggaggaggaaggggacagagggagcaggtaggaaacactttagttgggggtggggggcgtctccctctggccccctgtctgtcttcctctccgcggtggagcaaactgtggacttgcctggcacttaaaccttggtagatctgggtttataatcggccattcttaagcacgtggggttgggggaaagttcggagtacccattcctgccgttgcttcctatcctgggcttggaagaatcctggtagaaaggccagagtgggtttgtggagtcgccactgcgggaccagcacgaaagctgcttgtctgctttggcggagctgagctgtgtatgggatccaggaggctggggtgatttattttatgggattcctggagcgcagggctggtgaatccatgacaaggtccgggagcagcagaccaaaaccacagcagcctcctattaagtgtaacaaatagttaagcaaactcgggctacaaacaaagactttgctacctccctcctccacaacccccaagtaattagccttctggagctggctcttagctgaggctcctgctacctcctgctccacccgccccttcctaggttacaagtaaatcattgtcaagggccagccaggggaaggtttcaattaaggttctgttctgctgcctttgtttctcccctgctgttgtaggcacttacagctgcgttgttatgaaaggagggaatagccctttgtgtctttgatctaattaaacctgcttggctgtgtttatccgcagggcaggtcacagatagggttggctgtgccactccataaagtatctattgtggaagcagccaaaaagggctgctgtggcaggaattggttaatttctccttccacttcccttcctgaatagtgaagggagcccttttaaaacaaggctttggtggtaatcctgtgatttttttttctcccccatcccctcactggcccatccctctcaccctcacttttgttctgctggtgggtaaaatcttaggctgaacacatatttcaatggtaagatacttattttgctatccacacttgatgcaattgaattcaaggtgcaaagtcttgtactgaagcagtctccttgttgcttggagaacacctccttcagagccctttgttaaataagaggggcgacgttgatcatagatgccacctggttagcaccgaatctgactttggtgacagtcctaaagcacagttggtgattgtgagatctgttagcggcaggctgagcagatactacttggttttgcttggtatgagatactactgtttgcttagtatgagattttttccagcctgtctcttaaactcctgtgacatcttcaatgatatgtgccctcagttgcagcatagcttctctgctgcctattgccattgctgtctcaaaagttgagtgaattttgaggcgtctttttttttttttcctctcttgggagtcgttgtaaactactgtgtacaagtcattttgtgatatgattctgaacagttggaatagaatcatagttaagtggtacagccatggctatcgtcaggcctgttgcctggagatctctaagttaaggcaacaagacttaaagaattttctaatacacttgtttcacacatggacgttgaggccatagtctttaaaagcttggacctttgtagcacctcaacatgaaagggcattagctatgtttcctgtttttacagtgatcaccaaacagatcttgccactttgattgttaaaaatgaaccacattctagccctggtctgggactttggagggagatgaatttcttgttggaaatgtaaatctagtgtccatatttaatactctcacagctttgtgtttattctctttgctcatggaatagcagaacaagataaacatgggttaagacatttaggagaacctgctgtatctaacccagttggattttctttcatgcttaacacagtagtgaaaatagaaggtaggccgggcacagtggctcatgcctgtaatcccagcactttgggaggctgaggcaggtagatcacctgaagttaggagttcgagaccagcctggccaacatggcgaaaccctgtctctaccacaaatacagaaaattagctgggcgtggtggcaggcgcctgtaatgcctgctacttgggagcctgaggcagaagaattgcttgaagctgggaagcagaggttgcagtgagccgagatcgcaccactgcactccagcctgggcagcagagcaagtagtaataaccaccgtgtagacaagtgggagggaagaatagaatggcactgtccagctctgggctagccagatcaactcccccacccgtcttcttcctctgtcccagaatggaaaatgatgtatggtcagtcacgctgaagtatagcagcgactgtgttaagagagagcagtgactctctcttctagagaagaggttttcaataacagggcttggaaatgaactagaataggaaatagatcttttcagatgctgctttcccatgtaatacaagcgtttctacagggtaccagaggtgtgaaatatgtgacacttaagaacagtgatttttattgggaattttcttagggttattacacttaaagcaacaaccaactagtaacagctccaggaaaggggaatgaatcaactcttggttctttcctgaagacggcagtgttgtggataagtgagtttttaatgccctggcagtggctacatttgacactttagaaaaaataaacatatttaataatttttgtttctccttaggaataagactgtagaactgttttgtactgtgaattacggatgctctttgaaggaaagaaatatcgattctaatgttcttcagaagttctggcagggataagcaggacatcgactggaacgtatgctaaatgaaagcagacaaatttctattttcttacctgagcaaatattttattgaaactgcttatgtatgtcaaaggagcccacaacttcagctacacaactttttgtattgaaagaactcatactttttgtagcttttatttcacatttaatttaaagtgacttttagcactaaaatgcctagaagattttactccagacctataaggaaatgtttagtttttatgaaaaatgacaagtcgatggttaaacttctcatgtctttggtgctttggccctaatagcactggacaacaccacgaccacatggaaacatatttttggaagcaaaactttaattttatataacgtatgctatggagagctaagacaatttaaggactacttgttttctattttttttcttaataaaatggaatccactgtgttgaagactcttgatatcatgtgcttgtctaaccattttttgttttataaattagaataaaatatagttgtgataatggtcatcgaatggatttgtttggaaagctacatcttatttgtgaaatgttttttaaatcagagtaactatcaactgattcagctttttgttgttttgttcttggctataatacttgtgactcatgaagaattatgttgacaaacaggataaattccacatgcattttatttcccagtgagttgtataaactttatttttgttgaaggttgtatgttaaatcaatgttacattcttatatcacttcttgagaaggaagttccgatttgaaattgtatcatttccttcaaaatgaagggcagtgcttagttaaataaaagattgatgatatcttttaagccatttcctcttcactatgtcttattaaaataaaacctgtcaagttcttttcaaaagatgctatgagcgtttccaataaaccatctattagagttcactggaaaaaaaaaaaaaaaaaaaaaaa

SEQ ID NO: 6637 - DNA, 7758 bp, Homo Sapiens
  NM_174916
ccggccacaggtttccgcttgcctctggccgggggtcggcaactgcaggcgtcagtttccctcaagatggcggacgaggaggctggaggtactgagaggatggaaatcagcgcggagttaccccagacccctcagcgtctggcatcttggtgggatcagcaagttgatttttatactgctttcttgcatcatttggcacaattggtgccagaaatttactttgctgaaatggacccagacttggaaaagcaggaggaaagtgtacaaatgtcaatattcactccactggaatggtacttatttggagaagatccagatatttgcttagagaaattgaagcacagtggagcatttcagctttgtgggagggttttcaaaagtggagagacaacctattcttgcagggattgtgcaattgatccaacatgtgtactctgtatggactgcttccaggacagtgttcataaaaatcatcgttacaagatgcatacttctactggaggagggttctgtgactgtggagacacagaggcatggaaaactggccctttttgtgtaaatcatgaacctggaagagcaggtactataaaagagaattcacgctgtccgttgaatgaagaggtaattgtccaagccaggaaaatatttccttcagtgataaaatatgtcgtagaaatgactatatgggaagaggaaaaagaactgcctcctgaactccagataagggagaaaaatgaaagatactattgtgtccttttcaatgatgaacaccattcatatgaccacgtcatatacagcctacaaagagctcttgactgtgagctcgcagaggcccagttgcataccactgccattgacaaagagggtcgtcgggctgttaaagcgggagcttatgctgcttgccaggaagcaaaggaagatataaagagtcattcagaaaatgtctctcaacatccacttcatgtagaagtattacactcagagattatggctcatcagaaatttgctttgcgtcttggttcctggatgaacaaaattatgagctattcaagtgactttaggcagatcttttgccaagcatgccttagagaagaacctgactcggagaatccctgtctcataagcaggttaatgctttgggatgcaaagctttataaaggtgcccgtaagatccttcatgaattgatcttcagcagtttttttatggagatggaatacaaaaaactctttgctatggaatttgtgaagtattataaacaactgcagaaagaatatatcagtgatgatcatgacagaagtatctctataactgcactttcagttcagatgtttactgttcctactctggctcgacatcttattgaagagcagaatgttatctctgtcattactgaaactctgctagaagttttacctgagtacttggacaggaacaataaattcaacttccagggttatagccaggacaaattgggaagagtatatgcagtaatatgtgacctaaagtatatcctgatcagcaaacccacaatatggacagaaagattaagaatgcagttccttgaaggttttcgatcttttttgaagattcttacctgtatgcagggaatggaagaaatccgaagacaggttgggcaacacattgaagtggatcctgattgggaggctgccattgctatacagatgcaattgaagaatattttactcatgttccaagagtggtgtgcttgtgatgaagaactcttacttgtggcttataaagaatgtcacaaagctgtgatgaggtgcagtaccagtttcatatctagtagcaagacagtagtacaatcgtgtggacatagtttggaaacaaagtcctacagagtatctgaggatcttgtaagcatacatctgccactctctaggacccttgctggtcttcatgtacgtttaagcaggctgggtgctgtttcaagactgcatgaatttgtgtcttttgaggactttcaagtagaggtactagtggaatatcctttacgttgtctggtgttggttgcccaggttgttgctgagatgtggcgaagaaatggactgtctcttattagccaggtgttttattaccaagatgttaagtgcagagaagaaatgtatgataaagatatcatcatgcttcagattggtgcatctttaatggatcccaataagttcttgttactggtacttcagaggtatgaacttgccgaggcttttaacaagaccatatctacaaaagaccaggatttgattaaacaatataatacactaatagaagaaatgcttcaggtcctcatctatattgtgggtgagcgttatgtacctggagtgggaaatgtgaccaaagaagaggtcacaatgagagaaatcattcacttgctttgcattgaacccatgccacacagtgccattgccaaaaatttacctgagaatgaaaataatgaaactggcttagagaatgtcataaacaaagtggccacatttaagaaaccaggtgtatcaggccatggagtttatgaactaaaagatgaatcactgaaagacttcaatatgtacttttatcattactccaaaacccagcatagcaaggctgaacatatgcagaagaaaaggagaaaacaagaaaacaaagatgaagcattgccgccaccaccacctcctgaattctgccctgctttcagcaaagtgattaaccttctcaactgtgatatcatgatgtacattctcaggaccgtatttgagcgggcaatagacacagattctaacttgtggaccgaagggatgctccaaatggcttttcatattctggcattgggtttactagaagagaagcaacagcttcaaaaagctcctgaagaagaagtaacatttgacttttatcataaggcttcaagattgggaagttcagccatgaatatacaaatgcttttggaaaaactcaaaggaattccccagttagaaggccagaaggacatgataacgtggatacttcagatgtttgacacagtgaagcgattaagagaaaaatcttgtttaattgtagcaaccacatcaggatcggaatctattaagaatgatgagattactcatgataaagaaaaagcagaacgaaaaagaaaagctgaagctgctaggctacatcgccagaagatcatggctcagatgtctgccttacagaaaaacttcattgaaactcataaactcatgtatgacaatacatcagaaatgcctgggaaagaagattccattatggaggaagagagcaccccagcagtcagtgactactctagaattgctttgggtcctaaacggggtccatctgttactgaaaaggaggtgctgacgtgcatcctttgccaagaagaacaggaggtgaaaatagaaaataatgccatggtattatcggcctgtgtccagaaatctactgccttaacccagcacaggggaaaacccatagaactctcaggagaagccctagacccacttttcatggatccagacttggcatatggaacttatacaggaagctgtggtcatgtaatgcacgcagtgtgctggcagaagtattttgaagctgtacagctgagctctcagcagcgcattcatgttgacctttttgacttggaaagtggagaatatctttgccctctttgcaaatctctgtgcaatactgtgatccccattattcctttgcaacctcaaaagataaacagtgagaatgcagatgctcttgctcaacttttgaccctggcacggtggatacagactgttctggccagaatatcaggttataatataagacatgctaaaggagaaaacccaattcctattttctttaatcaaggaatgggagattctactttggagttccattccatcctgagttttggcgttgagtcttcgattaaatattcaaatagcatcaaggaaatggttattctctttgccacaacaatttatagaattggattgaaagtgccacctgatgaaagggatcctcgagtccccatgctgacctggagcacctgcgctttcactatccaggcaattgaaaatctattgggagatgaaggaaaacctctgtttggagcacttcaaaataggcagcataatggtctgaaagcattaatgcagtttgcagttgcacagaggattacctgtcctcaggtcctgatacagaaacatctggttcgtcttctatcagttgttcttcctaacataaaatcagaagatacaccatgccttctgtctatagatctgtttcatgttttggtgggtgctgtgttagcattcccatccttgtattgggatgaccctgttgatctgcagccttcttcagttagttcttcctataaccacctttatctcttccatttgatcaccatggcacacatgcttcagatactacttacagtagacacaggcctaccccttgctcaggttcaagaagacagtgaagaggctcattccgcatcttctttctttgcagaaatttctcaatatacaagtggctccattgggtgtgatattcctggctggtatttgtgggtctcactgaagaatggcatcaccccttatcttcgctgtgctgcattgtttttccactatttacttggggtaactccgcctgaggaactgcataccaattctgcagaaggagagtacagtgcactctgtagctatctatctttacctacaaatttgttcctgctcttccaggaatattgggatactgtaaggcccttgctccagaggtggtgtgcagatcctgccttactaaactgtttgaagcaaaaaaacaccgtggtcaggtaccctagaaaaagaaatagtttgatagagcttcctgatgactatagctgcctcctgaatcaagcttctcatttcaggtgcccacggtctgcagatgatgagcgaaagcatcctgtcctctgccttttctgtggggctatactatgttctcagaacatttgctgccaggaaattgtgaacggggaagaggttggagcttgcatttttcacgcacttcactgtggagccggagtctgcattttcctaaaaatcagagaatgccgagtggtcctggttgaaggtaaagccagaggctgtgcctatccagctccttacttggatgaatatggagaaacagaccctggcctgaagaggggcaacccccttcatttatctcgtgagcggtatcggaagctccatttggtctggcaacaacactgcattatagaagagattgctaggagccaagagactaatcagatgttatttggattcaactggcagttactgtgagctccaactctgcctcaagacaatcacaaatgacgacagtagtaaaggctgattcaaaattatggaaaactttctgagggctgggaaagtattggagggtcttttgctccatgtccaggttcacttacatcaataaaatatttcttaatggagtattgctttcaattagcaaacatatgcttcacaggaaaaaaggacatagatcaatctgttttatgtgctagtatttccaggaatttattccccttcataatttgtctcatttcattttatttcatccacttggtagatgaagtcacgtcaaacagttgtagacattttatatgttggttaactcttctgcaattttgtatttggtgttttccccccaagtttagttcaactgacattggatcactgacaaaattctaataatctgtgatagtcttccttgcagttaaagaagaattgcagaaaccatgcaatatacttgggaaagattccaaaaataaattttttattatttctcttttaaggaaatacccctaatgtgccacctgctgctatcaccacaaattaaactcaatctctatgtggacagaggatgatttctgccaatatggaaaagcttttttctcactgtaggcctcaagaaaagttagggtaatgtatttgttattcattcctgacggtacaaagagcttgcagttctcacctctgactaccagtagctttgttgagttttgaaataatacttgacattttccaaaggcaaatctcattctgcaaggagattgtggcaccatcctgtttgactctcagaaacctcttgtaattctgatgtaaaaactgtagaatgaagatgagaaaattctcgcaatgagtggatcatgacaactgtaaattagaacaatcagatttaaaccaattccgcagtcttctatatctttgtaaaagacaaatccttgatgttgtctgtgtgcaaccttttcataaactctggttttatgactagtacaaaccaccaaaaaagccatgtgatcaatagtctgtgtcctgttataacatgctgtggttgagccatcttgtttataaataatagagctctcctgaatttgtgcatagacttcttggttcctggcttttgttttttgtatcaagagattgtgatataaaacagcagaagataaatggaaaccttccattttaacttacgttgtttctggggtaatgttagaaccttgaaagatgcattcaaagactgtatcttattttgcccttggctattagtgtctcacatatgtgtgtaaatgttttcctaccttctttttgctcagcaaaggcaagcaagtaaaatatatttgctaagtgattagtgatgcacatttggggctagatttttttggtacttttatgtaaagaaaagtggattttgcagtaagggattggcatgagcaggcgtcagaatcacaatcatgattttctacttgaataattacaattcagaaggtatctggataaatagatacatgtctagtgaacaatttgtaacaataacaggtaaggatcaggaaattcagtattcagtttgtcagatttgccagaatgatgaaagtatttgaacatgtgtgtttgtttcttatataattgtattgagtggattgtttgactgggaaatctgggctagaataggaaacagaagatactgacttctaccctaatagatgggccccaatttagcaaagataaactgactttatttttagtcctttttatattaacttaataaattctggagttaggctctcaagaggacagagggactgtctggcaatggccagccagacctttactgccaaagaacccatttcatattgcgttccactgattgagattgattcagatttttgcactgtagatgagcgtatgtctcagtgctgccccaagccccagggatttctcattatgttcaaatgtcctagtgatttaccttaatcattgcaaacaattatgcttatgaagtttacttacaaacaagcaactgagtcactttattttctttagtgtagtatgtgaaggcactggttcaacaggatggctccagaactgtgtttttctaatgtttggtaaggggctagtgagaattttaatgatatggtgaagaaaaatatatctgtataattaatttattatattggtgtatgggctgtgagttcaccttttagtggtcatttgtcatttcataacaactatgcattttggttcactgtgatgatgatctatatttagtgactgcaacatgtttataccactgattcaaattccatccatgatgaagttatacaaataatgcatatattgataacttttattgcaaaaatgtaaatttaaaacttgtataatgttcttgtgctttttaaaataaaatatatgtgtatatttaaaaagaaaaaaaaaaaaaaa

SEQ ID NO: 6638 - DNA, 1326 bp, Homo Sapiens
  NM_174918
tggacaaatttgcgggctggggaccatggaagtggaggaaatctacaagcaccaggaagtcaagatgcaagcaccagccttcagggacaagaaacagggggtctcagccaagaatcaaggtgcccatgacccagactatgagaatatcaccttggccttcaaaaatcaggaccatgcaaagggtggtcattcacgacccacgagccaagtcccagcccagtgcaggccgccctcagactccacccaggtcccctgctggttgtacagagccatcctgagcctgtacatcctcctggccctggcctttgtcctctgcatcatcctgtcagccttcatcatggtgaagaatgctgagatgtccaaggagctgctgggctttaaaagggagctttggaatgtctcaaactccgtacaagcatgcgaagagagacagaagagaggctgggattccgttcagcagagcatcaccatggtcaggagcaagattgatagattagagacgacattagcaggcataaaaaacattgacacaaaggtacagaaaatcttggaggtgctgcagaaaatgccacagtcctcacctcaataaatgagaggacattgtggcagccaaagccacaacttggaagatggggctgcacctgccaacgaagacgggaaatgaccccccccccccagcctagtgtgaacctgcccctcgtcccacgtatagaaaaacctcgagtcatggtgaatgagtgtctcggagttgctcgtgtgtgtgtacacctgcgtgcgtgtgtgtgcgtgtgtgcgcgtgtgttcgtgtatgtgcgtgtgtgcgtgcgcgtgtgtgtgcattttgcaaagggtggacatttcagtgtatctcccagaaaggtgatgaatgaataggactgagagtcacagtgaatgtggcatgcatgcctgtgtcatgtgacatatgtgagtctcggcatgtcacggtgggtggctgtgtctgagcacctccagcagatgtcactctgagtgtgggtgttggtgacatgcattgcacgggcctgtctccctgtttgtgtaaacatactagagtatactgcggcgtgttttctgtctacccatgtcatggtgggggagatttatctccgtacatgtgggtgtcgccatgtgtgccctgtcactatctgtggctgggtgaacggctgtgtcattatgagtgtgccgagttatgccaccctgtgtgctcagggcacatgcacacagacatttatctctgcactcacattttgtgacttatgaagataaataaagtcaagggaaaacagcgtcaaaaaaaaaaaaaaaaaa

SEQ ID NO: 6639 - DNA, 1893 bp, Homo Sapiens
  NM_174920
ggagcatcctcccgtcaggtctcctggtccagccccgcccgcgcctcctgcttccagcgaacctgttccctctccccacatcccccgccctccatctcccccggctctgggacccttcccgccgacctcacccccacccccgggatggagcggctcgagcccgcccggagccccccgcggccggggtgacggtccccccacccctctcctgcccggcccccgcctcgagcaccatgggcctgaggggttcccggggcgccagacgctgaagatgaccgatgccggagctctcttgagtcatggcttcttcaaagctccgagaacccgtggatgaagtttttgacctggacttggctgtgccagagacggccagactggacagcagtttacacaaggcccgggcccaactgttggccaagggccggagacaccggccatcccgctccaggcttcgggacagtgccagctccgcggaggatggtgaaggctcggatgggcccggaggcaaggtgaccgatggctgcgggagccccctgcaccggctgcgctcgcctttgcactcaggcccggggtccccggccgggggctctttctgcctggatcctccggggttgcggcgcagcctggacgaggacgagccgccgccctcgccgctcacacgctaccggcccctgcacaacgctgcgtcgcacgagggcctggccgccgcctcctgctctccgccgcgctccgcgccctcctccgacagctcccccagcttcgtgcgccgccacccgcgcgcagagccgcacagcgaagatgacagccgtgacgccagtcctcctgagcccgccagccccaccatcggcctcgataagaagactcgccgaaagttcctggacctgggggtcaccctgcgccgagcatccacgggcaagagccggaaggagaaaggcagcaaccgactgtccatgggcagcagggagtcagtggaggggtccggcaggtcagggggctccccgttcctgcctttttcctggttcacggacagcggcaagggctcagcatcctcgggtagcaccacctcccccacctgctcccctaaacacgagggcttcagccctaagaagtcagcttcccaggcccagctcctggctcatgcacaggaggcactgagcaactcctggtgcctagtccaggacttcggctccacccagatagggatggaatccactctgagtgatgactccacgccccccagcagcagccccaagatccccagtgggccctggcaggaggccaaatgttcttacccctaccacacgctgtctcagtcttcagatgagttcctggatgaacccctcccccctgtccaccactggaccagccagcaggtgggccagtggctgcagagcctcaacctggaacagtatgctgctgagtttgctgcacggcaggtagacgggccgcagctgctgcagctggacggaagcaaactaaagagcctggggctcagcaactctcatgaccgggcactggtgaagcgcaagttgaaggagatggcagcagctgccgagaaggagcgcaaggcccaggagaaggctgcgcggcagcgggagaagctccggcgccgagagcaggaggccaagaagagctaggggagggtgcacaggcgctggcacccggcaggggcagccactggctccgcgggcacaggcctcaccagggaggctggacctgggcgctgcacttgggctagcctggtcccacgctctcaggggggacatgctctctcttaccctgtcacttggtctagacccagagaccccagaaagggagaccccagggagagggcctagtaataaatcctattttgaggaaaaaaaaaaaaaaaaaaaaaaaaaaaaaaaaaaa

SEQ ID NO: 6640 - DNA, 1683 bp, Homo Sapiens
  NM_174921
agaaacggcagtggcagcagcgtccggagcagccgcagccttctggaagctccaggcggtctttctgccgagcctcggtcccggcccccatcctccccgccccatcggttgttgtctgggcggatttaaacagtcaagtaaaatcaagctgggtaatcatggcagaaggtggatttgatccctgtgaatgtgtttgctctcatgaacatgcaatgagaagactgatcaatctgttacggcagtcccagtcctactgcacagacacagagtgtcttcaggaattaccgggaccctctggtgataatggcatcagtgttacaatgatcttggtagcctggatggttattgcattgatcttgttcttactgagacctcctaatctaagaggatccagcctacctggaaagccaaccagtcctcataatggacaagatccaccagctcctcctgtggactaactttgtgatatgggaagtgaaaatagttaacaccttgcacgaccaaacgaacgaagatgaccagagtactcttaaccccattagaactgtttttccttttgtatctgcaatatgggatggtattgttttcatgagcttctagaaatttcacttgcaagtttatttttgcttcctgtgttactgccattcctatttacagtatatttgagtgaatgattatatttttaaaaagttacatggggcttttttggttgtcctaaacttacaaacattccactcattctgtttgtaactgtgattataatttttgtgataatttctggcctgattgaaggaaatttgagaggtctgcatttatatattttaaatagatttgataggtttttaaattgctttttttcataaggtatttataaagttatttggggttgtctgggattgtgtgaaagaaaattagaaccacgctgtatttacatttaccttggtagtttatttgtggatggcagttttctgtagttttggggactgtggtagctcttggattgttttgcaaattacagctgaaatctgtgtcatggattaaactggcttatgtggctagaataggaagagagaaaaaatgaaatggttgtttactaattttatactcccattaaaaatctctaatgttaagaaaaccttaaataaacatgattgatcaatatggcagatgatttacagtccattatatgacatttgtaagccactcaacactagccttacaaggttcatgaaaggaggaaaacattaattctttctgcctttgctgatataatccacatagtaataatttaagctataatttatttttaaaatgagtgcctcttgggaagcttcttttctgttctaacagttccctgttaaaatgaaaatcttaggccagtgcagtggctcacacctgtaatctcagcactttgggaggctgaggtgggtggatcacttgaggtcaggagttcgagaccagcctggccaacatggtgaaaccctgtctctactaaaaatacagaaaaattagccagggttggtgcatgtgcctgtaatcccagctactcaggaggccaaagcaggagaattgcttgaacccgggaggtggaggttgcagtgaaccaagatcgcaccactgcattccagcctaagcaatagagcgagactccctcccaaaaaaaaaaaaaaaaaaaaaaaaaaa

SEQ ID NO: 6641 - DNA, 1969 bp, Homo Sapiens
  NM_174922
gctgcgagacgctaagcggcgccgggcgggagaagagcggagcagtggtcggagatgtggcgaccggtgcagctctgtcatttccactctgctctgctgcacagaaggcagaagccctggccgtcccctgctgtgttcttcaggagaaacgtcaggggccttcctccaaggttctccagccccacacccctgtggaggaaggtgctctccaccgcggtagtgggggcgcccctgctcctcggagcccgctatgtcatggcagaggcacgggagaagaggaggatgcggctcgtggtggatggcatggggcgctttggcaggtctctgaaggtcggcctgcagatctccctggactactggtggtgcaccaatgttgtccttcgaggggtggaagagaacagcccaggctacttggaggtgatgtctgcgtgtcaccagcgggcggctgatgccctggtggcaggggccatcagcaacgggggcctctacgtgaagctgggccaggggctgtgctccttcaaccacctgcttccccccgagtatacccggaccctgcgcgtgctagaggacagggccctcaagcggggcttccaggaggtggatgagttgttccttgaggacttccaggccctcccccacgagctcttccaggagtttgactaccagccaattgctgccgccagcctggcacaggtgcacagagccaagctgcacgatggcaccagcgtggctgtgaaggtgcagtacatcgacctgcgggaccgctttgatggggacatccacaccctggagctcctgctgcggctcgttgaggtcatgcaccccagctttggcttcagctgggtcctccaggacctgaaggggaccctggcccaggagctggacttcgagaatgagggccgcaacgcagagcgctgtgcgcgggagctggcgcacttcccctacgtcgtggtgccccgcgtgcactgggacaagtccagcaagcgcgtgctcactgccgacttctgcgccggctgcaaggtcaacgatgtggaggccatcaggagccaggggctggcagtgcatgacatagcagaaaagctcatcaaggcctttgctgagcagatattttacaccggcttcatccactcggacccacatcctggcaacgttctggtgcggaaaggcccggacgggaaagcggagctggtgctgctggaccacgggctctaccagttcctggaggagaaggaccgcgcagccctctgccagctgtggcgggccatcatcctgcgggacgacgccgccatgagggcgcacgcagccgcactgggggtgcaagactacctcctgttcgccgagatgctcatgcagcgccccgtgcgcctggggcagctgtggggctcgcacctactgagccgcgaagaggcggcctacatggtggacatggcccgcgagcgcttcgaggccgtcatggcggtgctcagggagctgccgcggcccatgctgctggtgctgcgcaacatcaacaccgtgcgcgctatcaacgtggccctcggcgcccccgtggaccgctacttccttatggctaaaagggctgtccggggctggagccgcctggcgggcgccacgtatcggggtgtctacggcaccagcctcctgcgccacgccaaggtcgtctgggagatgctcaagtttgaagtggcgctcaggctggagaccttggccatgcggctgaccgccctcctggctcgtgctctggtccacctgagcctcgtgcccccagcggaggagctctaccagtacctggagacctagggtgcagccgcccagggccggcggggcccttttcaccttgggctgacggaggtggcggggctagaggtgtagacaccccgagccccgtgggcactcgcactggggggctgtgacagcagctgggccaggaggccgtgtaatgaccacacactcctctcaagcaaaaaaaaaa

SEQ ID NO: 6642 - DNA, 1272 bp, Homo Sapiens
  NM_174923
ctgctcgcgtgcgcgtgcgcgttggggcggccggccaatgccggaccgcttcggcaccgcccgcccgatccctccacccgtgggccggcaatggcgggcgcagtttcgctcttgggtgtggtggggctgctgcttgtgtctgcgctgtccggggtcctaggagaccgcgccaatcccgacctccgggcacacccagggaacgcagcccaccccggctctggagccacggaaccccggcggcgaccaccgctcaaggatcaacgcgagcggacccgggccgggtcgctgcctctgggggcgctgtacaccgcggccgtcgcggcttttgtgctgtacaagtgtttgcaggggaaagatgaaactgcggttctccacgaggaggcaagcaagcagcagccactgcagtcagagcaacagctggcccagttgacacaacagctggcccagacagagcagcacctgaacaacctgatggcccagctggaccccctttttgagcgtgtgactactctggctggagcccagcaggagcttctgaacatgaagctatggaccatccacgagctgctgcaagatagcaagccggacaaggatatggaggcttcagaaccaggtgaaggctcgggaggcgagtctgctggaggtggagacaaagtctctgaaactggaacattcctgatctctccccacacagaggccagcagacctcttcctgaggacttctgtttaaaggaggacgaggaggagattggtgacagtcaggcctgggaggagcccacaaactggagcacagagacatggaacctagctacttcctgggaggtggggcggggactacggagaaggtgcagccaggctgtggcaaagggccccagtcacagccttggctgggaaggagggacgacagctgaaggtcgactaaaacaaagtctgttttcatgatggagtgctcctgtgtgttttttcgatcctagttggttgtacacacccatactaggtgcctaaggacaactgggccttcttgaagagctgtccttattaggacaaaaagaggctgccttccagtgtgacagcagagaagatagagggagctccagctcttttcctcgtattcctgaggccaccagcatgcccgcgttcagggcccaaaaatcccttttctcatagcaaaactgagacagaagggtctttcccaaaaaaaagaaaaaaaactttactcaaatccagtggaaaaataaatgatagaaactatacacaaaaaaaaaaaaaaaa

SEQ ID NO: 6643 - DNA, 890 bp, Homo Sapiens
  NM_174928
gagtggcgggttcgggcgcagctgtagggttggctgcgcgccgccgaggcgttttggactgggttataaacaacttgtgaaatgagtgatttggaagatgatgagacaccccagctttctgcccatgccttagcagctctccaggaattttatgctgagcaaaagcaacaaattgagccaggcgaggatgataaatataacattggaataatagaagagaattggcaactgagccagttttggtatagtcaggaaactgctctgcagctggcacaggaggcaattgcagctgtaggagaaggtggcagaatcgcatgtgtgagtgcccctagtgtttaccagaaactcagagagctgtgcagagaaaacttttcgatatacatctttgaatatgacaaaagatttgccatgtatggagaggagtttattttctatgattacaataatccattggacttacccgaaagaattgctgcacatagttttgacatcgtaatagcagatcctccctatctttcggaggaatgtctcagaaaaacatcggaaaccgtcaagtacctgacgcggggcaagattctgctgtgcacaggtgccatcatggaagaacaggcagcagaactccttggagtgaagatgtgcacgtttgttccaagacacacccggaacttggcaaatgagtttcgctgttatgtgaattatgattctgggctggactgtgggatctgattacagacggtgacataacacaggaaggaaccctgtcacattcctctttttgtattttcgtagtagatttaaaagttataatctcttcccctccccccaaactggagctgtccctggcctggttttcaaaataaagtgtgcgatctccaaaaaaaaaaaaaaaa

SEQ ID NO: 6644 - DNA, 748 bp, Homo Sapiens
  NM_174930
gggcactttcccagtccccgaggcggatccggtgttgcatccttggagagagctgagagctggagtacagaacctgctaaggccatcaaacctattgatcggaagtcagtccatcagatttgctctgggccggtagtactgagtctaagcactgcggtgaagaagatggtagaaaacagtctggatgctggtgccactaatattgatctaaagcttaaggactatggaatggatctcattgaagtttcaggcaatggatgtggggtagaagaagaaaacttcgaaggcttaatgatgtcaccatttctacctgccacgtatcggcgaaggttgggactcgactggtgtttgatcacgatgggaaaatcatccagaaaaccccctacccccaccccagagggaccacagtcagcgtgaagcagttattttctacgctacctgtgcgccataaggaatttcaaaggaatattaagaagaaacgtgcctgcttccccttcgccttctgccgtgattgtcagttccttgagggctccccagccatgcttcctgtacagcctgcaaaactgactcctagaagtaccccaccccacccctgctccttggaggacaacgtgatcactgtattcagctctgtcaagaatggtccaggttcttctagatgatctgcacaaatggttcctctcctccttcctgatgtctgccattagcattggaataaagttcctgctgaaaatccaaaaaaaaaaaa

SEQ ID NO: 6645 - DNA, 3731 bp, Homo Sapiens
  NM_174936
gtccgatggggctctggtggcgtgatctgcgcgccccaggcgtcaagcacccacaccctagaaggtttccgcagcgacgtcgaggcgctcatggttgcaggcgggcgccgccgttcagttcagggtctgagcctggaggagtgagccaggcagtgagactggctcgggcgggccgggacgcgtcgttgcagcagcggctcccagctcccagccaggattccgcgcgccccttcacgcgccctgctcctgaacttcagctcctgcacagtcctccccaccgcaaggctcaaggcgccgccggcgtggaccgcgcacggcctctaggtctcctcgccaggacagcaacctctcccctggccctcatgggcaccgtcagctccaggcggtcctggtggccgctgccactgctgctgctgctgctgctgctcctgggtcccgcgggcgcccgtgcgcaggaggacgaggacggcgactacgaggagctggtgctagccttgcgttccgaggaggacggcctggccgaagcacccgagcacggaaccacagccaccttccaccgctgcgccaaggatccgtggaggttgcctggcacctacgtggtggtgctgaaggaggagacccacctctcgcagtcagagcgcactgcccgccgcctgcaggcccaggctgcccgccggggatacctcaccaagatcctgcatgtcttccatggccttcttcctggcttcctggtgaagatgagtggcgacctgctggagctggccttgaagttgccccatgtcgactacatcgaggaggactcctctgtctttgcccagagcatcccgtggaacctggagcggattacccctccacggtaccgggcggatgaataccagccccccgacggaggcagcctggtggaggtgtatctcctagacaccagcatacagagtgaccaccgggaaatcgagggcagggtcatggtcaccgacttcgagaatgtgcccgaggaggacgggacccgcttccacagacaggccagcaagtgtgacagtcatggcacccacctggcaggggtggtcagcggccgggatgccggcgtggccaagggtgccagcatgcgcagcctgcgcgtgctcaactgccaagggaagggcacggttagcggcaccctcataggcctggagtttattcggaaaagccagctggtccagcctgtggggccactggtggtgctgctgcccctggcgggtgggtacagccgcgtcctcaacgccgcctgccagcgcctggcgagggctggggtcgtgctggtcaccgctgccggcaacttccgggacgatgcctgcctctactccccagcctcagctcccgaggtcatcacagttggggccaccaatgcccaagaccagccggtgaccctggggactttggggaccaactttggccgctgtgtggacctctttgccccaggggaggacatcattggtgcctccagcgactgcagcacctgctttgtgtcacagagtgggacatcacaggctgctgcccacgtggctggcattgcagccatgatgctgtctgccgagccggagctcaccctggccgagttgaggcagagactgatccacttctctgccaaagatgtcatcaatgaggcctggttccctgaggaccagcgggtactgacccccaacctggtggccgccctgccccccagcacccatggggcaggttggcagctgttttgcaggactgtatggtcagcacactcggggcctacacggatggccacagccgtcgcccgctgcgccccagatgaggagctgctgagctgctccagtttctccaggagtgggaagcggcggggcgagcgcatggaggcccaagggggcaagctggtctgccgggcccacaacgcttttgggggtgagggtgtctacgccattgccaggtgctgcctgctaccccaggccaactgcagcgtccacacagctccaccagctgaggccagcatggggacccgtgtccactgccaccaacagggccacgtcctcacaggctgcagctcccactgggaggtggaggaccttggcacccacaagccgcctgtgctgaggccacgaggtcagcccaaccagtgcgtgggccacagggaggccagcatccacgcttcctgctgccatgccccaggtctggaatgcaaagtcaaggagcatggaatcccggcccctcaggagcaggtgaccgtggcctgcgaggagggctggaccctgactggctgcagtgccctccctgggacctcccacgtcctgggggcctacgccgtagacaacacgtgtgtagtcaggagccgggacgtcagcactacaggcagcaccagcgaaggggccgtgacagccgttgccatctgctgccggagccggcacctggcgcaggcctcccaggagctccagtgacagccccatcccaggatgggtgtctggggagggtcaagggctggggctgagctttaaaatggttccgacttgtccctctctcagccctccatggcctggcacgaggggatggggatgcttccgcctttccggggctgctggcctggcccttgagtggggcagcctccttgcctggaactcactcactctgggtgcctcctccccaggtggaggtgccaggaagctccctccctcactgtggggcatttcaccattcaaacaggtcgagctgtgctcgggtgctgccagctgctcccaatgtgccgatgtccgtgggcagaatgacttttattgagctcttgttccgtgccaggcattcaatcctcaggtctccaccaaggaggcaggattcttcccatggataggggagggggcggtaggggctgcagggacaaacatcgttggggggtgagtgtgaaaggtgctgatggccctcatctccagctaactgtggagaagcccctgggggctccctgattaatggaggcttagctttctggatggcatctagccagaggctggagacaggtgcgcccctggtggtcacaggctgtgccttggtttcctgagccacctttactctgctctatgccaggctgtgctagcaacacccaaaggtggcctgcggggagccatcacctaggactgactcggcagtgtgcagtggtgcatgcactgtctcagccaacccgctccactacccggcagggtacacattcgcacccctacttcacagaggaagaaacctggaaccagagggggcgtgcctgccaagctcacacagcaggaactgagccagaaacgcagattgggctggctctgaagccaagcctcttcttacttcacccggctgggctcctcatttttacgggtaacagtgaggctgggaaggggaacacagaccaggaagctcggtgagtgatggcagaacgatgcctgcaggcatggaactttttccgttatcacccaggcctgattcactggcctggcggagatgcttctaaggcatggtcgggggagagggccaacaactgtccctccttgagcaccagccccacccaagcaagcagacatttatcttttgggtctgtcctctctgttgcctttttacagccaacttttctagacctgttttgcttttgtaacttgaagatatttattctgggttttgtagcatttttattaatatggtgactttttaaaataaaaacaaacaaacgttgtcctaacaaaaaaaaaaaaaaaaaaaaa

SEQ ID NO: 6646 - DNA, 2138 bp, Homo Sapiens
  NM_174983
tggggcggacgcggcggacgtgggtgagggcgcggccgtaagagagcgggacgcggggtgcccggcgcgtggtgggggtccccggcgcctgcccccacggcacccaagaaggcctggccagggtaccctccgcggagcccgggggtggggggcgcgggcccggcgccgcgatgggcccgggacccccagcggccggagcggcgccgtccccgcggccgctgtccctggtggcgcggctgagctacgccgtgggccacttcctcaacgacctgtgcgcgtccatgtggttcacctacctgctgctctacctgcactcggtgcgcgcctacagctcccgcggcgcggggctgctgctgctgctgggccaggtggccgacgggctgtgcacaccgctcgtgggctacgaggccgaccgcgccgccagctgctgcgcccgctacggcccgcgcaaggcctggcacctggtcggcaccgtctgcgtcctgctgtccttccccttcatcttcagcccctgcctgggctgtggggcggccacgcccgagtgggctgccctcctctactacggcccgttcatcgtgatcttccagtttggctgggcctccacacagatctcccacctcagcctcatcccggagctcgtcaccaacgaccatgagaaggtggagctcacggcactcaggtatgcgttcaccgtggtggccaacatcaccgtctacggcgccgcctggctcctgctgcacctgcagggctcgtcgcgggtggagcccacccaagacatcagcatcagcgaccagctggggggccaggacgtgcccgtgttccggaacctgtccctgctggtggtgggtgtcggcgccgtgttctcactgctattccacctgggcacccgggagaggcgccggccgcatgcggaggagccaggcgagcacacccccctgttggcccctgccacggcccagcccctgctgctctggaagcactggctccgggagccggctttctaccaggtgggcatactgtacatgaccaccaggctcatcgtgaacctgtcccagacctacatggccatgtacctcacctactcgctccacctgcccaagaagttcatcgcgaccattcccctggtgatgtacctcagcggcttcttgtcctccttcctcatgaagcccatcaacaagtgcattgggaggaacatgacctacttctcaggcctcctggtgatcctggcctttgccgcctgggtggcgctggcggagggactgggtgtggccgtgtacgcagcggctgtgctgctgggtgctggctgtgccaccatcctcgtcacctcgctggccatgacggccgacctcatcggtccccacacgaacagcggagcgttcgtgtacggctccatgagcttcttggataaggtggccaatgggctggcagtcatggccatccagagcctgcacccttgcccctcagagctctgctgcagggcctgcgtgagcttttaccactgggcgatggtggctgtgacgggcggcgtgggcgtggccgctgccctgtgtctctgtagcctcctgctgtggccgacccgcctgcgacgctgggaccgtgatgcccggccctgactcctgacagcctcctgcacctgtgcaagggaactgtggggacgcacgaggatgccccccagggccttggggaaaagcccccactgcccctcactcttctctggacccccaccctccatcctcacccagctcccgggggtggggtcgggtgagggcagcagggatgcccgccagggacttgcaaggaccccctgggttttgagggtgtcccattctcaactctaatccatcccagccctctggaggatttggggtgcccctctcggcagggaacaggaagtaggaatcccagaagggtctgggggaaccctaaccctgagctcagtccagttcacccctcacctccagcctgggggtctccagacactgccagggccccctcaggacggctggagcctggaggagacagccacggggtggtgggctgggcctggaccccaccgtggtgggcagcagggctgcccggcaggcttggtggactctgctggcagcaaataaagagatgacggcaaaaaaaaaaaaaaa

SEQ ID NO: 6647 - DNA, 452 bp, Homo Sapiens
  NM_175055
ctgtttggagagactcagccatcatgccagacccgtccaaatcggctcctgcgcccaagaagggttctaaaaaggctgtcaccaaggcacagaagaaggacggcaagaagcgcaagcgcggccgcaaggagagctattctatctacgtgtacaaggtgctgaagcaggtgcaccccgacaccggcatctcgtccaaggccatgggcatcatgaactccttcgtcaatgacatcttcgagcgcatcgccagcgaggcctcccgcctggcacactacaacaagcgctccaccatcacgtcccgcgaagtgcagacggccgttcgcctgctgctgcccggcgagctggccaagcacgccgtgtccgagggcaccaaggctgtcaccaagtacaccagctccaagtgaggcgttcctcggcgtcctgaacccaaaggctcttttcagagccaccca

SEQ ID NO: 6648 - DNA, 3210 bp, Homo Sapiens
  NM_175061
cccccgccgctcccgacgccgccgccgcagccgccgcctcccctctgcctcccggtggctcctcgctctccttccatctctctcgccccctctccctccgtcccgtcctcgccgctcccctcaccccgcctctctccccctcccccagcccctcctctcctcaccccacccggcctccctccctccctcgcccgcccggcgctcgcagagccgacaccaggggggctctcgatgtagcaccatgacaggcatcgccgccgcctccttcttctccaatacctgccgattcgggggctgcggactccacttccccaccctggccgacctcatcgagcacatcgaggacaaccacatcgatacagatccacgggttttagaaaaacaagaattacagcagccaacctatgttgccctgagttacataaatagattcatgacagatgctgcccgccgagagcaggagtccctaaagaagaagattcagccgaagctctcgctgactctgtccagctcagtgtctcgagggaatgtgtccactcccccacgccacagcagtggaagccttactccccccgtgaccccacccatcaccccctcctcttcattccgcagcagcactccgacaggcagcgagtatgacgaggaggaggtggactatgaggagtcggacagcgatgagtcctggaccacagagagtgccatcagctccgaagccatcctcagctccatgtgcatgaatggaggggaagagaagccttttgcctgcccagttcctggatgtaaaaagagatacaagaatgtgaatggcataaagtatcacgctaagaatggtcacagaacacagattcgtgtccgcaaaccattcaagtgtcgctgtgggaagagttacaagacagctcagggcctgcggcaccacacaatcaatttccatcccccggtgtcggctgagattatcaggaagatgcagcaataacatgctggtcataactgtgccaagaaatcctcaccagcagttgctgattttgaaaacagccaccttttttcaggggaagcattcagcaaccctttaaagaaaaagaattaaatgcatgctttaaattttttctgtaattttggaatgatgtatctttgtagagttaatgattttgtacatttgcacatgtaatcatcatacccattttcattactttgatataaggtgctaaacaaaaaaagctctaggttcttcagcacatttcccccaaaacaaaataaaattgagggcatgttgcatattgttgaattgtattgcggtggtatcaacctggggggaggaggggctggcactgagatttttttttcaagattgtaatgtgattgaagttttcaacacatcaactcacatatgttcaaaaccaaaataataccttcattatcaaactggttaccatgccttacataatggagttagtatttgtgagtagaaagactttaggtaatggaaatataaataagaaagaatgtttaacataatatgctaaaaatattttcatatttaaataacatacgtaaaggtgtgctttctgtgttttatattatcttgcaaatccttttgccctttaaaaagctgaaaatcttgccatctgacttactagtcattttagtgttataaatggcattttgtacaaaatagtctattcagttcgttcattcatttaacacacattgattgagtgcctgctgggtacaagggattcaatttatgcctattgatatctgcggaccaagatacccatttagtgaaatacttttttccctgaaatctgttagaaaagactttgaaatacttcagtgcaaagtgtgtgtgtgtgaagtttagttatatcttcatcttcagatgaagttttaaagcactttgtagttctctattgccaacaatttaatgtttatgtgttgccaattcttgcaaccactgccctaccaaacctgtgggttgcaaatcagaactaaaattctaagcacgtttcaaagatgaacacttttgttaagacccctattgcctcttcttcatgctcattttttactttttttaaaaggtacttttctcatcacattgtagagaggtctgcattctcattggaaatgtctgtttagctttataaaacaaacactttgctgaaataggaaaatgagccttattgacaattaagtgcttcttgcagcaggtggtcaaagaaaagcatgactaatacgacctattagagtaatctacatctggaccattccttaagtttttcctcaccgacagtaccatcatgccttgagtgttcttttctcccaagtgctattccttaaacacgagagtttaccagttgcctaataatgcaataaaaaatgctttgagatagctaactgcccataaaacaaactcaaattgcttataaagtttcttcccatgttcccatttgatgaaaagtcttacatcacatataactgggaagcaggggtccctcctcaattttcagacattttgaaaggatgacagttctgtttgttagatgagtaaacctctatattcataagttctaaaatccttcattatgagggattcaaagtatttataaaaacactgccctctaaaaatttcctcagatctgaagtatggtcttggtcctgaatatacagtgttatcctatgtttaaaagggtgatccagacatgagacgcaactagttggtgcataagaaggccccacttggctatttcatatctacctacaattgaccaaaaaaaattttttaggccagcaattattatttagcttcgctctttctagtgcaagaaactgcaggctggatcagtagttcaacagctaaacagtcataaaatagtcattgtgcatgttaaatttctttcaatgctttcaaagataaattccaatttctatttacttattcattgtgacagtattactaaacaggtaaggatgggaatattttgttatactgtgtatagtgaatgtattgtactgtgtctgtgaaaactgtgctttaaattatattttcatatgttttgttggggacagagcacattaagtctgaaagcaacagaggtttgttttagaactgaaggcaatttaatcaaaattcctgtcaagaaaagctgcttataaatgtaaatgaaatcacatttaaaataaactgcctctgacccaaaaataaaaaaaaaaaaa

SEQ ID NO: 6649 - DNA, 448 bp, Homo Sapiens
  NM_175065
atgtcaggacgcggaaagcagggaggcaaggcccgcgctaaggccaagtcgcgctcgtcccgcgctggtctccagttcccggtggggcgagtgcaccgcttgctgcgcaaaggcaactacgcggagcgggtcggggcaggcgccccggtgtacctggcggcggtcctcgagtacctgaccgcggaaattctggagctggcgggcaacgcggctcgggacaacaagaagacgcgcatcatccctcgccatctgcaactagccgtgaggaatgacgaagagctcaacaagttactcgggggtgtcaccattgcccagggcggcgtcttgcccaatatccaggctgtcctgttgcccaagaaaacggagagtcacaagcctggcaagaacaagtaattaagaggcttgacaccatactcattcaccccaaaggctcttttaagagccacca

SEQ ID NO: 6650 - DNA, 4738 bp, Homo Sapiens
  NM_175066
gcagcgcgccacgcccgagtcccaggcgtgcggctggccatggcgctgttctacgtcgcgcggtacccgggccccgatgcggcagctgcggcggggccggagggcgcggaggccggggcgcacggcagggcccgcgcgctgctcgagcggctgcagagccgggcccgcgaacggcagcagcagcgggagcccgcgcagaccgaggcggctgcatcgaccgagccggcgaccaggaggcgacggcggccccggcggcggcggcgggtgaacgacgcggagccggggagcccggaggcgccgcagggaaagcgacggaaggcggacggcgaggacgcgggcgcagaaagcaacgaggaggcgccaggggagcccagcgcagggagcagcgaggaggcgccaggggagcccagcgcagggagcagcgaggaggcgccgggggagcgcagcaccagcgccagcgccgaggcggccccagatggaccggccctggaggaggcggccggacccctggtccccggcctggtgctgggggggttcgggaagaggaaggcgccgaaggtccagcctttcctgccaaggtggctggctgagcctaactgtgtcagaaggaatgtcaccgaagacctggttcctatcgaggacatccctgacgtccatcctgacctgcagaagcagctgcgggcacacggcatctcgtcctactttccagtccaggcagctgtgattcctgccctcctggagagcgcagcctgtgggtttctggtgggcagaggtggctaccggcctagcgacctctgtgtttctgccccaacaggcagtgggaagacactggccttcgtcatccctgtggtgcaggccctgctttcgagagtggtctgccacatccgtgccctggttgtgctgcccaccaaggagctggcccagcaggtgagcaaagttttcaacatctacacagatgccacacctctgagagtctccctggttacgggacagaagtctctggccaaggagcaggagagcctcgtccagaaaacagctgatgggtaccgctgcttggctgacatcgtggtagccacccccggccgcctggtggaccacatcgaccagaccccaggattcagcctccagcagctccgcttcctgattatcgacgaggctgaccggatgattgacagcatgcatcagtcctggctgccgcgggtggtggcggccgccttccagagcgaggaccccgcggacccctgtgccctgctccagcgaaggcaggcccaggctgtgacagccgccagcacctgctgtccccagatgcccctgcagaagctgctcttctcagctactctgacccagaaccctgaaaagctgcagcagctgggcctccaccagccccggcttttctccacagggctagcacacaggggcctggaagatacagatggggacggggattcggggaagtatgcctttcctgttgggctcacgcaccactacgtgccctgcagcctcagctctaagccgctggtcgtcctgcacctggtcctggagatgggcttctcgagggttctctgcttcactaactcccgagagaactcccacaggctcttcctgctggtgcaagcttttgggggtgtggacgtggctgagttctcctcgcgctacgggcctggccagaggaggatgatcctgaagcagtttgaacaggggaagatccagctgctcatcagcacggacgccaccgcgcgaggcatcgacgtgcagggtgtggagctggtggtgaactacgacgccccccagtacctgagaacctacgtgcaccgggttgggaggacagctcgcgctgggaaaactggacaggccttcacactgctcctgaaagtgcaggagaggagattcctccgaatgctaactgaagctggggcacctgagttgcagcggcacgagctctccagcaagctgctgcagccgctggttcctcggtacgaggaggccctgtcccagctggaggagtctgtcaaggaagagcgcaagcagagggcggcctaggctggggctcagagggccggagggactgaacgctcaccaccctgaccctccttccagagcagtgctgatcactggatcctgtatgtgaggaaaggaatcccccagtggacacagccttcctccccaagcacgtggtctctgcgccaggcagcccgggcgtcagagctcaagcacctgccccgactggagacttcagggcttgtcactttcagagtgtggaggtcaggatggctgcgggcaatgaagccttagtaaaacggtgaaaagtactcccagacggacgcgggcacccgtcatgcttttgctgagagttgggggcattaaccttgagctaatgttaaaaatcaagctcttggccaggcatggtggctcatgcctgtaattccagcactttgggaggccaaggcgggtggatcacctgaggtcacgagttcgagaccagcctgaccaacatggagaaaccctgtctctactaaaaatacaaaattagccaggcgtggtggtgcatgcctgtaatccagctacttgggaggctgaggcaggaaaatggcttgaacccgggaggtggaggttgcagtgagctgagattgcgccactgcactccagcctgggcaacaagagcaaaactccgtctcaaaaaaaaaaattgccgggcgcggtggcaaatgcctgtaatcccagcactttgggaggccgaggcaggtggatcacaaggtcaggagatagagaccatcattgctaacatggtgaaaccccgtctctactaaaaatacaaaaaaaaaaaaaaaacaactagccgggcgtggtggcgggcacctatagtcccagctactcgggaggctgaggcaggagaatggcgtgaacccgggaggcggagcttgcagtgagcggagactgcgccactgcactccagcctgggcaacagagtgagactccgtcaaaaaaaaagctctcctccccagatttgtgaaccttgtgactgttcagtggacacctcacatattgctggtgggaaggtcacgtggagacagctgggcaaagccttggggcgttaaacacagagtcactcatgacccagcacttcctctcctatgcaccttgtacaccccagatcaatgaaacctacatccacacagaaacgtacacaaatctctcagcagcactgttcacagtagccaaaaactagaaaccacatgtccgtcagctgatgaatggagaataaaacgtgggaaatccacaccaggagagaaaaaggagtgaggcaccagcataggcaccccgtggatgaacccggaacctgacgctaactgaaggaaggctccggctatagggagtgtcccaggcacagccagagattgaagggtgccggggccgggagttggtgggggttggggctggggacacagtggccagtgtgtgggtttgttttggggatgatgaaaatgttcttaggttgtgtgtggtgatggctgctcacctctataaaccttttactaaaaaccatggactgggtggatacagtgtgtgaattctctcagtccagtgctttgtttgaaaaaggtggatgatgccaacatcactaaccgccagggagacgcaggccacggccacacccggctcactggagttgtgaggatggaaacaccagcccaccccactcagttcagacctcagcttagatgcaaagaatgtctgggatggggactggcagctgattagagatgcaaccactgaacctgtggactgtgttcaaacaaatgccagcagaacacaaaaggcgactgttacaggaggcagaaagaaatgatttaggtagacggggtaaagccagtccccagcagaaaatttgccttttaacaaaaagcagctcaaaaatagctccctttctaacctcggggttcaaaatcacttctcacgacaagcagccagaaagagcagactgtgaatcacagatgagacagctcgggcacaggagtgcggggggtgtctcctgggtgatcaccaaacttcacacttccacaatgggccccagtaaaacagtggaccctaataagcacattcccgtccccttaggtgcactaagggaagctaaaagcagactgaggggtgcctgtaaccccaagaagatgtctgggagcagacccagagaccctcgcagaaaagtgtcacagagcagcacagactgagtctgacagaaactctctatacaaatagcacaccttgtcccagctaaaaccctgggccctgggaggacaagacatccctcctctaacccctcgtcactagcccatttgtaaaaaccttgacaggccgggcacggtggctcacacctgtaatcccagcactttgggaggctgaggcaggcgcatcacctgaggtcaggagatcgagaccatcctggccaacatggtgaaaccccatctctactaaaaatacaaaacttagctgagcgtggtggcgtgtgcctggagtcccaactactcaagaggctgaggcaggagaatcacttgcccgggaggtggaggttgcagtgggccaagatcagcccactgcactgcagcctggcgacagaaaaaaaagaaaccttgacatctttactacaacttagcaacccgctcaggccccctctgcaacggagagctcttcttcctttttgcttattaaacttctgctccaaaaaaaaaaaaaaaaaaaaaaa

SEQ ID NO: 6651 - DNA, 2323 bp, Homo Sapiens
  NM_175068
tcagcatcttatccccactttctggcctccccaccatgagccgccaattcacctacaagtcgggagctgctgccaaggggggcttcagcggctgctccgctgtgctctcagggggcagctcatcctcctaccgagcagggggcaaagggctcagtggaggcttcagcagtcggagcctttacagcctggggggtgcccggagcatctctttcaatgtggccagtggcagtgggtgggcaggaggctatggatttggccggggccgggccagtggctttgctggcagcatgtttggcagtgtggccttggggtccgtgtgtccgtcgttgtgcccgcccgggggtatccatcaggtcaccatcaacaagagcctcctggcacccctgaacgtggagctggaccctgaaatccagaaagtgcgtgcccaggagcgggagcagatcaaggtgctgaacaacaagttcgcctccttcattgacaaggtgcggttcctggagcagcagaaccaggtgctggagaccaagtgggagctgctacagcagctggacctgaacaactgcaagaataacctggagcccatccttgagggctacatcagcaacctgcggaagcagctggagacgctgtctggggacagggtgaggctggactcggagctgaggagcgtgcgcgaagtggtggaggactacaagaagaggtatgaagaagaaataaacaagcgcacaactgctgagaatgaatttgtggtgcttaagaaggacgtggacgcagcttacacgagcaaagtggagctgcaggccaaggtggatgccctggatggagaaatcaagttcttcaagtgtctgtacgagggggagactgctcagatccagtcccacatcagcgacacgtccatcatcctgtccatggacaacaaccggaacctggacctggacagcatcattgctgaggtccgtgcccagtatgaggagatcgcccggaagagcaaggccgaggccgaggccctgtaccagaccaagttccaggagctgcagctagcagccggccggcatggggatgacctgaaacacaccaaaaatgagatctcagagctgacccgtctcatccaaagactgcgctcggagattgagagtgtgaagaagcagtgtgccaacctggagacggccatcgctgacgccgagcagcggggggactgtgccctcaaggatgccagggccaagctggatgagctggagggcgccctgcagcaggccaaggaggagctggcacggatgctgcgcgagtaccaagagcttttgagcgtgaagctgtccctggatattgagatcgccacctaccgcaagctgctggagggcgaggagtgcaggatgtccggagaatataccaactccgtgagcatttcggtcatcaacagctccatggccgggatggcaggcacaggggctggctttggattcagcaatgctggcacctacggctactggcccagctctgtcagcgggggctacagcatgctgcctgggggctgtgtcactggcagtgggaactgtagcccccgtggggaagccaggaccaggctggggagtgcaagtgaattcagggactcccagggaaagaccttagctctaagctcacccaccaaaaaaaccatgagataaaagtgcaacacagcccatttcccagtagtctgccttgccctggcagactgctccggactcttctaggaaattcctctgtctcatttgtcctcatctccttcttgctttgctttgctgtggacctctcctccttctccttgacctctctgcctcagtctttgttaatgttgaatcaggatttgagagctggagcccatctttctgcctccatccaaagaggccttttaactcagcctccccttctggaagaagacttggccttttctctgcctgcatgtccctgtgcagaggaaggctgtctctcaagggtaaccccaatctgcctgtgctgctctttcataccctgtctcagtaactatttggccatgtgctccctgggtacacaagttttcagatctactgatagacctgcaggaactctctcatgttagagcaatactggctcaggcaaaacacctggtgggaagttgtatcttgtatagccactgcatattacatagccaggagtaccccttgaggctaattctaccaaccaagggatttgtgctcttcatctgtgggtacttgtccttgtttaggcctcacctccctgctcctgtgtcttaccaataaacttataaagcccaaaaaaaaaaaaaaaaaaaaaaaaaaaaaaaaaaaaaaaa

SEQ ID NO: 6652 - DNA, 2046 bp, Homo Sapiens
  NM_175069
gacgtcatcccgcagcgccggaagcggtgaggcacagatgagtaacgtgaatttgtccgtctccgacttctggagagtgatgatgcgggtgtgctggttggtgagacaggacagccggcaccagcgaatcagacttccacatttggaagcagttgtgattgggcgtggcccagagaccaagatcactgataagaaatgttctcgacagcaagtacagttgaaagcagagtgtaacaagggatatgtcaaggtaaagcaggtaggagtcaatcccaccagcattgactcagtcgtaattgggaaggaccaagaggtgaagctgcagcctggccaggttctccacatggtgaatgaactttatccatatattgtagagtttgaggaagaggcaaagaaccctggcctggaaacacacaggaagagaaagagatcaggcaacagtgattctatagaaagggatgctgctcaggaagctgaggctgggacagggctggaacctgggagcaactctggccaatgctctgtgcccctaaagaagggaaaagatgcacctatcaaaaaggaatccctgggccactggagtcaaggcttgaagatttctatgcaggaccccaaaatgcaggtttacaaagatgagcaggtggtggtgataaaggataaatacccaaaggcccgttaccattggctggtcttaccgtggacctccatttccagtctgaaggctgtggccagggaacaccttgaactccttaagcatatgcacactgtgggggaaaaggtgattgtagattttgctgggtccagcaaactccgcttccgattgggctaccacgccattccgagtatgagccatgtacatcttcatgtgatcagccaggattttgattctccttgccttaaaaacaaaaaacattggaattctttcaatacagaatacttcctagaatcacaagagtagctgggatttgacttttcttccttgcctgcagctgtgatcgagatggtacaagaggctggtagagtaactgtccgagatgggatgcctgagctcttgaagctgccccttcgttgtcatgagtgccagcagctgctgccttccattcctcagctgaaagaacatctcaggaagcactggacacagtgattctgcagagcctgagctgctgctgtggtgtggcccactggagcaaactgctggcacctattctgggttgcttgtgaacttctactcatttcctaaattaaaacatgcagctttttcacaaatttattctattattgagtggccacaatgtagagtggctcaaagtacttcaggattaggaatttgggtttgtcatagatgtattctctggtgagggtggctgggatatacctgacccaccatcttcagaaggacccatgtcaggtctgaccattgggagcaaagccatgttcacactgacctaatgcagagtatggaagcattgggctggttatacatttctgtttcttagatttatcctccgcctctgtaggcatggacaacctttaatcagagcatctagagtggcctcttgtttatcctgaagatactgatgggtcttgttttctgttagtctgttttgtaatattcttttcccttccttcatggggaggcttagtttgtccagtccttccatgcccttctatcccagattacctaaatgttcccttctcaggaattctgtctcatcagttcttcacagtgagaaaagaggctagatgatggtgtggggggttggagttttcttctaataccgagggttcctggctgtgaggaaacagccacatgttcgtcatgattgagctgtgaagtcttcttggacctgttgtctgaaaataaagttaatttgtttgaggcatctctcttaagtaggtggaaactattgaagttcagctaacaatcacagcataggttctgatgcatggaaaggtggttggtgaatgaaaaagttgcgtagagccactactttctttttccctgagaataaatttggataaaacagttgtattcaaaaaaaaaaa

SEQ ID NO: 6653 - DNA, 1836 bp, Homo Sapiens
  NM_175071
ccgacttctggagagtgatgatgcgggtgtgctggttggtgagacaggacagccggcaccagcgaatcagacttccacatttggaagcagttgtgattgggcgtggcccagagaccaagatcactgataagaaatgttctcgacagcaagtacagttgaaagcagagtgtaacaagggatatgtcaaggtaaagcagagtttgaggaagaggcaaagaaccctggcctggaaacacacaggaagagaaagagatcaggcaacagtgattctatagaaagggatgctgctcaggaagctgaggctgggacagggctggaacctgggagcaactctggccaatgctctgtgcccctaaagaagggaaaagatgcacctatcaaaaaggaatccctgggccactggagtcaaggcttgaagatttctatgcaggaccccaaaatgcaggtttacaaagatgagcaggtggtggtgataaaggataaatacccaaaggcccgttaccattggctggtcttaccgtggacctccatttccagtctgaaggctgtggccagggaacaccttgaactccttaagcatatgcacactgtgggggaaaaggtgattgtagattttgctgggtccagcaaactccgcttccgattgggctaccacgccattccgagtatgagccatgtacatcttcatgtgatcagccaggattttgattctccttgccttaaaaacaaaaaacattggaattctttcaatacagaatacttcctagaatcacaagctgtgatcgagatggtacaagaggctggtagagtaactgtccgagatgggatgcctgagctcttgaagctgccccttcgttgtcatgagtgccagcagctgctgccttccattcctcagctgaaagaacatctcaggaagcactggacacagtgattctgcagagcctgagctgctgctgtggtgtggcccactggagcaaactgctggcacctattctgggttgcttgtgaacttctactcatttcctaaattaaaacatgcagctttttcacaaatttattctattattgagtggccacaatgtagagtggctcaaagtacttcaggattaggaatttgggtttgtcatagatgtattctctggtgagggtggctgggatatacctgacccaccatcttcagaaggacccatgtcaggtctgaccattgggagcaaagccatgttcacactgacctaatgcagagtatggaagcattgggctggttatacatttctgtttcttagatttatcctccgcctctgtaggcatggacaacctttaatcagagcatctagagtggcctcttgtttatcctgaagatactgatgggtcttgttttctgttagtctgttttgtaatattcttttcccttccttcatggggaggcttagtttgtccagtccttccatgcccttctatcccagattacctaaatgttcccttctcaggaattctgtctcatcagttcttcacagtgagaaaagaggctagatgatggtgtggggggttggagttttcttctaataccgagggttcctggctgtgaggaaacagccacatgttcgtcatgattgagctgtgaagtcttcttggacctgttgtctgaaaataaagttaatttgtttgaggcatctctcttaagtaggtggaaactattgaagttcagctaacaatcacagcataggttctgatgcatggaaaggtggttggtgaatgaaaaagttgcgtagagccactactttctttttccctgagaataaatttggataaaacagttgtaaaaaaaaaaaaaaaaaa

SEQ ID NO: 6654 - DNA, 2150 bp, Homo Sapiens
  NM_175080
ggaggaggaggaggaggaggaagaagaggtagcggcaaggtcgcggtctgaggttccggtgctcgccgccgcccagctcccagccgaggctttctcaaccgcgtcaataaaaggccgccccgacccgcccccgcgccccgcagccctgccggacaccccgggctgcagctgagcgggcgcagacgggccgaggcgggcgccgggcgcgcagggaccgagggaccgagtgctccccatgagcgcacgtgggccgggcggtccgcaagcccggctgagagcgcgccatggggcaggcgggctgcaaggggctctgcctgtcgctgttcgactacaagaccgagaagtatgtcatcgccaagaacaagaaggtgggcctgctgtaccggctgctgcaggcctccatcctggcgtacctggtcgtatgggtgttcctgataaagaagggttaccaagacgtcgacacctccctgcagagtgctgtcatcaccaaagtcaagggcgtggccttcaccaacacctcggatcttgggcagcggatctgggatgtcgccgactacgtcattccagcccagaatgaaggcattcctgatggcgcgtgctccaaggacagcgactgccacgctggggaagcggttacagctggaaacggagtgaagaccggccgctgcctgcggagagagaacttggccaggggcacctgtgagatctttgcctggtgcccgttggagacaagctccaggccggaggagccattcctgaaggaggccgaagacttcaccattttcataaagaaccacatccgtttccccaaattcaacttctccaacaatgtgatggacgtcaaggacagatctttcctgaaatcatgccactttggccccaagaaccactactgccccatcttccgactgggctccgtgatccgctgggccgggagcgacttccaggatatagccctggagggtggcgtgataggaattaatattgaatggaactgtgatcttgataaagctgcctctgagtgccaccctcactattcttttagccgtctggacaataaactttcaaagtctgtctcctccgggtacaacttcagatttgccagatattaccgagacgcagccggggtggagttccgcaccctgatgaaagcctacgggatccgctttgacgtgatggtgaacggcaagggtgctttcttctgcgacctggtactcatctacctcatcaaaaagagagagttttaccgtgacaagaagtacgaggaagtgaggggcctagaagacagttcccaggaggccgaggacgaggcatcggggctggggctatctgagcagctcacatctgggccagggctgctggggatgccggagcagcaggagctgcaggagccacccgaggcgaagcgtggaagcagcagtcagaaggggaacggatctgtgtgcccacagctcctggagccccacaggagcacgtgaattgcctctgcttacgttcaggccctgtcctaaacccagccgtctagcacccagtgatcccatgcctttgggaatcccaggatgctgcccaacgggaaatttgtacattgggtgctatcaatgccacatcacagggaccagccatcacagagcaaagtgacctccacgtctgatgctggggtcatcaggacggacccatcatggctgtctttttgccccaccccctgccgtcagttcttcctttctccgtggctggcttcccgcactagggaacgggttgtaaatggggaacatgacttccttccggagtccttgagcacctcagctaaggaccgcagtgccctgtagagttcctagattacctcactgggaatagcattgtgcgtgtccggaaaagggctccatttggttccagcccactcccctctgcaagtgccgcagcttccctcagagcatactctccagtggatccaagtactctctctcctaaagacaccaccttcctgccagctgtttgcccttaggccagtacacagaattaaagtgggggagatggcagacgctttctgggacctgcccaagatatgtattctctgacactcttatttggtcataaaacaataaatggtgtcaatttcaaaaaaaaaaaaaaaaaaaaaaaaaaaaaaaaaa

SEQ ID NO: 6655 - DNA, 2207 bp, Homo Sapiens
  NM_175085
agtgaggggcggtgccgcgctggtcccgcgccggtcccggtgggccgacttccggcgagcgggcaagcgggaaccaggtggccacccggtgtcggtttcattttcctttggaatttctgctttacagacagaacaatggcagcccgagtacttataattggcagtggaggaagggaacatacgctggcctggaaacttgcacagtctcatcatgtcaaacaagtgttggttgccccaggaaacgcaggcactgcctgctctgaaaagatttcaaataccgccatctcaatcagtgaccacactgcccttgctcaattctgcaaagagaagaaaattgaatttgtagttgttggaccagaagcacctctggctgctgggattgttgggaacctgaggtctgcaggagtgcaatgctttggcccaacagcagaagcggctcagttagagtccagcaaaaggtttgccaaagagtttatggacagacatggaatcccaaccgcacaatggaaggctttcaccaaacctgaagaagcctgcagcttcattttgagtgcagacttccctgctttggttgtgaaggccagtggtcttgcagctggaaaaggggtgattgttgcaaagagcaaagaagaggcctgcaaagctgtacaagagatcatgcaggagaaagcctttggggcagctggagaaacaattgtcattgaagaacttcttgacggagaagaggtgtcgtgtctgtgtttcactgatggcaagactgtggcccccatgcccccagcacaggaccataagcgattactggagggagatggtggccctaacacagggggaatgggagcctattgtccagcccctcaggtttctaatgatctattactaaaaattaaagatactgttcttcagaggacagtggatggcatgcagcaagagggtactccatatacaggtattctctatgctggaataatgctgaccaagaatggcccaaaagttctagagtttaattgccgttttggtgatccagagtgccaagtaatcctcccacttcttaaaagtgatctttatgaagtgattcagtccaccttagatggactgctctgcacatctctgcctgtttggctagaaaaccacaccgccctaactgttgtcatggcaagtaaaggttatcctggagactacaccaagggtgtagagataacagggtttcctgaggctcaagctctaggactggaggtgttccatgcaggcactgccctcaaaaatggcaaagtagtaactcatgggggtagagttcttgcagtcacagccatccgggaaaatctcatatcagcccttgaggaagccaagaaaggactagctgctataaagtttgagggagcaatttataggaaagacgtcggctttcgtgccatagctttcctccagcagcccaggtaaaactctaagcaagttagctgtagtgccatttcagaaactggcctaaatggctatgtagaacatttcattaaccctataagtcattcagtattcttttctctctgtgggagtgatacagtcttggtttgtattttgtttgaatcaaaactggttatagcaatactcaaatggaaaaaacttcatgatagcgtaagtttggaaagtttagcaaaatcacagtggtactgatttttatttgttttctattttttttattttatatttttaatttttttaacagggtcttcctctctcgcccaagttctcatgcctcagcctcccaaatagctgggactacaggcacaggccaccacacctggctaatttttttgtattttttgtggagatggggtttcaccatgttgccaaggccagtctgaaatcctgggctcaagtgatcctcctgctttggcctcccaaaatgctgggattataggcatgagccgctgcacttggcctgatactgatttttattccttgcgttatcacatagtgttgtatttgaaacatagttcatggttttatcaaagaactgaagatgagaatactggtcatctaactttgtaatttgatttgattatactgtaaagtttgacagtctcattttatcactgcgtttgtatctattactaaaatgtattttttgacctcttactgattcattgttggtatgtacaaactgttgacttgtaaaatcaataaagtcttagttggaaaaaaaaaaaaaaaaa

SEQ ID NO: 6656 - DNA, 3952 bp, Homo Sapiens
  NM_175571
gaggcgctcagcacccagggaaggcgcgtgtgtccccgatgctggctcctccctgagccccgacggctctcgaggttctgagcctgtggcctgcacagggaacttcctctccgactgcatttatgcctctgtggatgtgaaggctatttctagaaatctcttcctttgcagaaacacccgaaaccctcctgccaggaagaccagggcctgggaagagggtcgctctccggccattctcccctcaccctcctcaccttcctcacatcctgtgccctgggggaccagcagctgcttccacccagaacaagcgggagcctgtgtcaggaaagcatgtcagagcagagctgccagatgtccgaactgcggctcctcctcctgggaaaatgccgctcgggaaaaagtgccacaggaaatgccattctgggcaaacatgtgttcaagtccaagttcagtgatcagacagtgatcaaaatgtgccagagagagagttgggtcctgagagaaaggaaggttgtggtaattgacacccctgaccttttctcctcaatagcttgtgctgaagacaagcaacgcaacatccaacactgcttggagctctctgctcccagcctccatgctctgctcttggtaattgccatcggccatttcacaagggaggatgaggaaacagccaagggcatccaacaagtgtttggagctgaagccaggaggcacatcattattgtcttcactcggaaggatgatttgggggatgacttgctgcaagatttcattgaaaaaaacaaacctctcaagcagttggttcaagactatgagggccgatactgcattttcaacaacaagaccaatagtaaggatgagcagatcacccaggtgttggagctccttcgcaaggttgagtctttggtgaatacgaacggaggaccctatcatgtgaacttcaaaactgaaggcagcaggtttcaagattgtgtgaatgaagctgcatctcaagagggagacaagccacagggcccaagggaaaggcagctgcagtccacaggacccgagcagaatccggggacatcagaactgacagtcctccttgtggggaaacgcggtgctggaaaaagtgcagcaggaaacagcattctggggaggcaggcctttcagaccggatttagtgagcagtcagtaacccagagcttcttgtctgagagcagaagctggagaaaaaagaaagtttcgatcattgatgctccggacatctcatctttaaagaacattgactcagaagttagaaaacacatctgtacaggcccccatgccttcctgctggtgacaccactgggcttttacactaagaatgatgaggcagtgctgagcaccatccaaaacaattttggagaaaaattctttgagtacatgatcatacttcttaccaggaaagaagatttaggggatcaggatctagatacgttcttaagaaacagcaataaagctctctatggtctcatccagaagtgtaaaaacagatatagtgccttcaactaccgggcaacaggagaagaagagcaaaggcaggcggacgagctcctggaaaaaattgagagcatggtgcatcagaatgggaacaagcattgcgttttcagagaaaaagaaaccctgaacattgtccttgtggggagaagcgggactgggaagagtgcgaccgggaactctatcctggggagcctcgtcttcacctctcggctccgggcccagccagtcaccaagaccagccagagtggcaggaggacatgggacggacaggaggtggtggttgtggacactccttccttcaaccagatgctggatgtcgaaaaggacccatcccggttagaagaggaggtcaagcgctgtttgtcctgctgtgaaaaaggggacacattttttgtcctggtgttccagctgggacgattcactgaagaggacaaaacagctgtggcgaaactggaggccatctttggagcagactttacgaaatacgcgattatgctgttcacccggaaggaagacctaggggcggggaatttggaagacttcatgaagaactcagataacaaagcccttcggcgcatttttaaaaagtgtgggcggcgagtttgtgcttttaacaacaaagaaacaggccaggcccaggaaacccaggtgaaagctcttttaacaaaggtcaatgatctgagaaaagaaagtgggtggtccgggtatccccatacacaggagaacgtcagcaaactaattaaaaatgtccaggaaatgtcccaagccgaaaaactccttaaaaatttaataggtattttacaataggtagccgaagtgcctggggtctcttcaattagagacaccctcaggttggggggaggggcggggcatggtacaacctgtgggaagggaagcgggttcatggctttgagggcctgagaggcaaatgcatcccgccttgtgatgtatcagctatttgtagataaataaattgcaggtgggggcgaatagtagggtattataaaggagaaagaagatacaaggtggggaaatctggaaaaagatttcagacattaggctgataataagtggtagaatcaagtcacaagaatcacctcacttgtgtaggtaggttggaatcaggatagacactgtgatcaaggctgaggccacctgggatgagaatatagatagtcgtacaacaacccaggggatccagatacatgagaccagggcagcgttcagcacactcctgggcatggcggaagcaggaagcagactccagagggcctccctgttgtccagggccgttggctccctgagctctcctgtctcctttgggatgcgacttagggctagagtgttcttttcttcacacgttagccattccttacggctcttcacgttccacgcctagatgtgaagtgggacatagtcttccattgctggctgtccctgaggaaacagacatgagtcttggaggttctgaatgattttattgctaattatcacagtgacatagactagaacagaaattagaagcatagtaagattgccaaaatcagagaatcttgcaaagttctgtaattctaagtgttgttctagatttcctctagagaaggttattagaatctccattgcgtttctctttctccttctctttcccttgaggttaggaaacaggttaaaactcagagaactccaataataatggtttaaaaacatcaggggcttcctgtatctcctgtcaggaagccgaggaataagcaggctggggctggtgggcgtcaacatcccagttttgttctatctttctgtcccacctgcactgggatgtggcttctacactcgaatttgcttcttggtttcaagacagtggtgttctttccatagctgagcagattattttgagaggtgggtgatatgtgagagagaaatctggaaccttcttctgggtagatacaggataagatagatacagggtaaaatgttgagcactttgtacatgctttgagagcataatctttgtcatctgtttttttcccctagacaatatcaggttaccgtcaacattaatccatttaaaaggacatggactgttgccattaatacttttggattccatataacccttaacacaataacttctagaaaatgtgtgtgccgtagacacaaagaagggaacaatagacaccagggtatacttgagggtggagggtggcaggagggtgaagattgaaaagctgcctattgcgtgttatgctggtttcctgggtgacaaaattacctgtacaccacacccctgtgacacacaacttactcatgtaacaaacctgtgcatgtaccccttgaacctgaaataaaaattggaaagtaaaaaaaagtgtgtaaatatatttagttgaatcaaataataaagatgaatcattatgaattcacaaaaaaaaaa

SEQ ID NO: 6657 - DNA, 1799 bp, Homo Sapiens
  NM_175616
agaccacgaacccaccagaaggaagaaactccgaacacatctgaacatcagaaggaacaaactctggacacactgcctttaagaactgtaatactcaccgtgagggcccgcggcttcattcttgaagtcagtgagaccaagaacccaccaattccagacacagtgggatcacagagagagccaacagtccaggccatgacaagctggcacccagctctgcttcacatttgtccaactggcgtggctgtagctccttcctgcaaggcaatgctgaagaagctatggaagcaagaaggaagcatggattctaaaaactgacaacaaaccacttacccctattgctcttcttcctaaagctaaaggatcaaactgcatcacggaagctgcacacgatgacaccctgtctggaaagtttttgccagagggcaaaagactgcaagcagaatatccctttgccatttctcattcaggactggccgttgtctgaaagcaaacctcaaggacaggacttctggactccgcagccacttcaggctgctgctccatcgcatgaattccagcaggtggcgctgcaccccgcgcggacccggcttgcctctcggccccagggaggtcggttgatgagcagtcgggaagtgggtctgcgcgcaccccgctgcagctgtggcaaacgcaaacgatgacacacaggcttgacgagggcctttgtcagaagcaatggggatctggcgtcaccgcacaatggaaaacaaagtgcttctgcctggctggccagaatgcacgtttgctcactattgatgctggggcatttacaggcagaatgagttcatgtgaaatttcaggatctgccatgactcagattcactttctgtaaaccagagtcaacattacatttccctttactctgggccattccttgaatttttaggtcaccagttgtttttgtactaactgaagggatttgagtatttcacaagcaccttatttttattagcatttttagggcattaccaatttgggacggatctgtagtgtgagagattgttgtcactcttagctccaaacataggttgactttatatattatttacatgttcagaattatactgtgtagaaattcaaatgaaacttgcaaaatacttttctggcaggaagccctggagaggatcgttcatggaaacaaggatgacgactggggtaagaaatgcaggtgactcgtgagtggtcagggagtggaagagaagacggctggaaggttttagcattcagaaaaaaaatggagacaactagagttgatctgaagattatggcagaattcaatattgggggaaagaaacaagatgggggttagaaattagaaacagcagagctccacaggttggaaaggttggaaaggatttgagcaagagaacaagaaggagcctgctaatagcaccctgggtttacatcaagagaagcacctggagagaattaactcgggaggaggtgggggcatgggaaaccttttcatctccaagagcgggcaggaacagcagctggcctgaacttgaaggtacaccaggtagcttgcgtgggccaggagaaggtgattctcttctatgcctctctccaacgccctgcttctgatgctgctcctctacctgtattgaggggaagatacatccctaagaagttccctgaaccccattctttgttgtggctaactggtccccttggaatttttctactaattttcaattccccctctcacctggtgaaatcttgaatcttactgttcaataaaagttcttctaccgaaa
